United States Patent Application Publication US 2019/0348154 A1 - sequence listing, part 45

SEQ ID NO: 167774 - DNA, 1266 bp, Enterobacter cloacae
atgtttgcactgtgtgatgtgaactctttctatgcttcctgcgaaaccgtttttcgcccggacctgaagggccgacccgtggtcgttttgtcaaataacgatggttgcgttattgctcgttcttcagaagcaaaaccctttgtaaaaatgggtgagccctattttaaacaaaaggatctcttcaggcggtacggtgtggtgtgcttcagtagcaactatgaactctacgccgatatgtcgaaccgggtgatgaccacgctggaagagatgtctcctcgctgcgaaatatattcaattgacgaagtattttgtgaccttaccggtgttcgaaactgtcgcgatctttcggaatttggacgtgaaatcagagaaactgtactacagcgaacgcatctgacagtaggagtcggtattgcgcagacaaaaaccctggccaaactggcaaatcatgcggcaaaacgatggcagcggcaaacgggaggcgtcgttgatctgtcgaatgaggatcgccagagaaaactgatgtcagtcctgccggttgacgacgtctggggtgtgggtcgacggattacaaagaatcttgaagctatgggtatcaaaacggtattgcagctagcggacaccgatattcggttcattagaaagcattttaatgttgtgctggagagaacggtccgtgaactgcggggggaaccatgcctcgacctggaagaatttacaccagtaaaacaggagatcatctgttctcgttcgttcggcggccgtattaccgaatacgaagagatgcgtcaggccatctgtagctatgcaacccgggccgcagagaaactgcgtaatgagcaccagtactgcagatttatctcagcatttgttaaaacgtctcccttctcgcctaacgaaccttattatggtaatagctcttcggtaaaactgctcacaccgacccaggacagcagagatatcatcaatgcggccatccgctgtctggatgttatctggaaaaacggtcatcggtatcagaaagctggtgtcatgctgggcgacttttatagccaaggtatcgcacaacttaatctgtttgacgacaatacaccaagggaaaatagccaaaagttaatggatatattagatcatctgaatgctaaaaatggccgtggaacgctctacttcgcgggacagggtattcagcaacaatggcagatgaaacgggaaatgctctcacctcgatacacaacacgatttgctgatctactcactgttaagtga

SEQ ID NO: 167775 - DNA, 420 bp, Enterobacter cloacae
atgcagttttttacacctactgaactacgccagatagtggcattccccatgttcaatgaccttgttgcatgtggctttccaagccctgcgcaggactacgttgagcgtcgtatcgatctaaatgaactgatgattcaacaccccagcgcgacctatttcgtgaaatccagcggtgattcaatgattgatgtcggaatcggcgaaggtgatttgctggtagtggatagctcccgcaaggctgagcatggcagtatcgtcattgctgctgtcgacggtgaattcaccgttaaacgtctacagttgcaccctattgtgatgctcaagcctgaaaatcccgcttacaagcccattctaatcggtagcgaagataaccttgaggttttcggtgtagtaacctatatagtgaaatctgcgagctga

SEQ ID NO: 167776 - DNA, 2139 bp, Enterobacter cloacae
atggacattgaaatacgccactgcaataacatcaatcgggcacgtatcaccctcacggaaaataaacttaatatcaaatttgcgcccaacggaacaggaaaaagcacgctctcccgagctataagctgtgcggccagggacgattctcatggtctgcaggcgctaatgcccttccggctacggggagaaaatcccgataatacaggacccgaagtcaccggcgctgatgggattggtgaggttatgtgctttaacgaagagtacgttgggcagtttacgttccagccggacgaactcatcagtaacagctttaacattctcatccgcaatgaagcctatgcagagagagaacgggaaatagaagagatgacgcaaactatacgggcagtttttacggatcacacagagttgaactccctgatagatcatctacaggagctcagcagtgcgttcaaattaaccagttccgggatatcacgttcttcaaccggcatgaaaggcctttcaggcggaaataaaatacaacacattccggctggacttgagaactatcagccctatatacgcagtgaacgtcgcgttgaatggattgactggcaaacaaggggactagagttttctcctctttcagaaggctgctgtccattctgcaccggcgataccagggtaaatgaagcgcaaatccggcgggtcagtgtggagtacgataaaaccaccataaaaaacctgactgccattatcaaactggttgaaaacctcggcagttacttaacggaggacgccaaaaagcggcttcttggcatcaccatgcttcaaaacggtccggaagctgaacatatcgagtatctagtggcgctgaaacgtcagaccgacaccctgactgagaaactcaccgcactgagaagcctcaatgcctttagccttcaggagcatcagaatgtccgagatttgctgactgccaagctgatcgatctgcggttcttccccgatttgcagtgcgaactgacgcagggagtcactgacaggctgaacgcggctcttcacaggctgataaaccttgcaggaccactgcagggcagtattaaccggcaccgggacagcatgcaacggctgatcgcgcagcataaaactaacatcaataattttcttacctatgctggctataaatacagggtggacattgtcggcgagggcgatcagcgaaaactcaggctacgacacatagattttgacggttacgtcaacggtggcagccagcatctgagctacggtgagcgtaacgcgtttgcgattgtgctgttcatgtatgaatgcctgtcgaaaaatcctgggctgattatccttgacgatcctatttcctcttttgataaaaacaaaaagtttgccattctcgaaatgctgttcaggcgagccagcggtgaatgtctgaagaatcggaccgtactaatgctgacgcatgacgttgaacccgttattgatacgctgaagtcggtcagaaagctgtttagcaatctggtgaccgcatcctgcctgcgcctatccgatggagtcattgaggaattacccgttaacgacggcgatatcatgacgttcttgcagatctgcagaaccatcacagcttcagcagagtgtgaggagatcattaagcttatctatcttcgtcgctactttgaaatcgttgatgaacgtggcgatgcctatcagatcctgtccaatctgttccaccgtcgcgcggtccctctggatcatcgtgagcccgcagttgcaggcgcgggctttcccgaactggagcctcagaaagttcagcaggcccagcgtgacattcaggagtttgtggacagttttgattaccatcgagtctacaccctcgtcagcagccctgatgaaatcaaaaaactgtaccgccgctgccgtaacggctatgaaaaattgcaggttttccgtttactcgaactggatcaggaccatccggtgatacggaaattcgttaacgaaacttaccatattgaaaatgagtttatctgtcagttagatccgtccagattcgacctcattccagagtacgttattgtagaatgtgacaagctcatcgccctgcctccggcggcaaatctgggcacgattgcccgtaccgcctga

SEQ ID NO: 167777 - DNA, 438 bp, Enterobacter cloacae
atgctatgtgccttcttatcatccggattctggttctaccggcataatctcagttttgcctgttcttcgtcgaccgcatcctttgcatcaaacatcaataatgcagtgacactaaatttcacccagaatatgacgttttcttatcgaggacaggccgtcattcatctttccggagatataaatgaagatcatactcgttatgtgatgaaccggaccgttgtgtatacctatacgcgcgccggtgacagtctctatagtatgagggttgcgcacgccacccgcacaggcagcgataccgtgccggaacacctggaaaaaggctatctcggcccattacttaccggggcacatcgcatcatcgggatacgtagtatgccgagcggtgatatcctgatctccaataacgccggtccttatctgatctgtgccgtgcattaa

SEQ ID NO: 167778 - DNA, 720 bp, Enterobacter cloacae
atggtttacctgattgatggagtggtagtttacgatgcactgaacggcaccctgcggcggacaagtgagaaggtagtggatgcggtaaacctaacgacgattgccaacaaaattttatggcatctcttgctgcatcatggggagctggttactcgggacacgctgtttgatgagatctgggagaaggagggaatcgtttcatcctcaaatactcttactcagtacatcagtctgctgcgaaagactttttcccgttatctcggaaataaagaggtcattgttactgtcccgcgttcaggctattacttcagtaaggatataaccgttacggggaatgcggggaatacacgttggcggcctcagttaaaacttgttgtaactgtatttgtcatcctttcgatgatgttttccggtatgttttttttcacatctcgtccgacgacagtcaacccgcgtaaaattggtgagcttaaagggtgtcctgtttacgatatttccggcgttaaaagcgatgtcgctgacgcgtcaagttttgaagtggccagaaaggcacttgaaatgaataaccagatttgtacagagaccactgccttttatatctatgcacaggaggctctccatttgcacaagccagcacgcattatgttcagccgctgtatcgaatggcatgatgagcgggatacctgccagaatatctattattacacgtggatacgttga

SEQ ID NO: 167779 - DNA, 711 bp, Enterobacter cloacae
atgaaaacagcgttaatgtcacatttgacacacggtctgcacaatgaaattgagcattatcgtcttgagccgttcattgatttaacatgcaaccatattgtcggctacgaggtattaagtcagctgaagcaccacgtggatacggagcagtggtttactcgtctctcgggtcgccagcagatcgacctcttgctggagcagataaactgtgtccatgaatccatggcggtgacctgtttttataatctctccgtgataggatttatttacctgacgggtgtcgatattgaacggatttctggctttaatcatatcgcccttgaaatatccgactcctcattattgaaagtgctggatcgaaaggaacagtacatctttttcaaaaacacaagacgcttgcaagtaaggggggttaaaatctgggtagatgatttttgtcttgatgacttaattagccttccactttaccaggagaaatttgacggcattaaaatagatcgtaaagatacacgttctccccatctcggagagatgattgaaattattaagcgtattgtcggggatataccggtactgatagagggggtagagtcagaaaatgaccttgttaaaggcatgcgttgtggagcgaaccttgcacagggttattactggaacgataacaatctgaaaaaaaatatttctgagattattacccagaatttaacatga

SEQ ID NO: 167780 - DNA, 573 bp, Enterobacter cloacae
atgaaatatcaaattgaaacacaggatcactatctgcgcgttgctctggaaaatatcttactgataccagccaatgaaaagaagatttgtataatcgaccttgcatcgtttcatacccttggtgagatacgtgcatgtataaaagtacataaagactattacaggtatcttttgatcggggatgaaggggtttactccagaatactcagctcccaggtgtctatgaacaggaaaatgtcgctgatggaatatcgtaaaattatccaacattacccgagcattaactatgagacgttgagtcgcagtattgatcagcatctaaatatggaggggtttacgcataaagaaaactcaacgatatacagtctcctgatccatgactcgtttatcagtgcggcaaaacacattggcattaaccccaagagcttttatcaacgtgttgatattttgggtaagaaactgaacctatcaaacaggctgcagacccagctgtatttaaggagagaatttctaccggattcagtacggcacaggataaatgagcagatacggcaggcatttcgtgtcgcctga

SEQ ID NO: 167781 - DNA, 519 bp, Enterobacter cloacae
atgaaaattaaattgactgtattggtcgtcagtgcattatcactgcctgtttcttatgcggctgtggaaggcgaaaggagcactctgtatttctccgggaagattgttgaaagtacatgctcgctggatacttcaaatgccgcacagcagatcgatcttggcaccatttctgccaacgtgtttaacgggtccaacaccttcagtgagcagcaggcatttaccatacagctgaatgactgttcaacgtcagcctattccaatgcgacgttaactttccgtggcgataccatcaactctaatactgagttaaatgtcacgggcggtgccacaaatctgggtcttcagatcctggaaaatgggacgcctctcgcgatggatggctcctcttccacggcagacaaagcactggttaacgggaccaacatattcgaccttaccacgcgctatatcgccctcgacagcacggtgggtgtcggtgccgcaaatgccactgtgaacttcatggtggaataccattaa

SEQ ID NO: 167782 - DNA, 705 bp, Enterobacter cloacae
atgtccggtaagaagttaaaaaagctgatttcagcaggtctcgtttattcgctggccctgattttctcatcacctgcattttccagcggtattgtgctggccggcacgcgtattatttaccctgccggtaccaaacaaattacacagtcagttcgtaacacatcggataaaaacagttatctggtacagtcctgggttgaagccgctgacggaaagaaaacaactgatttcattgtcacccctcctttatatgtgagcaaaccgggtgatgataatattattcggatcatgcacgcaggtaaatcactgccagctgaccgggagtccgtgtattactttaacgcaaaatcggtaccgtcggtcgataaaaaggcgttggaagggaaaaatgtcctgatgattgctgccgtcacgcggatcaagctttttgtaagacccgctaacctgaaaccgtcccaggcagaggctgcggacttgctcacctttgctcgcgcgggtaataaaatgacgattaagaatccttcgccctattatatcacgctgacggatattaaggccggtaaaacaaaactcagggacacgatggttgcgccattcagtgaagaaacggttgttctgcctgccggacataacgctgcagttcattacaccactattaatgattatggcgccacctcgtcggtaaaaacggccctgttaaaataa

SEQ ID NO: 167783 - DNA, 2601 bp, Enterobacter cloacae
atgcgtcaaaatatatttaacacattaacgtgtgcggtcattctgttcccggttgccggatataccgccgaactttattttccacctgaacttctttcagtcggagaacaacaggtcgctgacttatctcacttccaggggaagggttatcagcctcccggagaatataacgttgatatatatttaaatcagtcgtttgttgattcgaagacagtcagttttgtcagccggacggcagaggcgggtgaggtaatggataaagaacaccctcacgacgatgccacaggcctcattgcctgcctgacaagaaatgatctgttgctgttaggcgtgaaaatgtctgacattccgggagcagccataactgcgaataagacctgcctgaaccctgaagaactgatccctggcgctttcagtcgttttgattttacccgcatgcgactggatatcagcattccacaggccgcactcaatacgcctgcgcgtggctacattgacccggaactgtgggacgaagggatcaatgctgcactgctgaattatcagttctccggaagccatcacaccacatcaggcaacggcagcagcgaaaattattatctcaatttaacgtctggtgtgaacgccggtgcatggcggctgcgtgattaccggatatggaactactacaaaaataactattcctcacgccagcagtggcagcgggtgaaaacatatgtggaacgcagtatcataccgctgcgcagcgccctgacgctgggagaaagctccacgagcagcgacatttttgactcgctcagtttccgggggatccagctgaatacggaagatgcgatgtatccggatacgcgccgtggctatgcgcccaccatccggggcgtggccgagagtaatgcccaggtcagcattcgtcagaatggctacaacgtgtatcagaccacggtggcacccggtgcatttgaaatcagcgatctctatcccatgtattcgagcggcgatctggaggtttcggtcagggaggccagtggcatggtccggagcttcaccgtgccttattcatcggtaccgctcctgcagcgtcagggacgtgtcaagtacagcctgacggccggccactaccagaacagcagtgtgatgtacgacagcccgtcctttgccgaggcgacgctgctgtgggggctgcctgcgaatattacggcgtacggcgggatgcagtactctgaaaactatctgtcggctcagttaggcagcggtttcagtgcgggctccctgggtgccgtttccgtggacgtcacgcatgcggacagcacgttaaccgacggcagtaaacatcagggtcagtcgttccgttttctctatggccactcgctgaatgccacaggcaccacggtgcgcctcaccggctaccggtattcaacaaagggctttcataccctcgaagagacggcacttaacagaatgagcggccgactgtatgaacaggggatttatgacgaatcaggagaattaatccgcgatacctacacggattacttttcactttacaacacgaaacgtgcccgtatagaggcaaatatttcccagtctctcggccaactgggtgctatgtatgttaccggagtacgtcagaccttctggggtaccagcgataccacgaactccctgcagggcggattcagcagcagcatcagtgcggtgaattattcactttcgtacggttataacaggtataccagaacaaacggaccctcaaataacgaacgcaccatcaatctgtccttgtctgtgccgctgggtgcattgctgtcgccgggaagtaaaggcagttctctgcacgccacctacacggcaaaccgggataatcagggaaacatgagccatctggctggattaagcggtactgctttggagcaaaacactctcagctggaatctgtctcagggccatgccaggaaccagggctataccggtaatacaggtgtgtcctataagggcgggagcggaaacgtgaatgccagttacagctatggcagtgactataagaaaatcgcctacgggttcagcgggagtacgcttttacacggtgacggcattacgcttggtcagccggtgtatgacactgcggtcctcgtcgcagcgccaggagccccggacatcagtttaaagaatgaacgtggtgtcagaactgaccggaagggatacgcaattaagccctatgcgtcctcataccgtgaaaacagggtgtctctggatctcagccagctggatgataaaaccgaaattgataatacggtatttcgtgtcacgccgacaaaaggcgcaatcgtcaaggccggttttaacgtacataagggtgagaaactgctggttactgcgatatacaaaggcaggcctgtcccctttggttctgttgccgcatacgaaaatattaccgggattgtgggagacgaagggcaggtatttatgaccggtatgcccggaagcgggaagattactttccgttggggagatcaagacaacaagcattgttctctccgatacaaaagcagtgctgctgataacacacagtccataacccgcgtcaccggagaatgcagatga

SEQ ID NO: 167784 - DNA, 519 bp, Enterobacter cloacae
atgattaccgtacagaaaaaccaggtaactatatttcttattgctctgatgttttcaggcttcatccagaaggtaagaagcgaaccacagtcaacaactgtcaccatatcaggagcagtattaccccgtacctgtgcatttgaagagtcggtacagaatattacattacctgatgtattacgcagtgatttcagtaatcaggatttggccggagcaacgccattcacaatcaaagtggaatcatgtgcttcctttgtcagcaacttaaatatacgttttgaaggaactgaaggtgggaagcaaaacacatttataaatacggggacgtctgaaggttattccctggccctttttaccagagaaagtaaccagtctgtttatgacggcgtggcactggttatgcctgttcagcagggaagcggaagcatagacatggttgctaaataccaggtgtatagtgataaacccgtagcgggttcattcaaatcaatcgttaatatttcccttgaatacaattaa

SEQ ID NO: 167785 - DNA, 831 bp, Enterobacter cloacae
atgaagatttcagtttttatagctgtcacttttttaatgttcagtcagttttcatccgcacagttaatatcatgtgaacgaactgcatttcgtcaacaagatatagatttcgcaagaggagatatgtcattcactatgaatgaggcaaacacacctataactgtacgaacaaaaccgaagggagtcgtttatttacaattaatggcgctaggcaatcctgccacaaatattcctgataactataaccttatgaaggattcgagtcattcggataatgaatgggatgcctggactacgactctacctgttgtttaccctgtcagaaattcattccatgttaaggggcgtatgctcggtgttaactatccagtcagcgctgatgttggaaatcctggcgatatgaagaacataaatataaccggtttgccatcaaataataacttatatccaaccccacaggtaatgttatctgctcaacttgaacgggttgggtccagggcaacgttttcagattccgttgtcgttgatgatattctggcaggagaatcaatcaccgttccgataggtattgtaagccatggaagcatacttgtatccgataatcaaggctcatcaagtaaaatgaacatgccaaccgataatgaaaatgtaactatagatatttactcaggtgtagagggttcttctgacaattatctaaataattctggcatgactattttgtcatcaccgggaaataccgctttccagactatggcaagaataaataccaatttcaatgcagtcggtaaatatagcaaaacaattaccatgacggctggttgcccgtaa

SEQ ID NO: 167786 - DNA, 300 bp, Enterobacter cloacae
atgtccgtacctgtcgtggctatctttcttgcaaaacctggcgctgaggtacttgttgaacaactattccgctcggtcattgacactactctggaagaggatggctgcatgcgctatcagctcaatcgtgatacagataatccgcgccgatttatctggacagaagagtgggagagtaaggcactactggagcgtcatctcagcgccccgcatatcacgcatctgttaagcgttattcctcagtatatcgaaacgtcggacattattgtgcttactcctctggcgggaggcgctgtgtga

SEQ ID NO: 167787 - DNA, 1644 bp, Enterobacter cloacae
  misc_feature (266)..(275): n is a, c, g, or t
atgagcatattaaattctgatgataatagagtactagctccagcttggtataggtctgaggatgcgatatactctgctgagttgcgtgcgctcaataaaataaagtcagtaactccagagttttctagcttagagtatttgcttgatgtttttaagaaatgccctagctttgacatagccttggagttgtttagtgtggccttcactgaaaactcaattgatattgctaagatggctgcacagtatattatagagagtaacaaagnnnnnnnnnngactttaaaaatattttgtgagaaagttatttttaatgatactaaaaatagtgtcttacacgaaaatatcaaggagcaaataaaatataaaaaaatatggttgagggaaaatccatttgactgtctttcttgggttgatttgtcacgtttatatatgtctgttggtcagtcaaagcaggctgaaaaggcaatgttaactgggctgggattatcaaataacaatcgttgggtaactagagtttcatcacgattctttttccatcttgaagaatatgagcgttctcattcgattttggtcaaacatcctaatataagcaatgatccatggttactagcatcggaattggctatttcgaattcatacggcagaaattcaaagttttggttaaacgctaaaagagcattacaatttggatattctccttgccatacatctgaattacaaagctcaattggtaccctggaactgaaaagtggagctcttaagagagctaaattactttttagcaattcactagtacatcctaacggaaatgttttcgcgcaggcgaaatgggcagaaagaaaaggtaatataaaaaatcttgtgcagcatgaagatttaattaagcatcagaaagcttttgaggcgaaatatcaagaagcatactataataaaaatatgacattagctctattattcgctaaagagtggttagaagaagaacccttcaatcccaagccagctattcacgcatcttatatcgcatctttattggatgattatcagcaatgcagagatatttcagaaaaaggtttgcaaattaatccatctgacgaaactcttaaacttaatttgattttctcagagatttctttggaacaccttgaaaaggatggtgttacatcagagtcatacctgaaggctttggatgttgttaatgaggtattgagggagggtgatgaggaaactcttcctcatgcttacgctaatttgggcttgttatactataagaccggagatttggagaaggggaaagaattctacgagttggccactgaatattttaaaaggaataatcaccccagttttgtacttgctgaattaaatcacttaagagaggcgttgatttctgattctccttggaaagaaagtttgttcaagtctttagaggagtcagctaagttaggtggggtatgggatgagccttgtgtgtctttttatctggaaaaactgcaagcaataagaatatctcctcaaaattggaaggttttgctaaccgaacagaaaaaacaaattgttgaggaggaatctgctgtttttcctcgtgaacggtttgattttagcaatcaatcaccaacaatatggttaccccccaaaataaaataa

SEQ ID NO: 167788 - DNA, 1110 bp, Enterobacter cloacae
atgtcacaaccctctcaatcactgagtccggcaaaacaattaacaggtgagatactaaatgaacgttggttggttggagagcgtattttagtaggaacccaagctggtggtaatggcaccggcggacatttttcggtttcttaccaagtggaaagtttagataagacccaaaaagcatttctgaaagcctttgactttcatgaaacattaatgaagtctgtggaagataataaagacgttatggcagaattcgctggattgacctctaattatcagttcgaaaacaagcttaatgaaatctgcatatctaaacgttttaaaaaaattgtaaaggttttagataaagggcagaaggtcattggtggaaatttcctaaatgttgttccttatttaattatggagttagccgatagcggtgatattagaaagtatgttgagatcactcaagaaataacgctatccgcaaaattagaatatcttaaagatgtagctgtagggcttaatcaattacatagcgcaaaaatttcccatcaagatttaaaaccatctaatgtaatgatattttccgacttgggtgcaaagatcggagacttaggtcgtgcaagcttgcaaggacagccacactggcatgattcaattgatatcgcaggtgaccgcggatatgctcctcctgaacaactatatgggtatgtcccacctgaatggattgatagaagggaacgttgcgatttatatcaacttggatctcttgtcactttcctctttcttggagtgacgatcaatggcttattgaagcaaaatcttccgttagaagttgcgccttcccaatggggtggtgctggtgactcgtatgtacaatcacttcatcatattgaacatgccttcaatgaatcaataaccaattttgacacattagaacctcgttggttatctgataggctgaaaaaaatagttattaaatgtagccatcctgattatacaaaacgtggaatgatacaaacaatagggatgaaaaaaccaatattaggattggatcgacttgtaagtgagtttgactacctaattaaacaggttaatataaaaagcaagttaatttcggagcagagatga

SEQ ID NO: 167789 - DNA, 474 bp, Enterobacter cloacae
atgattacgggcgtgagaaccatcgaattacgcgcggcattatggcaagaatttgatctggataacgctatttgggaaattcccgctgaaaggatgaaaatgcgcaggtcacatcttgtgccattgtcgtctcaagcgttagatttactccgtgaactcaaaatcatgacagggaactatcgtgatgtttttccggggcggaatgatccgaataagtctatgagtgaggcaagcataaatcaggtcataaaacgtattggctatagcggacgaactactggacatggttttagacatacgttatcaacaattctacatgagcagggatatgagagttcatggatagaaatgcaactggcgcatgttgataaaaacagtatccgtgggacgtataatcatgcaacatatattgatagtcgtagggaaatgatgcagttttacagcaatgttatttttgaggttaaaaatgattaa

SEQ ID NO: 167790 - DNA, 1212 bp, Enterobacter cloacae
atgattaaaagtttttattcgaattctttgaataaagaataccaatttttaatgggtgatgaaaaagttaatgataatgtgtttactatcatcgttggtaagaatggtgttggtaaatctagattgctaaacgatgttatcaatacttatttaattcaatatgacaaacagactaaattagttttcccaacaaaaataattgcagtttccactagcgtgtttgaccgtttccctttgtttaatagacctcgttcatcaggttctgtgccaaactatttctatgtctataatggtgtgagaagtcaattcggtagtggtgtgatgaggcttattaataacgttgggggagcgctaattaataatttcttaaacagtgtcgacattgaccgaggaaacacagcaagaatatttgatttcctagaattcaaagatgagtttagcttagcattcagaattcatcatcatcggattaaacatataattgatagattaaatgatgatgataatgatgatcctattagatttggaagtgtatccgatcttgcttggtcaaagaatgaagcaaaagaaatgattcttgttctggaggaggtagctagatatttttcatttgaaagaatctacgataagcaaagtgatattagatggatattagatttttcaaattctaagaagctatgtataaaagatggagttgaagtgcaggagttcattgtaatgcaacttcttaagcttattaacttcaatatcatatcagtccactctttagtggtaattgatgaacctgagattagtctacatccagaatggcaagaaaaatatatagaaattgtttctgaggttttttctcattataaaggttgtcattttataatagcgtctcattctcctcaaattatttctcgtttaaaatcaaagcacagttatgtattgtccttacacctcaataagttatttaatgcggatcattttgtaaaaaaatcctctgattttttacttgctgaattgtttgatagtcctgggtataagaatgagtatgtgactcgaattgctttaaatgtttttgcgaaagttaaatcaaagaaaatgtttgatgatgatgatgtttatactatacataaacttaaagaatttaagaaatttgtagtgaaagaagatccggtgtatgagttgatagcctcattggaggagatgtatgacttctattcctga

SEQ ID NO: 167791 - DNA, 660 bp, Enterobacter cloacae
atgacttctattcctgatattactatgccatatcaattctcaaaggaagagttagcttttctaggtgaattgaaaaaacgtcctgattttgatcataatatttggtcttgtgatgaacttttaaatttgcgtaaaaatattaggcaacactaccgtaaggtgcaaaagggaatatgcgccttctgtaaggaacctctttccttacaatcagctaggaattgtgatatcgaacatttaattcataaatctggaaatgaaaacttcatgtttgagccaaaaaacctttgcgttctttgtgctgattgtaatgaaataaagagggctcaggaaattctaggcgatttacctaaagttgttaaagggaaagcagttaaatatccaagttcgtccgatagattcttaatatatcatcctcattatgataaatgggataggcatattaaaaaattcaataaaatatatgttgatcgtactaagaaaggtagttatacgatccatgtatgtaagctgaataggttttttcatgagtttgatatagatgaagaatatgtcagtgaggcagatctaacagatcttatgagtagatatttaaatgaaaatgatgctcttaaaaaaagcaccattctcaatagcattagaagcttgttaaataacttttaa

SEQ ID NO: 167792 - DNA, 966 bp, Enterobacter cloacae
atgagtattgataaagggcagctaaaccgacgctcctttttaaaaggactgattgcgctgggtaccgtcgccgcattacccggcggattattatcatcccgatgtgccatggcacagcctcccattccgtttaacccgaaaacctacaaaattttccgtaacgcttgcccgcgtaactgctacgacacctgcagcttaaaaacctgggtcaaagatgacgttatcacctttgtcgacggggcgagcgagtccacgtttacgcacggcgcgccgtgtgtgaaagggctgacctacccgcgccgggtctactccccggatcgtattaaatacccgatgattcaggatggtcgcggcagcggtaaatggcgtcgcatctcctgggatgaagccatgcagcgcattgccagcaaaatgctggagattaaaaagaaagacggctctatgctcggcctggcgctgtcgaaatactccggcaacctgggcgtgatgagctatgccgtggaaggaatgatgtcttctctcggttacaccacgcggtttgccggtacgccatgctggccggcagggatcgatgctcagcactacgacatgggcgacatgtggtgtaacgacccggaagatctggttaaagcaaaatacatcattatctggggcgcaaacccggcgtggtgctccatgcacaccatgaagtacatctatcaggcgcgtgagaaaggggcgaaagtggtggtcattgatccgctgttctcgcaaaccgccgcgaaagccgatctgtatttgcgcgtgcgcccaggctcagacggtgcgctggcgctggggatggcgcgccatctgctggatataggccgcgtcgaccaggagtttgtgaataacttcgcgcacggtttcccggagttcgagcagtatctgcgcagcaatatcaccgttgagtgggcgtctgaaatctgtggcctgtggcagacgtaa

SEQ ID NO: 167793 - DNA, 216 bp, Enterobacter cloacae
atgttcccgctctccctgtgggctgagggatccccacaaaagaatgccagcacggacgaccccctctcccttgagggagagggctggggtgagggggaacatacggctctggtggtcattccgttcaccttatgttccttgctactctgtatcgcggtgaacgtgccagggcggctcaatcgccgccgccctggcgacccgggctcccggcggtaa

SEQ ID NO: 167794 - DNA, 834 bp, Enterobacter cloacae
atgaaggagtttgagtggcatatcaagaccatccttgagacaaaaattaccgaaggcaaacgcgcgttgatcgtggaaggtaaaacggatgaacttgtttttacccagcttttaaaaaaagtcgatccccaatgggaaaccaactgggttcttgccgaagtcggcgggaaacgcaatgtggtagaaattttgtcaaaacaatctgattggttgggcattgttgatcgcgatgagtgggatgatgcccagttgagccaacggcaacaacaattgcctaacctgctagttttgcccagattttgcattgaaaactatcttgttgtcccgagtgagcttttacatgggctgccgctcaagcaaagaacaaaactcccccgtgagagtgaagaagcgataggggctattgcttcatcgattactgcagctttagacagttggattcagtttggagctgcatgggctattatcaacccgctttgggatgaactgcgattgctcggatttaaccgagacctccttgatcctcagcaggtgattactgagcagggttttctgacccattgccagcgttggtatgaacatctggatcctgcgctgctgctgcaaagataccagaacaaactgtccgaaattcgccagttgtctgttgatgaccagttgcgcactattgttcatggtaaaaaattttataaggacgttgtgacccctgtattcatgcaattacttgctattcagaaagccatttcagtggatgtgtggttcagggaaatgccagtcccagcagatctggcatttgtctggcaacgcatggatttaaccccagaagataattaa

SEQ ID NO: 167795 - DNA, 3618 bp, Enterobacter cloacae
atgaatacgtccaacatcaaaaaatatgccccggtggcacgtaaacagttccgtgatgcagttatgcaaaaactgaccacgctgggcattgagaccgataaaaagggaaacctgcaaattgcgcaagcaaccgatcttggcgacagcgtgcgttatggtcagttctcgttggataaatcactggcgtcacgccgtgagcgtctggtcaagcgagcagaaaagcagggctacgacgtgctggtagagcacattgcttacacctggtttaaccgcttttgcgctattcgctatatggagctgcatggctatcttgatcacggtttccgtatgctgtctcacccgacgctggaagggggttttgaggttctggatcatgtgccggaagtggctgatgctttggagctggacaaagcgcgtctggtggagatgaagctggcgggcgatcgtgacgaagagctgtaccgtgaactgttgcttgcccagtgccatgctcttcatggcgcgatgcctttcctgttcgaagctgttaatgatgaaattgagttagtgctgccggataacctgactcgcaccgactccattctgcgcgggctggtggacattattcctgaagaagactgggagcaggtcgaagtgatcggctggctgtatcagttttacatctccgagaaaaaaaacgatgtgatcggcaaggtggtaaagagcgaagatattcccgccgctactcagctgtttaccccgaactggattgtccagtacctggtgcagaactcggtgggccgccagtggctgcaaacctatccggactccagcctcaaaggcaaaatgccgtactacattgagccagcggagcaaacgccggaagtgcaggcgcagctggctgctatcactccatccagcattgaacccgaaagtatcaaggtgctggacccggcctgcggctccggccatatcctgaccgaagcctataacgtgctgaaggccatttacgaagagcgtggctaccgtacacgggatatcccgcagctgattctggaaaacaatctctttgggctggacattgatgaccgtgccgcacagctgtctggttttgcgatgctgatgctggcccgccaggacgatcgccgcattttgagtccaggccgtggcgttcgcttgaatattgtttccctgcaggaaagtaagctggatatcgctgagctgtggaccagactgaactaccaccagcaggtacagcgcggcagcatgggagatatgtttgcagaagggacggcactgaccaataccgacagcgcggaatataagctgctgatgcgtactttggcattgttcactagggcaaaaacgctgggatcactgattcaggtaccgcaggaagatgaaacggcgttaaaagtgcttctggatggactgtatcgcctggcggttgaaggtgataaccagcagaaagaggctgcggtagagctgatcccatatatccatcaggcgtggatcctggcgcagcgctatgatgcggtggtagcgaacccgccgtatatgggtgggaaaggaatgaatggcgagctgaaagagttcgctaagaaacaattccctgacagtaagtcagatttgtttgcgatgtttatgcagcatgcgttttctttactcaaagataatggttttaatgcgcaagtgaatatgcagtcatggatgttcctgtcgagctatgaagcgcttcgtggatggttgctggataataaaacgattatcaccatggcacatttgggagcccgggcatttggtgagatttcaggagaagtggtgcaaactacagcagttatttttagcaacacagtatcaaaaaattttaatccagtatttataaaattaactaatgggaatgaagaagaaaaatccataacactaaaaaatggcctacatcgcatagaagaatttcaccaacgtgatttccggataataccagggcagccaatagcttattgggccgatagtaaagttattcatctttttagagaaagtagtaaactcaatgttataatgtattctgatggtccatgcaaaagtgggaatgatgatctttatttaagaaaccattgggaagttaattccacaaaaattggaaaagaaaaaacatggaggccttgtgcaaaaggtggggagtataaaaaatacttcggcaatgttgagcatgttttgaaatggggtaaagaagaacagttacattataaaaaagataaaatagctagaataaccaatgaaatcactagggataaaatagggattacttggtcaataattagttcgccttcaggaacatcatttagaattctagatgaattgtcattatttaactcagtgtcaccaagtatttttacaacatgtgacatcgatattaaaagcattttatgctatctaaatagctcatcaattaaatacatacttgatatacttaatccgactcttgctcttaatgttggcaatgttttatccattccttatgctgaagttgaattactgtgtgatagaataattgaaattagcgaaactgattggaatttatcagaaacatctcttggctataaaataaaccctcttgtcagtacttatgggaatgatatgtcagagtctttctccaaatattttgactattgttcttctatgctctttgagtttcaggccattgaaaaacataataatgaaattattagggagaaattaggactgcaaaatataccgttgccaacgagcagtaaagaacacgtgacattgaattctaatccatattatcgattcaaggataagataaattcatacaatgccactcaattattacaaggagagactctcattgaatttctcagttacatcatcggttgccaaatgggccgatactccctcgatcgtgagggtctggtctatgctcacgaaggcaacaaaggttttgccgaattagtcagcgaaggcgcatataaagccttccccgccgatgaggatggcatcctgccattaatggattccgactggttcgacgacgacgttaccgcacgtgttaaagaattcgctcgcaccgtctggggcgaagagcatctgcaggaaaacctcaatttcatcgccgaaagcctctgtttgtacgcgataaagccgaaaaaaggcgaatcttcgttggatactattcgccgctatctttccactcagttctggaaagatcatatgaagatgtacaaaaaacgcccgatttactggctgttcagctctggtaaagagaaagcatttgagtgcctggtgtatctgcaccgttataatgaaggcacgttgtcgcgcatgcgtaccgaatacgtggttccgctgttggcacgctaccagggcaatatcgatctggttaacgatcagcttaagaattctgagtccggtgcggccactacgcgtctgaaaaaagaactggatgggttgaccaaaaaattcaacgagctacgcaattttgacgatcgtttgcgtcactacgctgatagacgtatcactattgatctggatgacggcgttaaggttaactacggcaaatttggcgatctgctggcggatgtaaaagccattaccggtagcgcacctgaggagatttga

SEQ ID NO: 167796 - DNA, 3663 bp, Enterobacter cloacae
atgaatacgtcaaatatcaaaaaatacgccccggtggcacgtaaacagttccgcgattcggtcatgcaaaaactgaccacgctgggtattgaggccgataaaaagggaaacctgcaaattgcgcaagcaaccgatcttggcgacagcgtgcgttatggtcagttctcgttggataaatcactggcgtcacgccgtgagcgtctggtcaagcgagcagaaaagcagggctacgacgtgctggtagagcacattgcttacacctggtttaaccgcttttgcgctattcgctatatggagctgcatggctatcttgatcacggtttccgtatgctgtctcacccgacgctggaagggggttttgaggttctggatcatgtgccggaagtggctgatgctttggagctggacaaagcgcgcctggtggagatgaagctggcgggcgatcgtgacgaagagctgtaccgcgaactgctgctggcccagtgccatgcattgcacggtgcaatgcctttcctgttcgaagcggtcaatgatgatatcgaactggtactgccggataacctgactcgcaccgactccattctgcgtgggctggtagatattactcctgaggaagactgggagcaggtcgaagtgattggctggctgtatcagttctacatctccgataagaaagacgatgtgatcggcaaggtggtgaagagcgaagatattcccgccgccactcagctgtttacccctaactggattgtacagtacctggtgcagaactcagtgggccgccagtggctgcaaacctacccggactcgagcctgaaaggcaaaatgccgtactacattgagccagcggagcaaacgccggaagtgcgggcacagctggcagctatcaccccatccagcattgagcctgaaagcattaaagtgctggatccggcctgcggctccgggcatatcctgactgaagcctataacgtactgaaggccatttacgaagagcgcggctatcgtacccgtgatattccgcagctgattctggaaaacaatatcttcggcctcgatatcgacgaccgtgccgcacagctgtctggttttgcaatgctgatgctggcccgccaggatgatcgccgcattctgagtccaggccgtggcgttcgtctgaatattgtttccctgcaggaaagtaagctggatatcactgagctgtggaccagactgaactaccaccagcaagtgcagcgcggcagcatgggagatatgtttgctgaagggactgcactggtcaataccgacagcgcggaatataagctgctggtgcgcacgttagcactgttcaccagcgcaaaaacgctgggctcgctgattcaggtaccgcaggaagatgaaacggcgctgaagacgttcttggatgggttgcgtcgtcttgttgaagaaggagatattcagcagaaagaagcagcggcggagctgatcccgtatatccagcaggcatggatcatggcgcagcgctatgatgctgtagtagctaaccctccgtatatggggagcaaattttatgctcctcagttaaaagattttatcaatgagtattattgcaatacaaagagcgatctatattccgcttttattgagcaaaacctaaggttagctaaaaagaataaattcgttgggatgattactataccaaactggatgttcttatcttcatttgaactagctagagaaaaaataatatctgaatgctcaattgactcattaatccataatggcagaggtatatggggctctgattttggtagttgttcatttattctctcaaagagaagtgttgtgaatgcaaagggggtattcaaaaagctattcgagaagcaaggttctgtaactagccctgaagaacttgaaaaacgttttttttcgaataaaaaacacacagcaagtgcattggattttaaaaaaatccccggttctcctctggttttttggttatcgactcagtacttatccaattttgtccaaggctcgccattgggttcaattgcaaagccagttgtaggacttcaaactggtgataatgatttatttattcggttttggcatgaagttagtttcgataaagtcgggatgggttttactaatagagaatcagctaaagagtcgggtttaaggtggtttccttatacaaagggcggcgacttcagaaaatggtatggcaataactattgggttgtagactggcagaatgatggtgaaagaatatgtcaacatcgaagtgcgtaccctagaaacaaagataaatatttttctagtggtcttacttatacgaatattagtataagtagttttgctgctcgctacacggatgctgggtttattttcgaccaaaagggctctatgttttttgataaggttgagaatggcatccactatgttgggtgccttttgcatagtgtctgtggttcgtctttgctgcaagctatgtgcccaactcttgatttcaatccaggtactcttattaatcttcctgtcattaatatcaattataagaaaattaatgacattttcaaagacgctgtagatattactcgtagtgactggaatagctatgagcactcgtgggacttcaccagattacctcttgcatatccttttaattatcaatcttcattaagctcaatttatcaacagctttgtgaaaaatggcatgataatgtattaaagatgaaatctattgaagaacataacaaccaagtgttcattcatgcgtacggtctgcaagaagagctaaaaccagaggtatcgattaatagcataacgcttacctgtaatcctcattatcgctatagtggcaacagatcaaatgacgaacttgataagttgcagcaaagcgaaagcatagccgaatgcttatcttattctattggctgtatgatggggcgttactccctcgatcgagaaggtctcgtctatgctcacgaaggcaacaaaggtttcgtgaagctagtcgccgaaggtgcctacaaaaccttccctgccgatgaagacggtatcctgccattaatggattctgactggttcgatgacgatgttacctcccgcgttaaagagttcgttcgcacagtctggggcgaagaacatttacaagaaaacctcgatttcatcgccgaaagcctctgcttgtacgcaatcaagccgaaaaaaggtgagtcttcactcgataccatccgccgctatctttccacccagttctggaaagaccatatgaagatgtacaaaaaacgcccgatttactggctgttcagttctggtaaagagaaagcgtttgagtgcctggtgtacctgcaccgttataatgaaggcacactgtcgcgtatgcgtaccgaatacgtagttccgctgctggcgcgctaccagggcaatatcgatttgattaacgatcagcttaaaaatgctgaatccggcgcagccactacgcgcctgaaaaaagagctggatgggttgaccaaaaaattcaacgagctgcgtagcttcgatgaccgcttgcgccattatgctgatagacgtatcactattgatctggatgacggcgttaaggttaactacggtaaatttggcgatctgctggcggatgtgaaagccattactggcagtgcacctgaagaaatttga

SEQ ID NO: 167797 - DNA, 363 bp, Enterobacter cloacae
atgttttcctttctcaaaacattaaagcgactcataagcaagcagcaggaagcaccgaccactcagccggagtattcaagtgaacagcttttgcaatgggccactggatgcatgctagagagcttgcccgacacgttttacgaagcgaggattacttgttttcggagcattgataatggcgggcgtacggcaatagctgcaatacatgacttcaagctaaccagcgaaagcgaatatatatctttcactccaccagatgacctttacgctacacactgcatagagaaaattcttaacgaagaaaactggtgtgaagccactataacctttaccccacaaacgacacgattcatgtggcaataa

SEQ ID NO: 167798 - DNA, 462 bp, Enterobacter cloacae
atgagccgattaaccgcaatcatctgcgctgtcgttgtaagcctgcttgtttgcatggcattggcgattaaacactatcgtgacaacgccatcgcttataaagaccagcgagataaagccactgagacgctcagcctggcaaactccaccatcaaagacatgcagactcgccagcatgaagtcgctgcgctggatgctaaatacacgaaggaattagctgatgcgaaagaaaccattgagcgtctgcatagcgatgtaattgctggccgtaagcggctgcaactcaacgcaaactgtcccgcgaacggagcgaccagcaccggcggcatggtcgatgcttccagcccccgacttactgactccgctgaacgggattatttcatcctcagagagcgaatcgtcacagtgacgaagcaggtgggttatctgcaggcgtatatcagcactcagtgtctagaatag

SEQ ID NO: 167799 - DNA, 273 bp, Enterobacter cloacae
atgaaaagacaaatcagatttctagtttcaaaatcgtcctatgatcgtttttatcaaacctcacaaaaacatggtcacaatataatttcttacgtgagggttgatgattcacggattggcgaggagaagaaatatccacgcgatttttatgactcttatcgcatcacattcgattcgaacgataaagaggagttatttcttcaggaaattaaaaaacatgaagaaatagaacaaattggagattttgagtttgtcattggagaagcacaataa

SEQ ID NO: 167800 - DNA, 219 bp, Enterobacter cloacae
atgaaattacgaatcacaagagcaatcgggcgcagcaagttctcgccacgttgggttaaggttatctgtttacggttaacaaaaaattatattgagcgctccctcaatgctcttctggccaacattgatgaatctgaactctctccggagcaagtcaaagcattgagggaacgcgttgacaggattaacctggcaaggaataagggaatacaggcgtga

SEQ ID NO: 167801 - DNA, 423 bp, Enterobacter cloacae
atggcaatcgaaacattcacctggcgaacacagatacaggcgggaatccgcatcgcgccggtgatcatcggcagtaagcgagccggggtgtttcagacaatcctcggggttgcccttgtcgctgttgcagcgttcttcacgggaggggccgcgattgggattggtggtaccgctttcgctggtggatggggcgctgttgcggggattggggcatcaatggcgatcggcggcgtagtccagatgctttctccacagacaaccgggctcgccagtaagcaatctgcggataaccaagccagctacgcctttggtggagtaacaaacacgacagcccaggggaatccggtaccacttctttatggccgccggcgaatcggcggcgcgattatttctgccgggatttatgtcgaagatcagcaataa

SEQ ID NO: 167802 - DNA, 1440 bp, Enterobacter cloacae
atggcttggactggtttcggtggaagttggtcagatggtgttcacagcggtggagacagctccggaagtattggaggcagtagtggaggtatgcgagcaccttcacctgccgatattgcttctcaatttaatagttacggtggaacacaaattacagcatcgcaagtctcaaatattaaaagtgacggatctgggggttatacagcgaatatacagggacagaataacactgtttcttctgaaactggcagtcgaacttctaacaccgtgggcggattttcaggtgtattaacctctgcgggcaaaggaagcaatagtagcggatcaacaagttcaaacgattctgttgctccaggaggatggagtatcaaaccaggggattggagcaaattaccggacgaattcgatacgacagttgatcaattcaaatataaagtgaagttagatcaattcggtaaagctacttcagttacgcaaacagcaccccgcccatatacaaaagctgaaaatttgaaagttgcagtagcaaaatcacagaataaaaaaccaagtgatttatatccagaacttgatttttctaaaggagaaccagaacgacaggccaaggcaaaaaaagaagctgaaacatcttggaaaacattgcccccgaacattagaacttttgatgtttatgttgaaggctttagatacgcggtcaaattaaacgagcaaggaacagtaatctcaactactaaaatagctgatcgtccatacacaaaagctgaaaatctcaaggtagcggtggcaaaaacaaataataagacgccaggagaaatgttcccagagcttgattttgctaaatcagatcctgagagaaagcaaaaagcttcacaaagcgcacaggatttgttcagttcttttccaactaatgctatcagcatagcttccgatttttataaagcattaacagaaaaatttggggataaactaacaaaggaggctaaagcgctagaggcaatggcaaaaggtaaaaaattacgaaatgcatcagaagcgatagctgcatatgataaatacaaaggtaaccttaacaaaaaattcagcgtggctgaccgaaacgcaattgcaaaagccctagagtcattagacaaagccactatggctgcacagttacagaaaatgagtaaaatgttcggtgtagttggcgaagcaatagcttggggagcttttgtgaatgggatcgtaaaaggttttcgaacaggaaactggaacgatgcgatcatttctggtgaaaagattgcagcaacaaaaattgcatctttattagttgttactgcatatgccgtaatagcaacaactccaatcggaattatagggttctcggcaatcctcgctataacagctgctttgattacagataaagcgcttgaggatttaaataaattcatccttagcctttaa

SEQ ID NO: 167803 - DNA, 285 bp, Enterobacter cloacae
atgaaaaaataccttgctgacttttttttatgcatatgtttctacatacttgtatttgtgctggttcttgcaagctcaaaccttaatttaaaagaaagtctaatattgattgcatattgtacattaagcagtttgtttttccctttcgttgcgaatttttttcgtgggtttaaaaagggtgagattcctcttcagtattggaataacggtgttttcacattgtgcttagttttgtcattacctttggggctctttttggtgttatacaaaatgagcaagagataa

SEQ ID NO: 167804 - DNA, 456 bp, Enterobacter cloacae
atgaaattaatgaaggcaatatctattgccgctctgactatggcggctatatctggcgtagcgaatgccgctatttcaggaacccaaacatggaaaatggtagatcagagacttgaaaataccagtaacggacaaaaactgtgtatgactggcgttggcctggagcaggcgacgatggaagagtgtggttctaatccagatatgcagaatatacgtgaggccaatttcgctcttggtgggactctgatactggatgaacatccatattatgcgttcggaccaatagataataaaatatatttagtccaaaatgacacttccgcgcctcattggaaccatgttaacggacagatgataacagctgattatgatggtcatgagaaatgtcttgatattgaaggcggtataaacgtccctggcgccaaattgtatttagcaacttgtaccaataaataa

SEQ ID NO: 167805 - DNA, 1749 bp, Enterobacter cloacae
atgactcaacaacaagacgccgctgatagcgtgcgcagcaaggtcgctcctggagctaaagcagtacctgtatgtcccgtcacatcagcgatagagttattggcgacagagggggggctcgaagccaggggggccattttcacgcgctctgaggtggtggatttcattctcgacttggctggttacacagaggatcaaccgctttataagaagagaattttagagccatcatttggtgctggggacttcctgttacctatcatcgagcggttattggctgcatggcgggtggcgaggccaaacggttcagctttaggtgaattggccggtgcaatccgggctgtggaattgcaccacgagaccttttatagcacccaggcagcagttgtcgaactgctgaagcatcaaggcatctcttcgaatgatgctaatgccttggcttgttgttggctgtcacaaggcgatttcctgcttactcctttggagggggaattcgacttcgtcattggtaacccaccatacgtccgtcaggagttaatccccgcaccattacttgctgaataccgctgtcgttacaagacaatgtttgatcgtgcagatatttacattccattcatcgagcgatctctgtcggttttgtcggatggtggcagcctaggtttcatttgcgcggatcgctggatgaagaatcgctatgggggaccgcttcgcagccttgttgctgaaaggttccacctaaaagtttatgtcgatatggtggatactcaggcctttcactccgatgtgattgcctacccagcaattactatcatcagccgtgaaatgccggggccaactcgcatcgctcatcggccagctattgaccgggtaacactgactgaattgtctgatctgctcacagcccgctctcttcctaaggaagtcggaccgacgcgtgagcttgctcaagtgaccaatggttcggagccgtggttgctggaatcattcgatcaaatggcgcttattcgccgtttggaaagagactttcccctgcttgaagaggtagggtgcaaggtcgggattggtgttgcgacaggtgcggacaaagcgtttatcggggattttgaagcactcaatgttgagcaagaccggaaagtgccgctggtaacaaccaaagacatcgtgagcggtgaagttgagtggcgtggtctgggggtcatcaacccctttactgagcaaggtgggttggtcgatctcggtgaatatccactcttgcgacgctatcttgaagcaagacgtagtgtgattgctgggcgtcattgtgcgcagaaaaatcccctcaagtggtatcgcacgattgatcgcattaccccgaaattggctgcgaggccaaagcttttgatccctgatatcaagggacaggctcatatcgtttatgaaggtggcgaactatatcctcatcacaacctctattacgtcacctcagatgattggaacttgcgtgccctgcaggctgtactactgtctgcagtcagccgcttatttgtggcgacatattcaacgaaaatgcgggggggggtcatgcgttttcaggcgcagtaccttcgtagaattcgtattccgtcttgggctgacgtgcctaaaatgctacgccacgagttggctgaggcggctatcaaacgggacattcgggcctgtaatcgggcggtgtttaagctttatggtctgaatcaggaagaacaatcatcccttgggggaaatggagaataa

SEQ ID NO: 167806 - DNA, 741 bp, Enterobacter cloacae
atggcgctcgatcttgttgattatgaaaagaaagcccgcgaagccgtgaaggcattttggggcaaccgtgaagcagcaagacaaaagcaaattgagtcaggtaaggccgaccaaggcgaacgcgcgggagtcactgctggaaagaatatggacgggttcttggccttggtgctagacctcataaaggctaatggtctagcccatgctgagatttaccagaaccgggcgatgttgacccttcccggatatttccgcccaactaagctgtgggatctattagttatctacaaaggagaattgattgcagcaattgagctgaaaagccaggtaggtccctcgttcggcaataactttaataaccgaactgaagaagccatcgggacggcccatgatttatggacagccttccgcgaagaagcttttgggaagcaaccgcgtccatttgtagggtggatgatgatggttgaagatgcaccggagtctcgcaagcccgttcgcgactcgtcgccacattttcctgtgtttgatgaattcaagggagcatcatatctcaagcggtacgacctgttgtgtcagaggctggttcaagagcagctttacacgaccgcggctgtcatcgcagcggagcgcggcgcggtaaatactggtgatttcactgagctatcgtccatgaccagtctcagggcattcgtatctgcactggctggtcacgtagcggcagaggctgctcggttgggctga

SEQ ID NO: 167807 - DNA, 1563 bp, Enterobacter cloacae
atgccggcaataaaaaaaatcgtgatcaaaaatttcaaaagaattgccgacctgacccttgagttcgaccctggcaagaacatactgatcggcgacaacgaaacgggtaaaagcagcgtgttattggcattagatctggcacttagcgcaagccgcagtcgagttgaaaacataggctatgaagccctgctgaatcagggggcggtgcagaatttcttggcagggccagcaagactggatttgcttccagaagtcatcgtggacgtttttctggaagagggggacgatcaaggtttttacggtacgcaaaacgttcttggaatacagacagatggcctgcgcatggcgattgtccccttgatcgaagagttcggccagacaattgtcgatctgctcaaatcaaacaaggacagctttccttttgaatattacagtgtcaagttctcaacgttcgccggggcacctcacgtcagctaccggcgtccggtcaaacacctgatgatcgatagttctcgtatcgacagtgaatacgccgctcgtgaatacacacgaacactgttcggattccatgtcaatgcgccggatcgctaccgcctcgaaaatcgctatcggcaaggcaaagaagctttcagtcgagagagtctgaaggaattgaacaatgcgctcggtgattatcagttttccttgagaacaagttctcgcgccaaccttgaaaccgacttggtgatcactaaagacggcatccctattgagaatcgtggcaaaggtgaacagtgctttatcaagactaatttcgccctgaagaaatatgaggaaaaaggaagcttgaacgcgctcctactggaggagcccgaaaaccatctaagccacacgaatatgaaacgcttggttgaaagactggctgatacgacgggcactcagctgttcattacgacgcacagtagccatatctgtgctcggctcgatctacgccacgcgttactgcttggagcagggggggcgggacgcttgaaatacctgtcggagcccaccgcaaacttctttatgaaagcgcccgataacaatgtgcttgagctcgctctctccaagagagtcatattggtcgagggggatgcagaatttatcctcatggagcacttctacaagcagttggcaggccatcctcctcaggttgataatgtgcacatcatctcgatcggtggtacgagcttcaaacgctacctggagctcggaaagctcctgagtatcaggatcgccgcaattcgggataacgacagcgattaccaacagaactgtgtaacgaactacgaaggttacctgtacgaatcggcccagatctttgccgatacaaatcctgaccgaagcacctttgaaataggtctctacagagacaatcagcatctatgcgacgaccttttcgctgcaggtcgaaaaaaactgaccgttcaagagtacatgttaaaaaataaagcggatgctgctttcgagttgctaactaagaagtccgctgagctgatcgtcccgaaatatatacaggatgcgattgggtggataagagcgtaa

SEQ ID NO: 167808 - DNA, 1029 bp, Enterobacter cloacae
gtggataagagcgtaattttttccgtcgcaggatctggaaaaaccagtctgatcattgaaaggctcagctttgagcagcgggcattgatcgtcacttacacggagaacaatcaccggcacctgcgcaacaggatcatccagaagtttgggatgatcccacccaacattacactcactacgtacttctcattcctgcatggattctgttataggcctttgatgcaattgaagctagggaccagaggcataaatttcaggcgtccgcccaatagacatttccgcttagacgatttcaatcggtatcgcgatggcagcgggaggctctatcactgccgcctcgccaaactgctacaggtcgtaggggttataccggatgtgcgtgctcgcctggagcgcttttacgaccacctctacgttgacgaggtacaggattttgcgggccacgacttcaacctgctgctggaggtttcacaagcgaatattggtgtaacgttcgtcggtgacttccaccaacatacctttgataccagtagagacggtacgataaacaacaacctccacgacgatgttgtccgttacgagaaacgctttcgtgatgtcggcatcacggtagacaaggaaaccttgagctgtagctggcgatgcacaaaaatggtctgcgacttcattagtgcaaagttacaaatccctatgggtgctcatgagcaaagggtcagccggatcattacggttgatgaccaagagcaagcgagcttgttgcacgctgatcccaccattgtgaagctgtttttgagcgaacactacaagtacggctgctactcagagaactggggagcgagcaagggcatggatcactttaatgatgtttgcgttgtgatgggaccgggtatctggaaagactatttggcagaaaggctacaccaagcaaatccgcaaacgcgcaacaagttgtacgttgcctgcactagagcgcgtggtgacctgtatttcatgcccgagaagctattgaaagcatttaaacagaggtaa

SEQ ID NO: 167809 - DNA, 204 bp, Enterobacter cloacae
atgagtcgcaagacacgtaagaagtaccggactagtgttcagcaaacgttttgtgggaacgaccgttccaaaggtgttttcaagggtgtggccaagtttctactcggtcaattcttccgcgaaatcctttcggaggtctttcattctgaaggagttgcttccgtctggtcatccattatggatttaatccaatggaggccttaa

SEQ ID NO: 167810 - DNA, 591 bp, Enterobacter cloacae
atgcgagagataccatgtcattacgtaccgagtttgttttgttcgcctcgcaggacggggcgaacatccgttccctctgccgtcgctttggcatttcacctgccaccggctacaagtggcttcgccgctgggctcacgaaggcccgtccggccttcaggaccgcccgcgcataccgcaccattccccgaaccgctcatctgacgacatcacggccctgctgcacatggcgcatgaccgtcatgaacgctggggcgcacgcaagattaagcgctggctcgaagaccaggggcaccccatgcccgccttcagcaccgtccataacctcatggcccgtcacggcctgctgccgggcgcttcaccgggcattcccgccacgggacgcttcgaacacgacgcgccgaaccgcctctggcagatggattttaagggccactttctctttggcggtggccgctgccatccgctcaccctgctggacgaccactcccgtttttccctgtgccttgcgcactgtaccgatgaacggcgcgagaccgtgcagcagcagctggtcagcgtgtttgaacgctacggcctgccggaccggatga

SEQ ID NO: 167811 - DNA, 3996 bp, Enterobacter cloacae
atgaaaaaaacggtggctcaaacccagatgccagactccgcacaatctgaaaaaaaaaatgaacaaaacaagagaaaatcagcagtcggaggaagcgcggcagaaagggggctggattaccaggctagggttgcggctatagcccttacatatctccttttagaacagaaagtcagctggatagatgatgtcttcaatgatattccagttttggttgatgccgaaactggggggcctggtgatgatatttcattaaaaaccaatacaggtaaatcggtcgaggtccaagtaaagcgtggcttaaagcgtggcaacgaattatgggatgctctttgcgctttgacaaaaggcattcaggatggccgtattgattgtggaattttggttgtatgccctaacagtagtgcaacaattcgttcgaatctggctgaaaatatcgttcgtatcggaacagggagaactgatgggctccatgagatcggtagtgcgttcattaaggaagttgacattgaactgctggagttatcgtgcgtttgccgctcgcttcgaatagtcacagtcgatgcaatagacgggaataatagtgccgaaaccaatgctatcactatgctgagcaatgtattccatgatccatctcgagcgtggagggttcttgttgaacatgctcgcaaactcatcagtataagaggtcgggcaacaataactctgctgctgcatgagttcaggaatgttggtatcgacatcaaaatggatgcaactgaaaaaggtattcagcttagagccgctatctgcgattggtatgagaaaagttattcgcagttcactatccccgggcaaatgaaacctgtatcactacagaagtgttggatcccactgaaagtctccattaataatgaattagagcaattccctgatgatttatcgaaagctttgagccgttaccatcaatatgcttcaaagcgcggaagtaatatcgataaatttgatgctcatacccttggaagatatgttacccaggggatcatcataggtggcccggggatagggaaatcagtgcttcttcgccgcatagcactaacttatgcgacagagggccatatggtgttgcttgcaaggctatcccaggtagtttcgcttattaaccataaaggcattcgttttgaggaagccctgattgaggtcggactaagtagctctggagtgaaatatacatcactcgatttgcgggatgcagtcattttatgtgatggtctcgatgaatgcggtatcaaccaaaacctcattactgacgccatccataaatttgcggttggtcatcctgacgcaaggatactactcaccagtcggcctgtgggctaccagcctggccagttgggaggctggaggcattatgagcttcttcctctcgaggaggatcaggctgacatggcgctgatacaagtgttggaagccttaccttctgaaagcccagagacaatgcttgtgaaccttgatgccgcgaaagaacaactgaaatccttgcatctcaaaagtgtcgcgtcgagaagcccacttatcttaactatgcttgcttccttatcttctaaaggtattgagccaggaagctctcaaatatcattgtatcgacagttattcagactatttgaaactgcttatccctcctcacgcaccgaaatcactgagccaactgaacctgagcggcaatggttcatctatttgttaggatggatgctatttgagcacgggactgaacccttcgaatcgacattcagacattgtgtttctgcatggaaagaagaaatgcaaggtagtaatcttgtctgtggaaataaagttcaggcttgctttgatttttgggagagtgtaggagttattgagcgtatacacactcttaatcaggaagctgtaacctttatccacaaaacttttgctgagtacgccgctgctgtctttattgaacagcaaccacaaaatcagaaacgtaacttgctcgttaaagttattcaaaatggctccagtaatgaaatgctttccttcgcaagctatctgggactggtagacgaaattcttgatgcatgtaatgaattaatgcttcggggaaaaacgacagccacgaaagagtttaatcatgtcctgaacttgattattgaagccggaatgcctgttaaaaaagagtcattacgcacctttgcagaatgttgctggaaagcgatatcttcatcctcaagtaggtttgcagcaggagacgcactttgtcaggtatcgacgcatagttgggatgttgtaagcgaaaacgcgaggaataacctcgattcagatgataactggctttggctggtctcgtgggcatgcctcctaaccggtcattccgaagaggtcagttaccaggatgcattgattgcattagaaagtattcgctcgaagtggccaaagcagcttcagcgaagaaattctatgttcgattttatcggtggcagaaaagtacaggaacacataattttgggtgccgcagaagttattcttaaagacccaaaagaaatcgggcttggcgtacttgagtcaatcattgataaaggtcgaggtgtgtcaatcagctgttttcgtgagctcatcaaatgttatgcaaaagcaggaattgagttacatgatgaactaacacacattacttggagaaaacaagattttgatcgagtggccacagagttggatgcgaaatgcatcgatcttctctctgtattagctggagaaaaatatctttcattctgcgatgaaattttgcctgagaacatggtagagctcggtgcatttttacatataagtggttttcataatctaagtctgagtgacctgttctatcttgagacaacggatgaaggaatagtagaacgaagcaagtttctgcatcaaatagccaaagccacgggccttgattcagataagttgagacgtcaggctgcaagtttaaaaaggcagtgtgaaggaaacaaaaattttcttgtgacgtgctttggcagcgttcctgtcgtggatgcaaaaatggtaccggaaaacgttgaagtccatccaaatgattttgacaaattactcacaacaattaagcatggcagccagttttacaggtttttagcagctgaagttatttatcagcacaaaacccacccaaaagtaatagacgggattaaggctattctaatggaaggtgagggggctgctttacatattggaagccggtttatagcggatataccggatcaggattggcagcaaatactccttcgacggctggaagcatcgttgcctgagcagggtgcttcatatttatttgaatccctgacggagcctttcgattcacggcatgaacatgccgtgaagctggggttacgaagcaaatttttgaatgtggcccttgctgcggcttcttttgcagccaaaatcccgccaacagatgagtttcagcaggaactggggctgatatacgacgagtggaaacttagggaggagccatatccagagggtggcggggttatccctgagagtcctcgagatgctctgtctagtactttagtaaaagataagggcaactctaatgtgtcacttattcttgatatggtgggggaaaaaagaacgaaaattcgggaaaatggagaaaaagcgctcatgaacattctcaatggatctgccgagttacaggcaaaaatctccgaatgggtcaaggatgggatttgcaaaccagccttgttacgaacactcattacgagtgttcctttgtgccgtgaagccgttatgaagcttatgcctttccttcgcgatgagtctgcggaattacgatatgctgctacagcacttttggatatgcagtccatgacgcgcgagcaaattgaattgtctgcccgtgaacttttaaatgatactgaagtcgagatcagggaaattgcatccttagcactctcttcactcatctcggaaacaggtgaagtagatgtacaacggacctga

SEQ ID NO: 167812 - DNA, 243 bp, Enterobacter cloacae
atgcacggtcacggtgtggcgatggctgaccttcgactcacgctggacgcgctaaaaagtggcctgctcgcactgcccttcagggaagcgatagcaaccggggatggctactatcttgtctggccgaaaaattcgctcagaagacagagtattgaacgtttgctggcgtggcttaaccttaacgcgcctgtggtgccttctttgaatatcgtctgtcttgattacgatgataatcaggtttaa

SEQ ID NO: 167813 - DNA, 735 bp, Enterobacter cloacae
atgtcattaccgccactgtacgcgctacgcgcgtttgaagtcgccgcgcggctgaactccttcagcaaagccgctgaaaccctgaatatcacgccgggagcggtcagcaggcatgtcaggacgcttgaactgtggtttgactgcgagcttttcaaacagcaggggccgagagtggaggtcaatgaagccggacgtattctggccggacagcttggcgaaagcttctcgaatatggagtgggcatgccgggcattcaaaagtgaaaatcaccttctgcgccttaaagctcccagcacccttacgatgagatggctcctgaatgtgcttaaatctttccgcgaaaaccatgcgaagcctaaaatcgaaatcgccagcgtctggatggacttcgataccgttgacttcagccgtgagccatacgattgcgcgatcctcctcggtaatggctatttcggcgagtcaacagaaagccggctgctcttcagtgaatggctcattccggtttgtcccccgtctttgcttgaatctgcccggcaccagcttgctcagtgcgatcttattcatccctcaccggacagacgggactggaaacgctggttgaaaaggacagggttattccccgggctcgacatgagcggcgggcttgtgttcgacaccctggagcaggcagccttgcggccatgcacggtcacggtgtggcgatggctgaccttcgactcacgctggacgcgctaa

SEQ ID NO: 167814 - DNA, 213 bp, Enterobacter cloacae
atgagtgacattaacgatttaaacactggcgagaccaaaggcggctctgtacatctggacgcgcagaccgttttacgccttaagcaataccgtaacgatcatctgaaaaatcttcctggccagccattgcccggtgtggcacagatagtccggcacgccgtcaatgcatggcttgatgaaaatggcttcgctgtaacggaaggtgaaaaatga

SEQ ID NO: 167815 - DNA, 348 bp, Enterobacter cloacae
atgcatcgtttaaaagaaattaagaaaaagctcgacgcaatcgagcaagcgcttaacgaccaatacccgcgtttcaaagcggattctgcattaacagagcttatcactgagctaaaagactatgtagacacagagcgcaaacaactagcaaagcaaaaaacgctaggggaactcactgagtttgaatcctgcttcatagaacctgcggtcagagatgtttaccttaattcattggacaaaatcagacggggttctaaacccagtagtagcgtcaacaacaacatttgcgatacatctatgacccttagttattggctccatcaaattgaagaacgtcaggagaaataa

SEQ ID NO: 167816 - DNA, 606 bp, Enterobacter cloacae
ttgaacacatttatcacggtttcgatatcagttatcagtgctgtgattggcgggattatcgctggttacttttcacttcgtgcgacgaaccaatcgcatgctaatcagaaggagattgccgagcaaaatgagcttcaggtgattaaaagtttactccaagcaattcatgatgaacttgaaactgttttcgaaaattatcaggcaagcatggggaatcggatcgaatccttgcaagatggacaaccactgttttggtattaccctttagtaagcgatttttttaatgtttataatggtaatactttcttgataggtagaataaaagatcatgaccttaggaaaaacattatcaaaacctatacattaggtaaaggcatgatcgattcctatagaatgaataatgatttggttcaaaaaactgaacactggaattttgtttataccgagacccagcaacaaattcaccttgatagattatgtgctcaacaacaaggactcatagaatatgctagaacattaaaaactcaacactatgaactaaaagaacatgtaaatctgacactgcgagcactaagaaaaagcggtgttttaactgaagcaaaataa

SEQ ID NO: 167817 - DNA, 873 bp, Enterobacter cloacae
atggggctcattcaaactcctggagtagatctcactcaggtcatcgaaaaggcgagggaatccgtcaccgggaaatctgcacaaaatgcgttgctcgcatttgcgaacctacatcgtggcgtgaatgcagaagaactgcgcaacagtgcattggaaagaatgcgtcagcatcccttgcaatcactgtttgccgcaaccgtgatgagtcgcgatggcagagtcattgccaagcgccctgcgatgggactcggtggagaattgacagaggacgacgaaattgcaattcgcgccgagatgattcgtgactatggaatcttagttagtattgtggttcaagccgacatctggccagcccttgaagtacttttgcttgagcatcggttgcgcgagagcgattttatcgagttagctcgccattcacccattgtcccaaaagagcgagttggccttttcggcaaggcgctatttgcaggttacgaacgtgatttcgttaccgcgcttcatttactgatccctcagattgagcacttggtgcgcgtgcatcttaagcaagcaggagccaaaaccactaacctcgacaaggatggaattgagaacgagaatggcatgagcacgttggtgggtttgccagaggccgagcaagtatttggtaaagatctcgtctttgagttcgaatcgttgttctgtaacgcctttggtccaaatttgcggaacgaattggctcatggactattggatgaggatgggtgcaattcccctttcgctatttatgcgtggtggctagctttaagactaacattcaatacatggtggaactcagcaaatcctatttctgagcctcaagaaggtagcgacgagcaagctgtggtctag

SEQ ID NO: 167818 - DNA, 711 bp, Enterobacter cloacae
atgtggcaagcgctgtcgggtgctgcgcgtgatgccattgagcaaggacgaattgaacacggcaaggtattatggttgcttgcagatgcctgttcgatgatgctttcgccgtcgagtcctaatgaaccctttaagccttttgctgtcttccatgaccgcagatcagtcgttcctgatgacatttctgattcagatattctgttctttgcagagatcgttgatggggtagacaacgattggctgaaggcacgactcagtgatttggtctggttgaagagtaagcctcgtaatatcgaattcgctttgaaggctatcgacgcttaccgcagccttccactagacactgatacatggatacatggagggcgggactgttggcctcgcgccataagcttggctcgaatgcttaaaggtggcgctggagatagactccagcaaattgagacgacaatcgttgctgcgtttcatgcgtcaattcgagacgacggttttcttgggttttggttggccgaccttctaaaatcgaaccgcttggggtggtcacatcgaacggatgtgtcgacgaagctagaagcgttggcccgcgggtttgatgatgaaggggatttgcataaggcgcgggagtatttttctgctgctgccgagtggtataagtttattcctgacgaggtcaaagctgcagaaatgacagtattggtcgctgaagggtag

SEQ ID NO: 167819 - DNA, 1254 bp, Enterobacter cloacae
atgattaacactcgtgtgtggttaatgcttcaggatattgaaatcgaggaggaggagaaagccactggatttttatgtgcaccatgtctcaataaagacctttttttacataacactgcaactgggaaaaagttacacaataataaaaaatgttcaggatgcggacaagaaatagaaaaaggactcagttttgaatatcttgccggaaagataagagaccatttaaataagcattacaagcccattgaaaataaagatgaccttaatatttccgtctccttacaggacattattaaaagattcatctgtaataatgaagatgtagtaaaaacgatttctgaaattttatacaattcaaataacaacagattcgatagtggtaaaaaatacaaggatttattcgaccagaatgctattgaagagcaaacatctgcgattgtagatgaatggaataaatatgcgtttgaattaaaacacttaatgcgcttcactaacgaaaaagccattaacttctacaaaaacgttatcagctacggtgtacatgcgagcggagataatgatgaaaatgacagccctatgctcaaagttattcctatcgggtcagagttctatcggggacgtcgtgttttagatgatgaacataaaaaactattagaagtaaaacataatgagttttatgcaccaccgccggaaaaagctgctaacagccgtatgagcccgcctggtatgtcatttctttataccgcgacagatcaaaagacttgtattgctgaattgcatcctttcgcaggtgatgaaattgctgttattaagctggagaccgatcgtccactttacttttttgaccttacacgggcagctgatgtgaagcatggattacctggtcttatccatgacccctcagcaaaaatatatgcgcgcagacatcttctatcacaattgcatgatctaatagctcagccgtttagagcgacggatattagctatacagccattcaagctttttctgaaactgtccgccattatgaattcacgcatgacacaaaaaaaaggaactttgatgggattattttcaattcaactcaattgaatggaggggtgaattacgtattttttggtaataatgatgctgagcgtagagttgagtctccttttggagattatggtgtcaaaccattagtaaacgaacctatcaaattttacaaaattagcaatattcaagttacgacttcaccatctatctctaatgagtaa

SEQ ID NO: 167820 - DNA, 345 bp, Enterobacter cloacae
atgcgggagatgggcatcaccgaaactaccgtgagcaatatgatcgaagaggatcgttgcgcatggggtgcgacagatgatgatgaagtggtgggtttttctatgattttaagggagaaaggctctctttatggtctttttgtccttcctgcctatgaaggtagaggcatcggtcgcagacttacaaagattgcggaacaggagttgttcaaacatcacgaagttgcttggctggaaacagataaaaacagccgtgcggccaatttctacatgcaactcggctggggtaataagacaacattagatggcgcttttactcgatcagagaagcaacgtggtagttga

SEQ ID NO: 167821 - DNA, 480 bp, Enterobacter cloacae
atgaccggcattattaatattaacgataacaatcagctatctttgcagactatagatgacattcctgcacctgctctggcagccacgcccgtagcggacgaacagcgtgtggaattctggccgcagcactttggcaacatcccgcagtggataacccttgaaccgcagatttttgcgtggatggaccggttctgcgctgactacagcggtggtatctggaatttttatactctcagcaacggcggggccttcatggttccggaaacggacaacgatgccttctggtcgctgttcaacgccatgaatggcaacgccgcagacatgagcgcggaagctgcagggattgcagtctgtcttgtcgcttacagtcatcacgcatgccgcacggaatgcgacaccatgacggaacattactggcgtctgcgtgactatgcgctgaaccacgaagaatgcagcgccatcatgcgcattatcgactga

SEQ ID NO: 167822 - DNA, 465 bp, Enterobacter cloacae
atgaacagaaaaatgattcaccctttactgctgacctgtgcgctggtaccagcagtggcacaggccttcggtaatcaaacctcctggacccggggctgggctcagggtgtgtctgagtttgttatcaaggggaaaggccagtctcagctttatctggcctgtgaggattacggctcgcaacctgcgacagtcatatttactgacgccagcgggcatcaggtcagtatggatgaagataaaagccttcaggtcagtatcgacggtggagtgcttattgatatcagcgaatctggcagtcacgtgggcggtaataatctggcactggcttgggctcagttacgtaatggtaaacaggtctcagtaaccggagacggtgttaagactgccacattcacgctggccgggactgctaaggtactaccggcattcgggacacacggctgcgtgggtaaagatgcactctag

SEQ ID NO: 167823 - DNA, 927 bp, Enterobacter cloacae
atgaaggcttacaacatgatggacgatttcaggttcctctaccccaggaaatctgacatgcataagaatataaggcgagacagaggacatctgaacatgctggtaaatacctggtgccttttttacaatgacagcgttagagaaaaagccatagatctcattactgaattaaattattactatgaggggattactgatggcgagatcatgttctctgatgaatgctctcctgaatataaagaacaaatcattgcagtaacaaggcagtgtatctataaaaaaatgtcggcataccgaagactgagagactatcattacgaagtgctaagatctcatcccaaagcagggtatatttgcttttctctggatgttgataaaaacacacgcaactacctgacaaccgatgtccataatggcctcattaaggatttggcaacgaaattcactaataactttaaatccctgacattgtatacacacatagcagcatatttctgggttctccttcgacgtcgtgatggatacccctatcttcattttactctctacttcagagaaagaaattttaaccatgtagctggattgtcgataaacaaaacatggttcaatgttctggataaacaagggctcaaaggaagtattcgttactttgtaataacagaaggttttatcggcccacgcttatccaaaggaggtgttgccggagacaggtgcctctatgaggtcaacccataccacgatgatgaaacaaatgagttattcatttatgatgattataatggagcggatatactgcagggactatcctcagatataaataaaattaataacaaagtgtttgagttacacctgtacacactgtcaaaactgatttttgttatgcccggaaaaagcaaaagtcaggggttctcgaaaataaagaaataa

SEQ ID NO: 167824 - DNA, 636 bp, Enterobacter cloacae
atgtttaataacgtattactagaccatcgtcatgccccatttaatgatcgctatttagaacgacttgagaacgtcatagcttgtgctctggctgagtatcctcgaaccttttccctcagggtagatttacacttttcccctgaatgggcagcagacgacagtgtctgctgtcaccctaatacctcatctaacgttatggcgcgctttactcgctccctgatagcaaaaatagaacattaccgtcggcaacgttgtcagcaaggcctgcgggactatcccaacaggctacgttatttctgggtcagggaaactgaaacggctatgcacagtcactaccacgctgtgttgtttttcaacaaagacctgttccgctcgctgggggcggtgacatcgggtgaaaatagcctgtggaacatgatacagggggcgtggctaagtgctctggggttaacggattaccctgaataccgctcgctggtccatttcccggaaagtggatcttatattcttgagcgtgacaaacccgtattttgtcagcagtacgaagacctagttttccgtgcgagttacctggccaaagagcggacaaaacattactccgctgatacacgttccatgggtgccagccaggggtag

SEQ ID NO: 167825 - DNA, 1230 bp, Enterobacter cloacae
atggcatccacattaggttggcttgatcacgatgcaaacgcacagtccaaaacgttaaatattcttgcgctctttcaacaaaaagagagccgagatgaactaggtatcggcactatcagagacagttttgctgaacaactatttccaggaaccagcaccattcagacccgtttacgctacatgctttttgttccatggatctatcagcgtctcgaaaataaacgcatatccgctgcaaactttggtttccaggccgaccgggccgaacgctccttaattatccccctctcccggctcgaagaagattcggccggtacatttggtaaaaactcacgcgaaaagcttaaacgcctgcccagctccgtttactggtccgggctgcggcgctggggtattcacgagatgtcgtgctcgcaggaagaatatcatcggcgtgtggatgaactgtatcgcgcgcgcgcggaaagtagcgaacgggaataccaggaaaaaaatcagggcgatatgggcgacacaagcgcgaataaatcatcccagagctggcactccagcctgcctgcgccaccgcccaactttcctgatgaggcaacatttgccctgacgtgccaggaagccagttttcttcgcgatcgtattcaatgttcatgcaaaggcagcctgctagcctggctgaccctgcatagcgaaccggcaaaggtcagcgcaccatgggaacatccggattacgcgaaattcccggacgatctcaaggaactgttgactcacgcgcgacttttttcttatacgatgcacggcgcagccctgctttataactatttgcttgccaaagaacgagcagataacggccttcagtctcaacaccatgacaactttgtcgcctggtttaccgcactcccccgccaggacatcaagatctggtcgctcgaccgcatgtgggaactgaccgccgggccggactatagcattaatctgaagacccgccgctttgtggaacagtggattgcccttatccgacaatcctccgggacattactcaccagtaaagaagcctgtacactcatccgagcccgcgaaatagcgctcaaaggcccgcggtcacgctttaaaaacagacgcgcactggagcaatggagtggatatgccggaaccctgcggctggtctatcgctggcataacgtccagataatacttaacgatctggcgcaggggctcaggagagaagaatgctaa

SEQ ID NO: 167826 - DNA, 1797 bp, Enterobacter cloacae
atgctaaaccccagcaatcgcagcttatatacttcggcactgacctctccacccggtatggtgtttgacgaagccatcgccaccagtttctcactcgacccggcatttttactgcaagcaccggtctatttggcgttcacagcgactgatagcaaccgcgctgaggatccgctgtccatttttgaagccattcgtcgttattccgaacgtatcacggtgtacgtccaaaaagggcgtattcaggtccccgcaaagctcaagcccaaccccttattcggcctgcttgaggagatgattgctgaatcaaaagccaaaggccgcggagtctttcaccccaaaatctgggcgatccgttttatcaatcctgaaacagacgaagtgatgtaccggctggtcgtactgagtcgaaatttaactaccgattcatcctgggacctctctttgcaactggacggctaccccgtaaaacgtaagcaaagtgccaataaagcgctggtgcatttattctccgcactgcccaaacgggcgacgggaaaaatgccgaaacatcgccgggcgcaggcgcagcgctttgcagatgaactgttgtatgtggaatgggaatgtcccgctggctttgatgaggtcgcgtttttcctgcctggcgaaggatacgactggcagccacccgaagcggatcgcgcggtggttatctcaccattttgcaccgacgaggcactgcaacacatcgtgaagcattgccagcaagccgatgcgctgatttcacgcccggacactctgcttgccttgagtgaagagacgcgcggccttttcacacgtcagcttcaccttgacgatgccgcagaagagcaagcatccgacgagaatacccctgacgacatcatcgcttccggcctgcatgccaaagcatatctgtttgaaaatggccgggacagcgagctggttctgggttcagcaaatgctaccagcgcagcgctactggggaagacgaactgcgaaattttagtttcgctcaagggtaagaaaaagcacaccggcaccattgatgaccttctgagcagcgatggaatggaaagctatctgcaagatttcgaccctgaccagccgtttgaacccgatatcctgcgtgtagaagccgagtcccacgttgaacaggcacgtgcgttgctcgccgacgccgtattgactcttcactgtcaccccggtgaaaacgaccaaagctgggcattgtggcttgtcggagaaattcctgagctaccgggtatcgtgcaggcaactgcgtggcccgtgacggtatcagatggactgggctgtagcctgctggacccggccgatgggaataaaagagcactcggtgagttttcagtcccggccattaccgggctgacagcgttttcccttaaaacatcgcacccggatgtatcggtcagattcgtcctcaatctgccgattgataacttgccccccgatcgccacgcaatgattttacaaagcagcatgcagaaacaggattttctgcgttatctgttgatgttgataggcgaggcgggacagcaatccttctttgccgaaaacgcctttggcaatggccatttctttacaaggcttgccagtagcgaagaatttgccgtgctggaagagctgacgcgtatctatagccgtgagcctgaacgcttaaaagatatcgccgcgctgattggcaatatgcgcaaaggacaaagcgacatgattccgcaagattttcttactttatgggctgtatttgaatcagccatgggaggacgaaatggccgataa

SEQ ID NO: 167827 - DNA, 3159 bp, Enterobacter cloacae
atggccgataagcaccccagtattatcgttccactcacgggattgaaagattttcagcaacgcaccgtaaattatgtttttcagcaattttacggtgataaaccgcaaaatcgctttctggtagccgatgaagtgggtctgggaaaaacgatggttgcccgcggcatcatcgccaaatccatcgaacatttacagaataaaatcgaccgtatcgacattatttatatctgctcaaatgcggctattgcggcgcagaatatcaagcgcctgaatgtcagtaatgaggcgcaattttcgcactcaacgcgcctgacattcctgcccaaacaggtacggtccctgcgcaaaaacagaatcaattttatcagcctgacgccgaacaccgccctcgatcacacccgcagtcgtggcggtcataaagaagagcgcgcgatcctgtatcgcattttgtacgatttaccgttggcaaaaggcgagtgtcgcgaacgtttacgcctgggcatgcttaacctgctccaggccgcggcaggccgacctggctggcattccacggttgatcaactttccgtcaaggatattgacagggaactggcaaaagactttcgccgcaaggtgttagacgatgccgaactgtacgctcagctcaaggaggggtgtgagtgtttcgccgatgacgatgaggacagcgagcttcacgattctgaactgcgctatgccctgatcggcaaactcagaagtaaactggcttctgtgtgtttatccgcgctggaacccgatctggttatccttgatgagtttcagcggtttaaagccttactcgacggtgacgatgaagccgcactgctggccaaagcgctctttgagcagcccgacgttcgtgtgctcttgctctcagcgaccccgtataaaatgttcaccctcgatcaggaaagcgaagaggataaccactacgctgactttattcgtacattgcagtttttgtataacgatgacagtcaaatcaaacagattcagcagtacttgctcgatcaccgtactgcattgcacgcctcagaaaacgcagtggagacaaaaaaagcactggagcacgctttattacaggtaatgtgccgtaccgagcgggtaatgatgacccaaaaactggatgcgatgacaaaggaagtctcacaaccagccatgattacgcccgtcgatctttatcacgcggcggcggttgatggcgtcgccatggaagtacaggctcgtgatgtcctcgaatactggaaatcgatgccttatcttttcaatttcctgaaacattacgaattacgtacccgtatggataaggcactggaatcgccttcagatgcattgcgtaaactcgttaaatcagcaaaaccgcagttgctgacaaaggcaaagctggaacgctaccagccgttagacgccgcaaatccacgtatgaggatgctgtttgaagacacactggataaaggtatgtggcagcttttgtggatgcctccttcactgccttacatgacaccaaacggggtatatgccaacaaaggcagtctgaccaaaacgctggtcttttccgcctggagcgcagtacctaatgcgatagccaccgtctgctcttatgaagccgaacgacggatgattggtgccgatcctcagatttcgcacagccagttcaagaaaaaagtaaaatcgctgctcaattttgcaaaatcatcgaaagatggccgtctcaccggtatgcccgttatcgcctggatgctaccgtcaccgacactcgcccatcatatcgatccacttgaaattgcccgccaaaacaccggcgagccgctgagcgtgaaggctgtaagagagattgcaacggcgaaatgtgaagcgctgcttgagacactgggcaatgacgggccgggaactcgtgcggacgaacgctggtactgggcagccgcggcattactggatgcccgtaccgcaacgccagactggtggcagggcgaacattactggtacaccgggccatcccaaaatgagcctgccgaaaacttccaggaacatatcgatcagtttgccaggatggcagctggtgacatccccctcggcccacgccctgacgacctggcagaggttctctgtgacttcgcgcttgccagccccggcacatgtgccctccgggcgctcagccgtatcgacacaggcctggcaaccgattcggctgagatgttgtcagccgcagcgcagatcgcctctggatttcgttcgctctacaaccaggcagagagtatttcgctgctacgtggtacaggggatgacacatactggcggctgacgctgcgttatggcatcgatggcaacattcaggccatgctggatgagtatgttcatacgctgcaggaatcgatgggattacaacacgaacccgccgaagcgcaattagcggctattgcatcacgcatccaggccgtagtgtcactgcgtaccacgcaattgaacgttgaagagttaaaaacgaacaagggtcattacacctggagcgatttgtacacccgttgtcgctttgctttacgctacggccaactcagggacgatacggatcaggccgtcgcacatgcggaatcggtgaaagatgcgtttaactcccctttccacccctttgtattggcttccacctcaattgggcaagagggactcgattttcacacctggtgccacgcagtgatgcactggaatctaccgtcaaacccggttgatatggagcagcgtgaaggacgagtacaccgttataagggacatgcggtaaggaagaatattgccgagcattatggtttgagtgcactgtattcactggcagaaagtgcagatccatgggcacagctcttcgcgcttgcggcaagccagcgcaaagcgggacagtcggatctaattccctactggatttttgaagaagggacctctcgcgtcgaacgcagggttcccatactgccgtacagcaaagaaagcattaagtttaagcggcttaagcgagaacttgcactctaccgtattgtctttggccagccgcgccaggaagatttgctgttcggcctgaaacacagtggcgatgagtctttaacggatatggcacagtggcttatctctcttgaaccaccaaagtgtgatgcaccttag

SEQ ID NO: 167828 - DNA, 201 bp, Enterobacter cloacae
atgttaaccgcaagctggtttacccgcacgcaagatctggacatgaaaacaaatacgaggacaaaaccaaaagccatcgcatcgagcaaaccgaacgagaaatcagcaccggtaaagagccatataaatcgcatgaaaatgttgaaacgccaggcgtacagacatgacagattcaagttactgccacctacggccctataa

SEQ ID NO: 167829 - DNA, 858 bp, Enterobacter cloacae
atgatctggattgacctagagcacaagcgacctaccgatacaaacattccgaactgggtaccatggacacaagcacgatgggatgcttggttggcgaaatcggcccaactagtagctgccttggctgctttggacgcagaaggcgaacgaaacgaacgcaacgcattgatagatgccaatagtgcgcactggggtgtactgaaggaatggttgttggccttgtcagcgggtaaatgctggttttctgaggtacgcgagctgtactcacattacgatgtggagcattttcgccccaagaaagaagctaaggcgttggatgcaagcctgcgtgatggctactggtggctagcatttgactacatgaatttccgtgtgtgtggcaacgtcggcaaccgtaaaaaaggtgggtggtttccactcaaggacggctcactttgttctacctactccgagccctgtgaggaatccgaaacgcgttatctactcgatccgattgatgatgatgatgttgcacttattgccttcgacgaagaagggaaggtcattcctatgccaggttcctctgcgtgggagcaggagcgagtcaatgagacggtaaagcgactcaaactaaatgaacatcctcccctggcagaagctcgtcgcaaaatctggcagcaagttgacaggctaatcgatgattttacaacagccaaagctcgctgcagaactggcaataatccagtagccaaagcaaagttgatcgaagttcgagctcaagtgcgcgcaatgaccagcacaacagctgagttatcagctgttgctcgttggtgtttgttggtgcgtaacgatccacagctttcaagattggttgggtga

SEQ ID NO: 167830 - DNA, 1749 bp, Enterobacter cloacae
atgcaactgctgcgcatccttatcccaacttttcgcaatctgcgcgatctcgacattgctttcgcaacgcacttgcagccaacagcaagcgcaacagatgcaccacccaaactcatccgtagccatgccctgattggtcagaacggtgccggtaagtccaacctaatcgaagcgttgcttaccattttccgcgatgtcgatctggaccgtgaagcgtcgttcgattacacgctggaatacaacattcggggatacatggtgcgtattgaagcggatacttccaagcagaagcgcccctacgtatgggtggatggtaaagctgaatcacaaggctatttgctcaaaaaccgcgagctgctgcctgcacatatttttgcttattactcgggccgtaacgagcgtatcgaagccttgtttcaagagcaccagcgccgcttcaaccagcgccaggaaatcactacagatgaagtgctgtctgagcaactgctggagaattttaccggctcggagtcagatattcgcgccgtcgaagaagccaaacgtcgtcacgagtcgaggctgaagcaagcgggggacgaccgcctgcgccgcctgttttattgtcgcggtggccatagccaactggtgctgctggcctgcctgctgtctgacgatccggtgtttcagaaggtgctaaagaacctgcatatcgagtcgctggagtccgcactgtttgtgctgaaagaaccataccgcttgcgtgaaaagcgccgtagcggcaaattcgaccagcaggaactgaacgagggagacccgcgcttttggtatgctcgtggcaatgtggtgagcgaattcctcgataaactgtggcaagtagcttgggctcctattgagcaagaggcgaccaaacagatcgacttccgtggccgtaccgaaaaacagaagcagctgtacctgttcgtgccaaatcaggagaaacttaaacaacttggtgaacttgtcggcagtgccgatagcttcttccgctacgctgagggtgcctatattggtgacctgatcgaagaagtgcgtattatggtgaagaagcgcgatgaacacggcggcaaggtaagcttcacacatttatcagaaggcgagctgcaaatgcttaccgtgttaggtctgatgcgtattacccgtgaaaatcaatgcctgttcctgcttgatgaacccgacacccacttgaatcctatctggaagttgcgctatttcgacgatattgaaggtgtaatggcttccgatgatgcagcaccagtaaggagcgagtcgcagataatcatcaccactcatgaccccatgatggtgggtagtctgaagcgtgagcaggtttatataatgcgtcgtgatggtaaccgtacattggttgataccccggatgagcacccgcaagggatgggcgtaacagggctactcaagagcgacttgtttggtttgtcgtccacgctggatatcgaaaccgagcgccgcttgtttcgtcgcaatgaactgttcgtcctgtcacctcgcaccctcgaagaagatgaggaactgagccgtttgtcagctgagctggctgacctgggcttttcgaccgccgactttcgtgatcccgactacgcaatgtttgtgcgcaagatggcgcaacatcgccgtttccgcaaacccgtgctcacaccagaggaacaggccgagcaggatgccatcgccgattcgatcatcgatgagattttgcgagaggaagatgaccaatga

SEQ ID NO: 167831 - DNA, 2004 bp, Enterobacter cloacae
atggacgcgaaacaatttttgtctgaatttggacatgtggctcatgcgccgggaggtgttgcgcggctgcgagaattgatttatcaacttgcagtaacgggtagactaaccaagcaagatgaaaaagatagcgatgcggacgaagttctcaacaacgtcgcccgcatccgtcagcagcttattgccggaaaaaaatacaagcgctcaccaaaattggagtcatcgaatcttgttccaccagccattgatcttcccctcaattggcgctggagccgattactagatcttggtgaaatcaatccacgcaaccaagctgaagaaacggccatggccacattcgttcccatggctggagtttctgaaaaacattcaaaagaaatatcaggtgaaataaaaccctggtcaaaaatacacaaagggtatacccattttgccaacggtgatgttcttttggcaaaaatcaccccctgttttgaaaatggtaaagcagctgttgtttccggcctcgaacatgacatcggtgctggttccacagagttccatgtttttcgctcaattagccagtttattcatcctggttatgtgtacttgttcttgcgctcacctttgtttcgggcaaagggagaagccagtatgactggcacagcagggcaaaaacgcttacctacagattacttcgcactttgtgctatgccattaccccctacagctgaacaatcgcgcatagtcgccaaagtcgatgaactgatggctttgtgcgacaagctggaggtgcagcagcaagcccgccgcaaattacaaaacgcactgcgccagtccacattacaagctgtcgccaacgccgccagcccgcacgaattgcaatccacatgggcgcgcttagctgacaacttcgggcaactgtttcatgctccagaggatttggatgagttgcgaaaagcagtgcttgatctggctgtatcaggatatctgagcaatctaggtcaatttgatgagccatcctccacattaaaagcaaagattctgaccgctaaggaacgaggaattttagacggctctttctcccgaaagaaacacgtcaagccagaaaaactcgaagaaacgctgctaccagcgcattgggaatgcattacattagatgaggccatttccactatcgatgcgggttggagtccagcctgtctccccaaacctcgtgatgatgaaaataagtgggctgtgttgaaaacaacggctgtacaggttctacgtttccttccgcacgagcataaagaactacctgcatcgcttgaccctcgtccccagtatcaaatcgaggtaggggatattctgatcacacgagctggtcccagaaaccgtgtaggtatttgctgtgttgctgataaggcccctgcgaaattgatgatctcggataagttgattcgctttcatatcgttgacgatctcattaatccacgttttgttgcagtttgcttgtcagcgggtgaatctggccgaactttagaacgactgaaatctggtatggcggaaagccagatgaacatttcccaagacaagctccgctcaatcaccattccgttaccgccaatcgaagagcaacggcgaatactagaaaagattgaactgctaatgaagatcatcgacagttatagtgagcgcctgcgtaaaaaaaatagattggcagaacaggctgcagccgcgtccgtttccagcatcaccggtatcgccatcgaacaagaagaggaacccatgaaagcccctcaaaccgagctgatcgccccactgcgcttgggcacagtacccgacatcaaagcccaagctccgctggctaccattcttgcccgccatcacggtgaaatgagcgccaaggatttgtggcagcgcttcggcggtgagattgatgccttctacacgcaactgaaaaccgaagtggcccacggctggattaaggaaccggcccccgccgaagtgcgtgaaaaaacagccaagatggcgagtgcctga

SEQ ID NO: 167832 - DNA, 1782 bp, Enterobacter cloacae
atgaatctcagcagtaccattaaatccattcaagacatcatgcgtaaagatgacggcgtcgacggtgatgcacagcgtctcggccagctcacatggatgttgttcctcaaagtgtttgatcagcgcgaggaggaatgggcggatgataacccggcgtatatctctcctttgcccaaagagtaccgctggcgtaactgggcagcttatatagcgggggctgatggcaaaaagaagccacaaattgccggtagtgaattgattagcttcgtcaacaatgagttattcccaacgctcaaagagatcgatgctaacaaaagccctcagcacaaagtcatccgtagtgtctttgaagatgcgaataactacatgaaatccggccctcagatgctggctgtgatcgagaagctggaagatgctatcaatttccacgattttaccatccgtgcaaatattggcgatgtgtacgagcaattactcaacgatttgcgcggtgcaggtaatgccggggaattctacaccccacgcgctatcaccgcttttatggttgatagggtcaacccgcgtttagataagcgtgagacagtaatggacccagcctgtggaacaggcggtttcttgaccgccaccatagagcatttccgcaaccaactcgtgacaatgaaatcaccgcgtcctgaagacaagcgcgccattgaagcgctgatcctcggcatcgaaaagaagcagttgccgcacctgctctgcactaccaacatgctactgcatggaattgacgtccccagccagattgagcacaaaaataccttgggcataggctggaacgagtggaaggccagtgacaaggttgactgcatcatcaccaaccccccattcggagggtatgaagacgatggcgtgggcagcgactatccggctgacttgcgcacccgcgaaaccgctgacatgtttatggcgctcatcatcaagaaactgttgaaggaaaaaggtcgcgctgcagtggtattgcctgatggatttttatttggcgatggcatcaaaggcacgctgaaaaaactgctgctgcgcgactgcaaattgcacaccatcatccgtttacctaaaggtgtttttgcaccgtataccaccatcaagaccaatctgctgttcttcaccaagggcagcacggtggacgatggcactgaacacttccacactgacaccatctggttttacgaacacccctaccctacgggctacaagagctactccaaaactaaacctatccggctggaagaattcgaacccgagcgagggtggtggggctcggaggaaaacgactttgccgaccgcgtagaaaacgaatttgcctggaaggtggatttcaaaactaagcgcgaacaggccgaagctgctgcgcaaccgcactggcaaatcgccgaagcgctcaataacaaagccagcgaattggataaccgcatccgtgatatgcgcgattccattaaaggtatcagcgataaaacccagcgccaagctgttgatgatgaaattgaaattttgcgctatgaaagtgaaggtctacgcttaaaagcccgtgatgcccaggccgcgggtgatcgccactattggccgattttcaatcttgacctaaaaaaccctaatgccccagaaaaagaaagctttgatcccgaagaacttttgaccaaatacaaaaagttgctgggagagattgaagaaactgaaaaccagctcaaaagcgagttagctgcagccctcgctcaccacttttctggtgaggatgattga

SEQ ID NO: 167833 - DNA, 2406 bp, Enterobacter cloacae
atggataaatatcagctcagcgagcgtgatatctgcacaaaattcattacaccagctattcaacaagctggttggcagcagcatcagttccgagaggaagtcaacctcaccgacgggcgtgtcatggttcgcggtaagatggcctctcgagtaaaaaatcctgaagctaaaggaggtcctaaacgtgccgattatgtgctttatgcaagaccaaacgtgccagttgcggttgtagaggctaaacaagcgaagtttcccattgggcacggtatgcaacaagctctagcctatgccgaaatgctagacgcgccgtttgccatcagtagcaatggcattggttttctcctgcatgaccgaacaggcctctccttacctgtcgaacgagaacttcagcttacccagttcccgaccttggccgacttgtggatggtatatcaacaatggaaaggattagttgcacctgaagctgtgacgctgattgaacagccgttttataccgatggtagcggccgcgaaccacgttactatcagcgtgtagcaatcaaccgtgccattgaagcagttgccagaagacaagaacgaatattgctggtcatggccactggaacagggaaaacgtatacagcttttcagattatttggcgcttatggaaagcaaaatccaagaaacgcattctgtttttggccgaccgcaatatccttgtcgaccagaccatgcagcaggatttcgctcctttcggcgaggtgatgcataaggtcactaaccgtgaagtcaaaaagaactatgaggtctaccttgctctctaccaagcggtaacggggaaggaagaatggaagcagatctatcgccagtttccaagggatttcttcgacttagtcgtgattgatgaatgtcatcgtggcagcgccgcggaagactcagcatggcgcgacatcctggattatttcactacagccacccacattggtctaactgccacaccgaaagaaaccaatgaaacaagcaataccagctatttcggataccctatttatacctattcgctcaagcagggcattgaggacggttttcttgccccctacaaggtgatccgcattgcaaccgatgttgatgcagtcggctacataccagagaagggcaaaatcgataaactaggccaggtcatggagcaacggcagtacaacacaaaagactttgatcgcagtctggtactggagaaacgcacatctcttgtcgccaacaaggtatgggaatacctccaggctacagatccgatggctaagacgattgttttttgtgacgaccaagatcatgctgagcggatgcgccaagagctggtaaagctcatccctgccgctgcaaacaatcgccgttacgtcatgcgaattaccggagacgataacgaagggaaagcacagctctcctactttatcgataacgatgagccttatccggttattgccaccacctcaaagctacttaccacgggcgtagatgctaaaacctgcaagctaattgtcttggaccagagcatcaactcgatgacggagttcaaacagatcattggccgcggtacccgcctgcgcgaggactaccaaaaactctacttcaccatcatggactttaaaggcgctacgcgactgtttgctgatcccgattttgacggcgaaccggtggtgatctacgaacctggccctgaagatcctgtggcaccgccagatgtcgtcaagccccccagcatagaagaactagaacctctaccctatgactctagtctcacagataaggatggaggcagtgtaggccgagtgaagtatgtgattgatgacgttaatgtgtgtttagcggttgaacgctcgcaataccttgatgtcgagggcaagctcatcactgaggactaccgagtcctgctcaaaaatgagattaaaagcaccttgcaggctaaatttggtaacctaaccaactttctacggcgctggagtagcgccgaacgcaaacaagttgtgatagaggaattaaccgaacatggcgtaccgttcgagctcctgcaacaggcagtcgctaacggcagcgaactggatgcttttgatctggtaacccacgtcgcctttgaccagaagccactcactcggcgtgaacgggctaacaacgtgacaaagcgtgatgtgttcggcaaatacagtgggcaagccaaggccgtactggaagctttgctcgaaaaatttgccgatcatggtgtacaagacatagaggatgccaatgtgctggaattacctccatttgacctatttggtagcaagacacaaatccgtcggggtatttttggtggtgtagagcagtacacccaagccgtgaaggagttggaactggctctctacgacatatccgaacaaaaacaggcttga

SEQ ID NO: 167834 - DNA, 129 bp, Enterobacter cloacae
atgctgcagaggtatgccgactatatggacaacctgtggcgcggcgggaatgtggtgcatggggagtttgggtgtcgtgcttggttgagagtggttttttctgaagaagagcaacagcgctggcaatag

SEQ ID NO: 167835 - DNA, 600 bp, Enterobacter cloacae
atgatacttaaaaatcggccagaggccctgtcattcctggctattgtgattgccctagcatcgatcggctacgcggcgtgcatagtgggctaccaagtctggactactgatgctgactacagcttcgggttacaggttatgctgccccgcttagggctaatcatcagcggctttatgggagcatgtggtgcattcgctagtgcgaataaatataaccagcaatcgaaaaaactcggcaccgtgtatacgcaggtgtcgctcatactgttagctattggtactgctctacttgtgtacgggctatggaactggagaaccaattaccagttaatctacagcacacttgggcctgcatttgtgggaaatggaatgttcatacttatgcacaggctcaattgggcaacaagtaagattgccacagtggtcatcacagcaggtctactgatatcagcctttgtagtggcaagcattggtagaccttcaccttttgacgcatggcagtttgtcgttgtgttaaatggtgggactggtttgttcatcctgatggcagcactgggaggcagttttgtgatgaacggtctaatgaagcaactgacttga

SEQ ID NO: 167836 - DNA, 351 bp, Enterobacter cloacae
atgaaccacggcacagcattgctgacagtcttatctctcgtaatggctcccactctccctgtaaaagcagaaacgaaagtgatggatatagcgttagtctgtgagaacagcataactgctgatatccattacgcagacgaacagggttttattgatatcaactcacccgatggcgatcgaaagatacgcttacataaagccgagattgtcgataagtattcgatcatcaccttctacgacggctcgtcactggcaaaggtaatctttatgaatagtaataaactcaaccactttgaattacagatagggccaaagggtaaactcaacacatgtaagggagtcaggctatga

SEQ ID NO: 167837 - DNA, 432 bp, Enterobacter cloacae
atgcacgatataatcaatcaggctcgcgagctgttgacagcacagctgtatcgtaacgagtccttggggtcccccaaagaaaccgaaagctatctcgccctgaaactcggtgaccgtgaacaggaggtcttcgctgtcatcttcctggataaccggaatcaggtacttgagtataaagagatgttcttcggcactcttgcatctacaagtgtatatccacgcgagatagctcgtttagcgctttgtttgaacgccgctgccgtcattttctcccataatcatccctctgggcatcctgagccatcagcggctgataaggccattactgaacggatacagaaggtgatggagctgatagacgttcgggtactggatcacatcgtcgttggtggtggtcggactgtctcgttcgctgataggggctggttatga

SEQ ID NO: 167838 - DNA, 1107 bp, Enterobacter cloacae
atgatttttttccaaaaatgtatttacatgcttattaattggtttacgcggcagcgtaagcctccttttatctttcttgcgactggattggccattttacaattaggtggaggactctcttggcaggtaatactaagttacaaagattatggagttaaggcatcatctcctgaaggtggttttattacggagatacttgttccgcttttaggaatagtgctttgtatcatcggagcagtgtgggcagtatgtagtgcaattacagactggcgacaaaattctaagaagagtatcttggtcattaggggggagggattaagaagggtagctggtagtaatatagactcgcagatctataaacggcactcaggcagattgaattatttggatgtcaacatcacccagaatatacgagacggttatgtgattcatcctgcagatgtatttcgtaattatgtacagcctttaagtcggaatttgaatcaatatttcggcgcaacggcattgaatgatattcaagtagtctatgcaggtatgctgcctgttcccttccttttctggattggtaacgtacttgatgataagggtgtcgttactttaattgactggaatcgtgcgagtgagacttggcaggtaatttcagataatacaccagatgatggggattcttttaatcaagaaactataatggaaggaaatgttgaggatgttgttattgccatatccttttcctatcatgcagatctaacttgtattaagaaaagctttaccggattgcgtatcgagcatctttatctaaagcatatcaatttcgataatcattggtcgattgaaaaacagcaaagactttctttacagttcattgagtttgtaaaaaaactgcagcaacaaggagctaaacgtatacatctaattttagttgcgccgagtagtgtcgtggttagttttggacgacgttatgatagccgtaatctacctgaactgatcgtctatcagtatgagaaatctgatgatgatacctatccgtggggagtatacgcgatttctcacggtagagaagaaggcggctttgtattacgaacagaggctcttaaagttcgtttttaa

SEQ ID NO: 167839 - DNA, 579 bp, Enterobacter cloacae
atgatgaaaatggaatttattttgatgaatgataaaaataatcctcgttacttttctgtcgatattgagagttcaggtcctgtgcctggtttttatagcatgctctcttttggtgtctgtctggtggaaacgcccgatataaatttttatcgggaacttaagcctcttactcttcatcacgatcctgaagcactttcggttactggctttgatctatatcatctaatgaatacaggtattgatgctttgacagccatgaaagacctttcagtttgggtggaggaattatctggggacggaaggaaagctgtatttgctggctttaacgcggcattcgattggtcatttataaattggtattttcattatactgctatcaaaaatccttttggttatgtcccgctggatattaaatcacttttcaaaggagtttgtggacttccttggcaggaagcacgcacctctgttgcagcagcacattatggcatcaaacgaggcagagagcatcatgcacttgatgatgctatttttcaggccgcgattcttcaagctattctgaatgataaaggtgtgcgctaa

SEQ ID NO: 167840 - DNA, 486 bp, Enterobacter cloacae
atgaataaattcacttctcctcctgcgctttcactaagcgtacaattttactcccttaagaaccgctttcgtgaaggctctgggcgtattactaatcggaatcgcacacttgtttggcagagtgaaatatcccctggtcctttctgtagaaaatataagatcctcttgcgttacacgaaaggttttgcgccagaatgcattgtactttcgcctgatttggacgagttggctggcggtaaaaaaattcctcatacgtatgggtacgatagtgccacaggtcatagaaaactctgcctttttttacctaaatcgaaaacacttgatggtctatctgagtggcggcctcagctaaaactaagtgatacaattattccttgggcttcactctggctgctatattttgaagagtggttgttcagtggtgaatggaagggggggggagctcatccttcagatgatgaaaatggaatttattttgatgaatga

SEQ ID NO: 167841 - DNA, 1275 bp, Enterobacter cloacae
atgcaaaatccagatcctatacgtctcctttcaataaccgagaaacaatatattgccgatattctaaaggctctgactgagaccttagatttaacggatacacaatatcagcagattcgccaagcttaccgaggagtaggaacttggcttgcagaaagtgatgatccacttttacaagatacacgcatttactctcaaggtagtgtacgtttgaacacaaccgtcaaacctggtccagatgagccttttgatatagatttagtgtgttatcttcctcatgcaggcactggaagtggtagtgaggttcttaatgcggtagagcagcgcttgattggtcatgagcgttacaagactatgtttgaacggcttccacgaggttttagaattaactatgcgggttcgtatcatcttgatatcacgcccggaactgattacagcagtgaggattttgaaggtcacccactttgggtcactgaccgtaatacagagtggaaagaatcaaatcctgatggatacgcgatttggtttgatgctatcactgagaaaaaaccgcttcggctgcaagcaagttttgagtcttacgcttctgattctgctctcaacaaatcgcttgccccgcttcccgatcatacatctaaaaagctgctcaaccgcattgttcagatcctcaagcggcatcgtgacgaatggattgcaagccagaataaggatgtataccaatacaaacccatttcggcgattatcactacacttgctgcccatgcttaccagaagataattgatgaccgtcttgcttatgataatgatcttgacatcattatcgatgtaattgagtttatgccgaatttcattcaaacaagttcggagggtttgcaggttcttaatcctgcaatgcctttagaaaactttgcagaaaaatggaatgtcatcgacgggaataaaggccaaaatctatatgcctccttcaaaaagtggcatgaggctgtgttgcagagtttcaaggctattagtgcttctgtcgggcaggacaatcttttagaaaatatcagtaataatttcggtgcagaaccggtcaacattgttcgtgatcatatgttaaacaatcttggagaacttcgtcgtactggtaagttaggtatagctggtggggcggctacacttatcacaggaaaggctaatgctattcagccgagtcctgtgcctagcaatacattttatggttcagactcttccactgtcgttccagttccggctaatacgttcttcggggattaa

SEQ ID NO: 167842 - DNA, 2613 bp, Enterobacter cloacae
atgaatattgaagagcataatgaaaaggcattaattggggcgttacagctcgcaatagaacatggcattgccgcagaggatactgaattaaaagcaatagatacagattaccctcggtttaaagatgctgatgataagcatggtcgggcaagtggctggttaaatccatatattaatgaggaaggtaagattctcagagtatatatcaatagttatcatgaaaatttaggtagcgcgatatgggatcatgatggtctgcattcattgccaccagaagaactacaggagattgataatgaactgaaagcattaaaggagaaacgaatacaggaaaaggatagcctactcgctagtaatagaatggagttggagagaagtttaaaaacacttccatctgtatcacagcatccttacttatcaaggaagcaagtttcaggtaatgatatttttgtggatggaaatgcattaattatccctattcattattatggcggtgagtttgttaatgctcagcgtatttttcctgatggaactaaatgtttttttaaggattgcggtaagaaagctgcctgccacgttattcaaggtgatgacagtacgatattagtagcagaaggatatgctacagcagcatcctgctttgatgcgacaggatatacttcagtcatggcgatcgactgtgggaatatttactcggttgtcgagtctattcgcttacataccaaggctccaatcatcattgttgccgataacgataagtacaaggagaaaaacgcaggagttgaggctgcgaaaaaggtcgcaaaaacaattgaaggggtgtctattttcatccctgagtttcaggatgagacgagtcagcccacggatgccaacgatttgatgctgctggagggaatggacgagttgaagaggcaactggagcccgttatcgctcatgccagaatggggattccacccagtttcttcttctcaaatggatggctgtgtcagaagcgtgagtcgggtagcgcaaagattagtacggctatttacccggtcgcgttgtcacgtgataaggcgagtgaagactggggattggtccttcagtttgcggatatggatgaccatacgcaccagtttgcattgccgagggcggctttaattaaagaaccttcgttgatgctggagccgttagtttcacgtggtttgcattatgatcccggtgaactcagggtactccagagttacatcaacacggttcagcctgtaggaagagctaggagcgtatcgcagacaggatggtttggcgatgtttatgtgctccccgatgaagctattggtgcaacaagcgaggatgtaatttatcagtctatttccggggctcctcctggttacgagcagtcaggtagccttgaggactggcagaaaaatatctctgctaaatgtatcggtaacagtcggttaattctgatggttgctgccggatttgccgggccattgctggaactggacagttcacttgaatcaggtgggtttcacatccgtagtgaaagcagccgagggaagtcgacaggtcttcgcgtttgtaaatctgtctggggagccccagataagctcgtaacgtggcgtgctacttcgaacgggcttgaaggtgtttgctttgcacataacgatgcgacgttagtgatagatgagttgggccagatggcagatgaaaatcccacagaggcggctcagaccgtctacatggttgctaatggggcgagtaagcagcgggcaaaccggaagggaggtgcagcagcgattaaaacgtggcgtttgatcttcatgtctgcgggcgaggtatcgctgtcgaacctgatggagcagcatggtaagaaggttaaagctggtcaggaagtccgttttatcgatattccggcggatgctggaaaggggctggggctgttcgaggaactccatggtcacattgatggtgccagcttcgcagaggctctgaaccgtgacagtaagagtttctacggtacggctgcccgtgcattcctgcggcaacttacggcggataaggctggattggcagtcaggctcaagtctctgatggctgaattccttgttcatgtgccggaaggtgctgacggtcagattaaacgtgccgctaaccgctttgctcttgtggctgctgctggggaactggcgcgggaggtcactggttggcctgatggggaatcattccgtggagtcaaggcttgttttaatagttggctggcaggacgtggggaaggttctcatgagtctaatcaagctattgaatccgttaaagctcaattactaacatggggagattcacgttttggacaggcgatgaatagccctgtatggggggtaaaagttggtggtgatttttgggtttaccctgctgcgtttagggaagaattatgtcgagggctggaccatagaaatgtagctagggtgttgcatgagagtgattttcttccaagtagtgcggcggtaacaaaacgaatacctggcggagagtctcgtaaagtttatgttatttcagggaagcttctgggggatgatccagagacaccagaaccagtactgtgcgacgactcactatactctgtgtga

SEQ ID NO: 167843 - DNA, 246 bp, Enterobacter cloacae
atgatctgtaataatgaaagcttcatgcagaaggctgctacctttagccagttaacctctgttgaagataaatgcgaatacgtctacgagttgcttgaaagtatctgtcacattgaagatgggcatgtaacttacagtgaagagcatgactgctatcagtttttctccgggggggactgctgtagcatgcgccttgtcatgagtccttacggagatatcgaacacttcgaattcggctgtaactaa

SEQ ID NO: 167844 - DNA, 771 bp, Enterobacter cloacae
atgaatttaatcgagaaaaacaatgtgaatagcgaaaattgtgatattgaatcacttaaagaggagttcattgtctgtcttaaaaaaataaaatataaaacaaataaggtaagtgatagtgaacttggtgctgttaaagttatttcaggtggtagtatctatgttgaaatatctgaactgtcatttatgcctcctgaagacaatactgtaatgggatgggaaatccccaaaggtgttgctgaaagagcaattgaaatcatggtaactttcttgaattgtgggtatgaactaaccaaggaaatgagagagtatttatctgctgggctgcaatcttcaatctctgaaaatggtatggatttacaagattcgtttaacctacgatctcacaataaaacatacgaaaaggaaaagcttaaagcaagaattggaacatatattttttatcgaaaacaattaaatgaggcaataaagaaagttactaattcaggctacacacatacaggacatcttaacgagatgctgtatggtgagataaaaacactctttggtatctccatttctgatcataaaacccttgcaaggtatgaggcaaaaaaaacagagagtagttttttctataattctctttctcacatgattcagcagaatccaaccaaaacattaatgtataaacattgtttaaaacttgagatagaaaaagagagtaatgtcacaataaaaaagttcaagtctaaaatcttgggtctcttggaaaagtcaacgttaaattga

SEQ ID NO: 167845 - DNA, 1695 bp, Enterobacter cloacae
gtgagaagtcccaaagcttattcctatgttcgtttcagtacccctaaacaagcccagggggatagctatcgccgccaacttcagcaggctcgggactattgcacgactcacaatcttgtgttggatgacaagaccattgaggactttggagttagtgcttttcgtggtagcaaccgtactgatggtgcattgggtcgcttcattgatgccgtgaaaagtggggaaatcgagaagggatcttatctcttgattgaatcggtggatcggctgagcaggcaagcgattgaagaagctctaacgcagttcttggaaatagtcagagaaggcattgtgattgtcactctttcagataatcaggtctttcgcagtggtgaagtggatttcacaaagctgattgtttcgattgtctatatggctcgtgccaacgatgaatctgaaatgaaaagccgccgtagccgtgctgcatggtccaatggacgccaacaagcgagagaaaataacaaagtgatagctaactctcgccttccttcatggttgacgcttgagggggacaagatcgttcctatccctgaaagggttgctattgtgaacgagatgtttcaaatggctcggtctggccaaggttatcaacagattgctaaggcattcagagataaagattacaagacatttgggcagggtaaagcatggcgtccagctggcatccaatcagtggtcaagagcagagccgtaatcggtgaatttcagcctcatatcatttatgaagggaagcgagtgccagatggtgatccactttttggctattatccaaccgttgtttcacctgcaatttttgcagaggtacaacatattgtggataagaggaacaaccatagcggctcttacagaaaaggcctctataacaacctgttcagcggggttatccgttgtcagtgtggtgaattgctacgcttccataataaaggtagcaagggacaggttcgtaattatcttgtatgcccaatggaaggtgttaccggatgcgagttgccgtatttgccatacaacagaattgaaccgcaattactacaggctctgagtcggctatccagcgttatggagcaaaggcaacctaagactggcagagtatcagcgttgaaagacgatctagctgtgttacaaaatgagctggaagcagaaggtaaaaagagggtgaaggcggcccagctagtgctggattttgatgatgatgctgctttccgagttttatttgaagagtctaagaatgcctgccatgcactggaggaaaaaattgtgcaaattgagggggagattatggcccttgaactctctaccaggacaattgctcgctttctgagccctgaggatttaaacagtacggagcagcgtcaacagttcaacagtcagctaaagtcagctatcacaatagaatttattcatgagaatgctgggcttgttgccgtaatcaaaaacatggaaggtcaagttatgttggagcaagcatttggtcccaaattaatgagcagtattgtccatgattatgaaggccatctctgtgttagaaccatcgcggaagctccttatgttgatcctgtctgggttgaagaagaaagagtggagtatgaaaaagggaagcttgtcgaatttgatgaatgtggcgattatagtgtcgacaatctgaataaaatttcttga

SEQ ID NO: 167846 - DNA, 480 bp, Enterobacter cloacae
atgacagatgcaacaattttggacatgtgctgcggttcacgcatgttctggttcgacaagcaggacgagcgcgcggtctttagtgatatccgcgccgaacagcatgagctttgcgacggtcgccagctggttatcagccctgaccttatagctgatttccgcgccctgccctttgccgataacacttttcctgtcgtcgtattcgatcccccgcacctcgagcgtgtaggcgataaagcgtggatgggcaaaaagtacggacgcctgaacaaagaaacgtggcgcgatgatctgcgcgtaggcttcaccgaagcgttcagggtgttgcggccacacggcgtgctcatcttcaaatggaacgaaacgcagatcccggtaagcaatatcctggctctgaccgacgagaagccggtcatctggcagcgcaccggtaagtcagacaaaactcactgggtcatttttgtgaaaggcgcgaaatga

SEQ ID NO: 167847 - DNA, 675 bp, Enterobacter cloacae
gtgaaattaattacattaggtgtttcagttttgttagctagctttctttgtcatgctaacggtgtttctctttcagcgacaagagtgattttccatgaaggtaaagtatcagcatcgttaggtgttcagaaccatagcgaaaaagaagtttacttagttcagtcatgggttgaaaacattaaaaacgaacgctcatcccagtttttagttactccgccattattcattttggatgagaaaaaggaaaatgatttacgtatcgttgtaaacgatgagtcagcgttaccgaaggacaaggaatctttattttggttggtttcaagaactatacccgagggaaaaaagaattcggaaaacgttcttaagctcgcaatatcaagtaagattaaattaatctaccgtcctaaaagcctaagtatgagttatgatgacgccgtacaaaaaatagttgctaaagttaatggtggtaaattcacgcttgaaaataattcaccttattttatttcattagttgacatttcggttgataataaaatagttaaaaaatcagcattggttgcgcctaaaagttcgatatctctggacggggttgctggagatgctaaatcaaaaataaaattccgccatattaatgattatggggcatacattgaggttacaaatgaaaaaaaataa

SEQ ID NO: 167848 - DNA, 540 bp, Enterobacter cloacae
atgaaaatttcaaaaaaaactattgtatgttccatggcgagcgttgttttttgcttgctgggaagtaatgtgcatgctgcaacaacagtagccggtggtacagtaaatttcaacggtagtgttgtaactgctgcatgtgccgttaaaggtacgagtaccaatcaaactgtacagttagaccaggtgcgcagtgcgaaattaaatcaggttgggagttctgttgacaatcaaccattcagaattgaattaattgattgtgacaaaactgtttcaacatcggttcaggcatattttacaggcactgaagcagcaaccgcaggtttgctttctactagcaacccaactattggtattcaaattttagatgaaactaacaaagctctcgcacttaatgatgatgtaaacggattgagtactgctactaatcttgttgatacagatacgattctttcatttaaaaccaagattgtagctgtagctaatccagttacagcaagcagtttcaatgcaactgcatattttaaccttgtttatccttaa

SEQ ID NO: 167849 - DNA, 159 bp, Enterobacter cloacae
atgaccggacgtaacagacgtaatcttagccctgagtttcgccttgaaactgcccagcttgtactcgatcaacattacaccgttgccaccgcaatgaatgtcggcaaatccacgatggataagtgggtacgccagttgaaagaagaacgagggggataa

SEQ ID NO: 167850 - DNA, 495 bp, Enterobacter cloacae
atgcggaaaacatgggtcgggaacacgttcctgtttctcttcttttggtttcgacgatgccggaacgttggacttcttcatactgacgcgtactttcatggcaccgatggcggcgacggccctgaccaaatcctcgcgctcctggcgcgtcagcagggtctccacgcaaataagggcattcagattatcaatcagcgtatccagtttggattatgttggtttcatttttctgctctcattccttgtatctggtgtcggtcagtaccggctctcatatacttggaccatgaccggcagtcctgcatcaaaacggatctgataccagctggtcccttagaggggatcgccctcttttatccggcgtatgcctcctgcatccgtcagctgcagagaggtggtaacgtcccgacggatcacgtgggcctcttcccttatggtgtaatggccgtcatccagatgcagttccaccgcgtcaccagcgtctctctggcgtaa

SEQ ID NO: 167851 - DNA, 381 bp, Enterobacter cloacae
atgaaggtttctgctatctttggatctctaactctggtcggtttttgctttgcagcaaacgcctctactcatagtaatgtcgccgtttacgccactgaacaatctcaggggtctatatccattggtgataaaattgcatatacaaaaacctttgaggtttccttagcaaaattatctgctgatactgtcgatttatcaaagctttgcctaaaggcttactctccagacaagaaagaatataaacttgatactgttgatgaggttttaacctctggttccctgaaaaaaggtaaaccggtaaagggaattgctgtgtttgcttctgagaatgatgatgttctcaaagccgccctggtaaagatttccgacgattgtaaataa

SEQ ID NO: 167852 - DNA, 507 bp, Enterobacter cloacae
atgaaaaagacacttattgctgcaattctgttcagtccgatttttgctaatgctgcaacagtaactaatattactccgcagactaaaactattgttatctccgcaccaaatgctttcactcacgtcctctccccagtaacgggtctgacggctggcgatttgccagcttcaggccgcgaagtggccacgggggaagtgagatctgtttccggcggaatccctgcgcagtacgctgttcagtttgcgactggcggaaataatacgtcaaccacagcgggtgtcaccgcttcaattaaagggtcaaccaacccctcaaatgttctggcgctgggacttcaggcggatggctcaatgaccggggcagcaacaacacagactgtgagtggttcttcatggttggtgtatccttcgtcaacatcgttcaaatacgtcgttaacaccaccaatttaaccctcagcgcagacagttatccaatcacagttaacgcagcagtttatacaccataa

SEQ ID NO: 167853 - DNA, 723 bp, Enterobacter cloacae
atgataaaagcgacattaattctgctgggcttttctattctctcattcagagtgtatgcgcaggagctccaggcaacacaaaaaaccttcgcgattgaactcagctcctcgcgcgttattttcaccggcgacaggaaaagcgtttcgctctccgtgctcaacccacaatcctatccggttctcgttcagtcggtttcatataaagaagatctgaaaacagcgggctcatttatcattacgcctccactaatcaggcttgaagcgcagcagcgaagcaacctgaatgtacgactcatagacgcctcaggtttcgcaaatgaccaggaaagcatggaatggatgtgcgtaaaaggggtaccgccaaaggatagtcatgacgttccttctgtgcccaacgtaccggaagtgatcctgcaggtctccctcaatacttgcaacaagatattttatcgtcccaagagtatgacggagtcccccacctccttctacggaagcctgaaatggaccgtcagagacggccactacgttgttaaaaatgacgggcccttttatatgaacttcgcggatgtcaggcataacggaaaacccgtttttggtttcgactatgttccgcctttcagtgagaaaaaatttaaagccgcggcatccggtaccggcgtgatggagtggaagctggtcaccgataccggaggagtaagttcggcgtataaatcttcgctatag

SEQ ID NO: 167854 - DNA, 2490 bp, Enterobacter cloacae
atgaaactgtatccctctttacttatcttctttttcatcggcgttaacggaataccgactgcactggctaaggactatgagtttgatgccagtcagcttggaaatgtggatagcggtattgatgtgtccattttcaatagcggggggcagctgccgggaacgtacagtgttgatatttacgttaacaaaactctctcaatgcagaaagatatctatttttacaacgtctatgatcgtcagggtaagccggttcttacgccctgcttaagcaggaagctgctgctaagcctggatatccttgtcgacagctatccgcaggccgcggaaactaagcctgaaaacgaaaaccggctctgcgctgttcttgaggcgatccctcaggcgcaggttcaattcagcctcgctgcacaggagctccgcatcagcgttcctcaggtggccctgcaaaagaagatatacgagattgcatcacaggataaatgggatgatggcattgcggctttcaggctgaactacaacgttaacggcgcaaggacaacgtttcgttcaggagaagagaaaagcagggatgagttatggtccacgcttcagccaggtctgaactacggcagctggcgcgtgagaaatataacaggcttcagcaaaagcagtggtgaaagcccggtatggcagcgtggcgtcacctatgcctacaccgcggttaaccgacttaaaagcaccctgactgcaggagaaaccttcacccggtcagatatttttgagccgttcatactccgcggccttaccctggatactgatgaaggtatgtatccggcaaatatgcgcatcttttcccccgtggtgaaaggtatagcaagaacgcaggcaaaagtgaccgtcaccggaaatggaataacgattttcagtgatgtggttcctcccggcccctttatccttgattcactgccgctctttgcgcagaggggagaactcctggtcacgattgatgaagctgacggccagagacaagtctttaccgtcccctggcaggcaccggctattgcggttccggaaggttatttcagatacagcgttgccgcgggtgaatatcagggcggaggctttcagaaaaatcccccccgggttttccagtcgacggcggtttacggtctcaatgacaggatcacgctctacggaggctatcagcaaacgcctgacttttacgcggtcctctcaggggccggagcctcccttggttctctcggcagcacaagccttgactattcccgctcggccagcaccctttcggataactcgtcatgggggatctggcggttgcgctattccagtcagatagagtcttcaggtaccggtattcagctggaaggcacgcgctacatgtcacccggcacgcagacgctagcgacgattattcagagtagcggcagactaaacgcggaaagaaacgggccgcgaacgcagtacagcctatccctgagccagtccgccagtgagtacggttctttctatatgaacgcttcacgtcagggaaattatgatgggtcgaaaaatgataacctcggtggcggctatacccttccactccccctgcagggctcactgatgctcgactggtatgagcagaaaaggacgaacacccgctcagagaaaatgaaagagcgcatcgtctcgctcacggtaaacctgcctctggaaaaagtcacgacggcaccggtcaatgttagctaccggcgaacagcatttctcaacagtattacgcaggattatgccctgaacggcgcttcctcagaccagtcctttttctggaatgcagggcatactacggaaaacgcctcttctttcgccagcctgaaaaccacctctgtgcaggttatgctggacacccgtgcggcacagctcggtgcctggtacagcaacagcaataactggcagacggccggcacttcagcttcaggcggcctgctgattcatcagaacgggattacggccggcccgcccctgggggagacagtgacactggttaatgcaaaaggagcggagaatgtcagcatttttaatgccggcaattcagtgacggacaggagaggatatgcattcattccctcagttgctccctatcagacaacaaacatcagtctcgatccctcaacgcttgccgaaaacgttgaaatcgggcagaccgatgccaccgtcacccccacgcgaggtgccatcattccggcaaccttcagcgccataaggggaaatcaggccatgttcaccctgaagcgtaaaagtgaacattctgtccccttcggcgcggtggcatcccttaaagaaggcgatgcgacggggattgtggatgagctcggtagacttttcatggcggggctgcccgcagccggaacgataaacataaaatggggaaaggagcactgcagtatcagtttcagcctgactgacgaaaataaaaagtcagaccttcatatgctcagcgcagtttgtgcctga

SEQ ID NO: 167855 - DNA, 1683 bp, Enterobacter cloacae
gtgcacacttataaacatctgctgcagagaaaaaaaactgcggcgctttcggctctaatttttatcatttttattctttacctcatcactctgccactgagcccgctgtggctcccggatgaaacacgatatgccgaaatcagccgtgaaatgctggcgtccggagactggctgctcccgcgcatatttgatttcagccatttcgaaatgccgattgcaggatactggcttaacagcatttcactgtggctgttcggccacaataatgtcgcggccagggctgtttccgcgctagcgacggtgctgactgcctgtctggtgtacagaatgagcatggcgcttcgccgggatataaatcaggcgctcacggcgacgttagtatacgcttccacgtcgatggtatacggaacgggcacctacgccattcttgagccggcctttacattctggattacgctgtctttttatctgctctggaaaagcctgaacgcatccgggaaagcgagtgcgtcagtgtggtggtttacgggcggtctggcctgcggtattgcctttctgacaaaaggctttctggcttttgtcattccgctgatagtgcttttaccctggtgcctcattttccgcagaatgaaacagctgcttttcggatcacctcttatactcgccggttttctgatagcggcactgccttggagcatcatggtctacagactggagcccgacttctggcgctggtttgtccggggggagcatattcatcgcttcatgtcggataatgcgcagcacatgtcgcctttctggttttatcttcccgtcatctttctgggtatgctgccctgggccggagcactgcctgcaaccctgaaacagacatggcgccaggctaaagccatacctgcagtagcctggatggcattaagcgtcgttgcgccatttattttcctgagcctctcaggaggaaaactgctgacgtatgttcttccgtgctatccgccgctggccgtcctcaccgcgcacatgctctgtacgcctggccagcacgtcatgcgtgcactgcagaacaacagcagaattaatatcattgtgggcttactcggggtgatactgattgcatgcatcctggcaccctggggcgtattcccgctttacaccgggagcgagattatctcgctggcggttgctgcctgctgctttgcattatgggccttagcgggaatggtttcccttaagcaaaagcggtatgcgcttctggttgcactgtgcccgtttgctgtcgggttactgaataacatatttatcccgcactcggtcgtgtatgcgaaacaaccccagccgtttatcgaaaacatccgaaaccagctgcaaaaaagtgaatatatcgttgtacaaaataccggcctagcttccgccgtagcgtgggaaatgaagcgttctgacattattctccttggcgataaggaggacatttctcgccgtatgttcagtaagacggctgatgacgggatgatccatgccagctatttcagccagtggctcgaggacagacgtcttgataatgatgtctcgctgctgctgtacatatcagatgagagccttattgacacgtataaaatccccgttgccgatacaatatggcggcagggtaagtttatgctgctgcattatatccgtcagtcagagtga

SEQ ID NO: 167856 - DNA, 315 bp, Enterobacter cloacae
atgcaaaatgaaatcggatccattgtcattgacgctctttacctcaatggcaggtacgcccttgctgtccggaagggtgacataaagctgctgattgaggcacgcgtcacgcacgctgtccgcaaaggtgacctcctactcccaagggataaaaagacctatacggtcaatcatgaagagataaagacagtaaccgtcctgagcgccacacgattttcggtctcccagtggcgaattctgaaaatgctttgttgccgggcaagcgtgatcggccacctggaaagcaccgctccgcccggagaggaggcatattag

SEQ ID NO: 167857 - DNA, 147 bp, Enterobacter cloacae
atgcatataagcgtgctttatctgatgccgctctcattgcattgtctgaagccagcatacctgcagcagaggtactggcagatgcaagctttcgcttatccgacgcgctggatcctgcctgcggctgtttactctgccctgctttaa

SEQ ID NO: 167858 - DNA, 498 bp, Enterobacter cloacae
atgaaaatgaaaaaatatgcgatactgatgagtcatgataactacctttactgcggtctgaaatcaacacttgacgatattaatatccttctctttcatgaaagtgaaattgacaaatttctgaacctctgttctgctgcacctgaagatgaaattgtgatattttttgacgatcaattcagtaaaataacctcagttatttttcatgacagtgcatacaggttaattaatgttcttcagttaaaaaaactggctctcgtatctttactcgaaatccccgaaacgtgtctgtccggagattctcagtccgtttacaaaagcaaagtgatggagaagaaagccatctactattatgcattttacaaaatggcttacagagatattgcaaaaaaaatgcaaatctccgaagcccgcgtgagctattttattaataactacgtcagggggatgaagtttaaacataagaatgcttttgtgattaacatggagttgtcgtga

SEQ ID NO: 167859 - DNA, 243 bp, Enterobacter cloacae
atgaggcgctcggatatcattatcaactctcttttaaacggtaagtgcggaggtgatgttaatcactataccctgcttcttttaatacattacacattcaatatctcttacccttatgaggggtatggtgaatgggatgttgacgttgaacgcagtaacgctgaagaatacagcaatcgaatttaccctgctcacctttcaaaaattggactttatattaaagagttatgggatgtgagatga

SEQ ID NO: 167860 - DNA, 1515 bp, Enterobacter cloacae
atgttgaatcaaacacaatcagacagaaaacaaaagtggtacattttaacagttattatactgatgtatcttcctgtttctcttgatgccacaatactccatgtagccgcaccggtactgtcagtagacctgaaggcgtctgccgatgaagttctgtggatcattgatatttattccctggtgatggcaagcttccttctgccaatgggtgtactcggggataaaatcggcgcaaaaaaacttgctgtcacgggaattattatcttcggagcggcatcatttattgcaatgctgtcagccactgccatgatgctaattatagcaagaggcatgcttgccatcggagcggcgatgatacttccggcaaccttgtcggcactcagaatagccttctcttcaaataaagagcgcgcttttgctctcggaatatggtcagcagtcggaaccggtggtgcggcgctggggcctgtcaccggagggctgttacttgaaaaattcagctggggctcggtgttctttatcaatattcccgtctgtatcctggtgctcgtgatggccttaaggattccgaacctcaaagccgcaggcgcagagcgcaaaattccggtatgggatccgcttctgctgattgcgtcgatactgttaatcgttctgtcgctgaaaacaggtgcgcgtgaaggtttttcactgacattagcggcactttctgcctgcggcatatcactgatggcggtctttctcaaacgtcagaggatgtcagataaccccatgctgcagctgtcatttttccggaacagaactatcgtagctggtattatgcttgctcttgcctcaatggtttcgctggtagggtttgaattctatgtttcgcagcagcagcagttggcatatggaaaatcgccactccaggcaggattattcctgatgccccttatccttgccagctgcctctcaggcccttttattggctggacgctcgatcgtacaggcatcagattaattgccgtcggcggcgtggccatgagcgcagccagtttcgccgggatggcattcacccggtttgatactcaaatctggcatgcatggctcctgatggtcatacttggcttctgtattgaagcggcattactggcatcaacaacggcaatcatcaatgccgttccagggaacaaggcaggcgaggcgggcgcgatagagggaatggcttatgagcttggcgccggccttggcgttgtattctttggcctcctgatggcgtcaacattcaggaataacctttcagccatgcagcaagactatgacaatgtaaatattaccggggtaggtaattcgctatctgaagcattttcatatgcagcactccttccggaaaatcagagtacaattgtcagagatgcatccgtgtcggcattcctaaactcccattcgacggtcatgcttgcttcttcgctctgcatgaccttactggcagtatgcatatacgtccttctgaaggatcgtccattgcgtagctga

SEQ ID NO: 167861 - DNA, 177 bp, Enterobacter cloacae
atgatgaagcatgcccttattttttccgttctgtccgctttaacagtaagcacggcgatcgccaagaagccgggatcggactcattgaaaagtggagagattggtcatcacctcggctgcctcataatcagtctgctcggtatgcagggttgtgagaaacccaaatcctctgaataa

SEQ ID NO: 167862 - DNA, 420 bp, Enterobacter cloacae
atgaatacccttcgttgtatagttattgccttctcgctttccgccagtggggcgatggcaaaggctgatgtacgcatgctttttcacatgggccctggttctgaaaaagagttctttgttggcggaacggtagaaaacaaaggtgacagccccgctgctgactgggtcgtagtgattgttcccgtagatgaaatgtgtaaaaccggtgaaccacgcacagcttcattcggacagatactacctggagaaaaaaaagaattacgtctgccttttgttaacacaaagctgcatggataccgtcttatcagttttgcttatgatgaaatggggtttcgtgtcaccgcaaaggatgagacccaagatataattttgaaaagagaggatgactcgcgtaaaagctgtgttgaaaaacggggctaa

SEQ ID NO: 167863 - DNA, 498 bp, Enterobacter cloacae
atgcgaaaatataaaatcttactctctggaatgatttctcttgctattataatggctgcagctgtgggtttcatgctgtttaaatacccgcgtgaggattttttgatccagaaatgcgaagcggatgtccggtatgatgttctcgaagagggggagcggcatacgcttgatgcgctgtacgtccttgctctgagcgcaagaaaccaaggatttttgcacatcactggcgttctcaacagcaaaggaaaaaaagaggatatagacagaacctacagttttacattcaagaaaaatggcaaggttggattgtacggcatacagatattcaaggaaaaagtgagcgcttatgatggcgtcgacagcaatttttttcatacttattttctgcctgataagcctggcgaggagctttatataaaagccagttctccggacggtagtctgtatttatttgaaggcttttcctatcctttttttatgtgtaccgatggaggctga

SEQ ID NO: 167864 - DNA, 783 bp, Enterobacter cloacae
atgaaatatcttattgaaaatgcaatattatttgacagtgacaagaaacaaatctcttccgcttccagtccggatgttatcgtcccactgacaacaacggcatcgcgattgctggaagaaatcataaagcatcctaacagggttcttcctcgcgccttattgttaaaaaaggtctgggaggataacggttacgctccttctgatgccagtctgaataacaatatcagcgtgctcagaaaatactttaccagcctcagtgacactgagatcgatcttcgcacggtccctaaaattggttttcagcttaatgcttctgtcgtgcttcatgaagaaaacactgacacggccgggaattatgagcttcacgatcccgaaaaaactgatgtcattcagcccgcttcatgcagctttgtgtcgcatacgcgttatggtctgtatattatcgctgcgggtgttacggtggtaacgctgctggtcgccctgctatttcttagccttcaggataggaggataagtaccctgaacaaaaatatccaacgtatggtcaaatttgaacaatgcgatgtctttaatcttacgtctgacgatataccttttgagagggtactcagccagtttccgtcagtccggtcaagctgtgcgggtaaaccggcaaatgtttattacgatttttcttcactgaataaagatcgtgctaggtatttgtttgtctccgtatgctttaaaaacgataagtcaggttatctaaaatgcgaaaatataaaatcttactctctggaatga

SEQ ID NO: 167865 - DNA, 672 bp, Enterobacter cloacae
atggacaaatatttcaaggtatgggtcgggaccatccatgccttttcacggcttaactcgctaagcgaactgctcactttacccttcgtggagtttgtcaaactttgtgggatcagtaccttacgttcttccgaccggttgagaaagcgaatcgaagcctccctggggcgtattgccacgaacacgatttcgtttacaagcagtagtgggggggactatgttacacatctggttcagtcagccaaatgtaatccccgcctttacgtgattacacttcaggcagatccgtgcatttttgagttttaccgctttgatcacaaagtattattgcagttgaaagccattaatgtcctgccaagtaaagaatcggcacaggcactgtataccttcattgaaagtctgcctcccgatcctgccccagcttctatcgggcgtcttcgtatgaggcttaatctcacttaccggacgattacacagaatgccactgtcagaaaggcgatggagcagctcaggaagatcggttatctcgtgtacaccgagctgcgccggggaaagacggtgtatttccatattcacttccggctgccaaagctgagtatggacgtgctgcgtataaagaaacatgcggaaagattaacgatgaattctcctgatatccactgtagtgagtaa

SEQ ID NO: 167866 - DNA, 165 bp, Enterobacter cloacae
atggtatttgtgatgctccgtaaacgattccctgatcatattaatgttattttccataagagcattctttttgcaatgagaaaaataatcatacaaaaaaaatcctatatctggttaaggaaagccgggatgagaaagaatatctcctgccgaatgattctatag

SEQ ID NO: 167867 - DNA, 522 bp, Enterobacter cloacae
atgacgatagttggatccagtacctggataaacacggtgattccctcagcgactggaccaaactcgccgtcgagcgcagctcggcttcgccatgggcgtgcgcctcaccggactgcatccattcccgctttttctaccaaagctgcaactccaaggcctgaagctgttgtggcctcaatgccaatgagctgtggattgccgaacagcagcacatcctgcccgactgcaactggcaacatatcacgtttaccatgcctcacctgctgtggcagttcttcaacaacaactggcccctgctcaataacctgtttcgctgcgtcacccgaccatactccgctgggcgcgccaacaggggatcgaagtcggtatcttccatatgctccatacctgcggccgtcagctcagtcagcacccgcatatcaacttttccgtcacccgcggcggcctcgacataaaacacagtaccttgcgggcctggcccatatacgtaaagaagatcggcagcacataaaatttaattag

SEQ ID NO: 167868 - DNA, 333 bp, Enterobacter cloacae
atgtacgcgtatatttttcttgctgcagcaatcgctgcagaagttgttgcaacaacctcaatgaaagctttgtccggtttctctaagcccctaccccttgttctggtagttgggggctatgccatagcattctggctcctgagtattgtagtacaaacgatacctgtcggggtagcatacgcaacatgggctgggatggggattgtacttgtgagcgttgcatcctatttcgtctacgggcaaaagctcgacttttttgccattgcaggcatgataatgatcgtttgcggggtcgtctttattcaagcactgtcaaagactgctggccattga

SEQ ID NO: 167869 - DNA, 2208 bp, Enterobacter cloacae
atggccacggaaaatgcactgtcccgagccggctttgaaggtccggtactgaaagccgaagatgaccgttacgggtatacggcgatagcagaggggctggcacgcagcatcagcgccctggatgaaaatgtcagcaccgtcattggtatcgaagggcagtggggttccggcaaaaccagcctgctgaatctcctgactgaccagctgaaagctcaggtcccgacaaacacgcaaattgtggttttctctccctgggtcaactcgccggatgaaagcccggtaaacgcgctgatgatgaccatcgcggccaggctggcgaagctggatacgtcggccatggcgcaggcaggaaaagctgtgccccttgcagagaatatccttaactacgcgcagcagacctcgcgccggcttgcgcctgtgacgcgattcgccggtaatttttttccgggtctggggcttgtcgccgacggcatggacgccctcgcggacaccggcctgagcgggcgggaaaaaaccgcggctgaactccgggctgacattgaagataaaattgccgggctgggcgtcagctttatcgttgtgattgacgatctggatcgtctggagccagcgcaggcggtggaagtgcttcgtatggtgcggtcggtggcggacttctcacgattccgttacgtgatgtgctatgaccgggaggtgctggcgcatgcggttgaaactggcctcggtgtgctgaacggcaaacgctacctgcagaaaattatcccgctgtcgttcagcctgcctcgaccggaaagctttgatttacgacgggaatttatggcgggggtggtcagactgtacacttcggtctgcctgactgagcccgatgagacgctgcttcaggaactgagaaggatcaacgatatttacggtgcagctctcaccacgccccgtgaggttcagctgacgctaaatgcgctggccttccgctacagtggtctcagggattatgtctggttaccggacctgtgcttcctgcagctcatccggacagtcaacccggagctgtatgactggacagagctctatctgaccgaaagggccgtggtggagtccggcgatggtgcggtcagcgaggcggagcaggctgagatggttagccgccttggcgaatacctttcacagtttcgatcgtcagaagcgaaatccgtgacatcactgcgccactgggtgccgggtatatcaggttataaaacggagcacctgaagctgttcgttcagacggacgatgacacaaaagccatcctgacggcaaaccggcgtctcggcagtgccgcctactggcgctactattttgcgtattcttccccgcagaatgtgctgtcgcctgactatttcactgacctcttccgtatggcaggaaacccggctgaacatacggctctggcagacgaactactgagccgcatcagcagcaataacatttcctcccggacctggtttgaacatatcctcagccagctgacctggccggtgattgccacgcgtactacggaagaatgtgaaggtatcttgcgattcttctttgagcatggcgatgatgttatcaggcgttacaccatccgtaatgaatggtttgaacctcataatctcgatatgaacagtgtggctacccgcctgctggagcggatctgtgaagacaggctctggcctgttcaggaacgtatgagcgcaatgctggatacgggaaaatcgtggcgctggatagcggacttctttcgtcagttactctggctgcacggccttgccggaaacagggcgacgcatgatcaaaagcaatttttgccccttgatgaactgagaatactgcagcatcgcctggcgttccgtcttaatacccctgaaattacctgccagtttgagcagggtgagttatttctttcctatatctgggcatggtgtgacatcagcggtctggagcacatcagagcctggtttaaggaatcaactcgtgaggatgaacattttctcaggcttctgctcacgctgcgttatcggggcgtcaattcagctaccgggctctaccgcggcctgagtctggtacaggccggggagtttatcgaagatgctgaacaaatgagccgcagactggagcagatcgagcaaagcggaaatcatgctgaactgctgtcacaggtgaaagaagcaatagccaggaatcgtttctga

SEQ ID NO: 167870 - DNA, 1089 bp, Enterobacter cloacae
atgctcagccagcttaacctgcgttttcacaaaaagctgatcgaggcgctgaaagtgcgtgccggtcgcgaaaatacttcggtcaatgccctggcagaacgcttcctcgatgacggcctgaaaacggtcgcgcccggcgacgggtattttcagctggtcgtcgatccggatgctgccgtccggcagctgtaccggcatatcattctcgaccagactttcggcaccgctcctgtctcccgggacgagctgcgcttcatcctggcctatgcccgcgaggcctttatctgcggccagaacaggctggccaccctcccggccctggacacgctgctcgacatcacccgtgacctgctggcctggcaggtggagcatgaccgtccggtggacagcccctggctgaaggggatcttccgcctggccggagagaactggacggaagagtttgacgccttccgggcggagctgcgcccggtcgtggaccagatgtatgccgaacacctcctgcgtccgctggagagcgactgttttgacctgacggaggtggcggacgcggtgctggcggaaatcttcaccctgccgcggctgaaggccgttttcccgctgatgctgcgcgggctggactggagcggggagagggccagagatctggcacaggagctgcgcccggtgattacggccgtaacggaaaccattgaggcaggcacgctgcacctggagatccgcactgacggccagcatcccggagaacgtccgggtgcctggtacaccacgccccgtctgcacctgctgatcaccggccaggactttgtggtgccgtacggctgggagaccttctccgaactgctgggcctgttcactttgtacgcccgctatccggaagccctggcgcacggtcaccagggcgagcgcgtgatgttctccccgcccgggcacgtctcgaaagagggattcttcggtatcgacggcctgcggatatttctcccggcagaggcctttgaggcgctggtaagtgaactcacaacgaaatgtgctgaaggtacgctggcggagacccttaccgggctgcgctgcctgtacggagatctgtag

SEQ ID NO: 167871 - DNA, 324 bp, Enterobacter cloacae
atgccagataactcagatgagaatgaaaataattatggcctttccggcttatgggatcagttatgcgactattccagaatccgtttacatcaaacaatacattttggctatcaactggtgcatgttctggatgatgaagggcgagaacttgcccgccggattaactccactgggcgctgggaatggagaactcgatcaccggaacgatggacacctcagtccggagagtacctagttgaatatgagtttgacggtgatgaagagcgggactgtttccagctggatatgctggatagaccgttcggtgcttatacgcgcctttaa

SEQ ID NO: 167872 - DNA, 306 bp, Enterobacter cloacae
atggcattaccccatttcaccagaacgcatttcactgttgccgatagcccatggggtcgactttgcgaccgcggtctcactcagaaggatggccaccttaaccggcgctccctggcgttcctcctcgcctccgaagtgaaagccctgctcttctatatgccggatcttcgccattacatactgttctccactttctggaacaccggtgtgcggatcggtgaatcccggatgctgaccccggaatcctttgatctcgacgggttaagaccctttgtgaaagtaccggactcagggcatccggcctga

SEQ ID NO: 167873 - DNA, 294 bp, Enterobacter cloacae
atgtcagccacctgcaacgaattaatccggcttggacttctggtttacaagcgcgacggagaggatggcaaccattttgatattgaaggatatcgcagagacctcgtaagaaaagcagccggctcacgagaaggcacagttctcattgccactcttatcgccgagatgtatttaaaaatgacaggtaaagacggcgaaggcagcctggatgatacgcttaatatgattttaagcagtataaacacggcagaggatgaagcagaaacaagacacttcatcagtgacaaacaataa

SEQ ID NO: 167874 - DNA, 456 bp, Enterobacter cloacae
atgaaagaccagattgcggtgctggagaccataaaacaggcttgtgaagcatggtctgaaggcaggagggtgggatgtatcagcaagaagcttgccgggatactgctggctgttttggctgctgtcttcgttaccacagtgctgaattatgagcttttcccttatggcctgtactccttgccacccttgagtgtgctggccatttttctgatgttcgaactgaataggccaggcggctgggacgaggttatcgacaaggaacttcgggtatatgagccgcgtgacagagaagcctggaaaatactacggaccactgctctccggaaagggaagctggaacatgacgatgtcaggtcatggcttgaagctgagcgtaaagccaatgcagacctgctcaacgctcctgaaacggctctgggttactgctttgttagacgtgaggtaaaagacgaatga

SEQ ID NO: 167875 - DNA, 423 bp, Enterobacter cloacae
atgaaggagccacgcacagatgaccgtattagttttctaaggggtattgaacgggacttggaaaattggtctgcaggaaaaaatacaaaaccccactggatactttgggtaggggtaataaccgctacagggatgttgatttttagcttctgttcaggaaatcagaggcttaccgtggcttccattgctactggaatagcttttcttctcgccggattgttacaggctgctgaaacgcgggaagaaaaaatacagaataaaattcgggcatatgagccgcttgatattgatgccattcgcaccctggccgtttctgtttttcacaagaatgagctgacacaggaagaactcagacagtggctggacgcggagttcagcgccatttctgatgccgctcttcgtgggggaagccgtaatgcgtga

SEQ ID NO: 167876 - DNA, 489 bp, Enterobacter cloacae
atgacaaaaacactgtttaccctcatccgcgatgcagggcgggctgccctgtattcctttgtcctcggcccggcactaatgctgtatctgtttgtaatgctggcggcgtcagacggctcactttcccggcaattcctgacgacctttcatcacctgactgagggtgcgcctgctggcaaggtgatgggctgtgttaatgaaaatgtgatggcaggaagcttcttgccacaagagcccggagagaagttaaatccagctcctacgctggagaaagctccgcctgaagtgttgtgtcagcgtggtcctgtggacagcgattcgtgggcgcgcgcgacagatgcaacgttgctcaactcctggattatttcagtgatctttggctttggagtgtggtttgtattccgaggcctgaacctggccgcccgaaagaaaatttcaccagacacgcattcggttttggcacggcagaacaaggagacacacgaatga

SEQ ID NO: 167877 - DNA, 585 bp, Enterobacter cloacae
atgttacaaggtaatactgaaccaaaaccctttgtaattgaagcctttaagaaaggtagttcttacaagggggttaaagatttcgattgtggagataaggttattaatgactacgtcaaaagtaaccttaagcgagacggtgaacgcgacaacaaaaaaatatttgttcttcttgaccccaacaaagaagaacgaattgcaggatttgtcagcgttcatctccatcttacgggaaaggatgaactgcctggggacgcgtttccctactcgcttcctaaggcagttcccgtagtaaaaatatctatgattgccgttactaaagagtatcaaaaagacggctggggtaagcagttgcttggcgtggctctggaccatgcacttgatgttgcttcaattgccaatgacgtcaagggtgttgtccttgatgctaaggaagatgttgtgaagttttacgagcggcatcgttttacattggttgaagacactccggatgaatacggaacctgctttatgttcttatcgatccgtgagttgcaggcgcttgacgccaaacgtaaacagcaagaccaacagtcagctgtatag

SEQ ID NO: 167878 - DNA, 363 bp, Enterobacter cloacae
atgagaaacaaccacttacgtggtggttctgaaggtttggcttcggccaccgcgctcaatgagaaagaagtaggcatttttcctacttcagaagttaaaaatacacgcctggagttgagaacaacttcggatttcaaagaaaaagtacgctccgcttcttccttaatgggagttgatatgagttcgtttattgttttggctgccactgaactagcacagaaaacgcttgaaaaacaacgcatgcgtttgctgacagaggaagcgtggaacaaactgaacgcactaattgatgcgcctgtcacggataaggatgatgagctggagcggctaatggtggagaaacgccgctatgttacaaggtaa

SEQ ID NO: 167879 - DNA, 678 bp, Enterobacter cloacae
gtgaaatttttagacaaatttaatattacacggtctgataccctctcactcttggcattagtgatttcgggcgtggccgcgtacttcaccattcaggctgatttccgctcacaaaacactgacaggcaggtatctctggtggtcatggaatccatagggtataagttaaagcgctatgctgaaaatgctaattcttcgtatcgcgtgctgcgcgcgtacagggaaatggcgtttgaataccctgaaaaacaagtcacctcagagaaactttctctcgaatatcttgaaaaacaaagtacgcgggatgtctcattttccgaggacctgctgctctcgctggcaaagagtgaaagtgaaactgcacagaaaattgcccgctgctactcgctatacgaaagcacagttaatgatgcaaaacagttttccggcataacacctgagacgctgactattccacaacacatgacgcttgcagtcatgctttcccgcttcaaaaaagtcagtgatgcctgtgaagacgcggacaagagtttgtcgctgcatatttcgtcacacgcacctctacggggaacgcttagtgagctggaggaagctcaggtattggtgcttgaaggaatggtccatcccgaccgtggaaaaaggattgtatcatccctaaatgggcatgagggacattag

SEQ ID NO: 167880 - DNA, 1308 bp, Enterobacter cloacae
atggcactaccattttcttttgataatacgtggttcgttagcattctatgcttctcgtacttattttttatttttaattgttataacgtttattacgttataatccatacttttgcatggtacatttctttttattcatttgctggactcagtatttttccttcaattacttatctttctggagtgcctttagcagagtttattgtgctaatagttcttacctcttattctacttttccgctgtgttttttgtatttctttttaaatagaatatcatctaattgtcgttatctttttccagtctatataagtgtattggaattatgcaggtcagagatcttttcatgggcatccatatactattctcaagttgataattatattattttcttggcaaaatactttggtggttatgttgtaacgtttttgattgttcttattgcagtaatgcctttttcaagttttaagcggttattaatttttataccgtttctttttgcactgtcttttatcccaaaagacattggcgatttaaaacatgatataagattaagcctagttacatctggcaattctaaaagttttttcaatgacatgatcaacaaaagcgttgaggagttgccgttcactgatttgatcatttggccagaaaactcattaagcttaaatcatgaaaaaaaaatagtgctaaatggtcttaaaagtgctgcaaatgattatggtgttgaagttatttatactggtctctatgaagagggaaattataaatttatgaggatgcagacactaatcagtaatgaaaaatatgataaatctattttagtcccttttgtcgagtctaatctacttgattttcatgatcgttcgtacaccttttcacctgctaatgataattataattctatttatatcaatggtgttaaagtatctacatcaatatgctatgaattgcttttcagcaattacattagagaaaacacggattataatagcgcctttcttataaatacatcaaatgattactggttgagaagtgaacagattagttatcaaatgctgcagattgcacgagttagggctatcgagcttggcaaacctttattaagagttacttcaaatggttattcagcaattatttataaatctggtgctttattcgctaattcttacaatggtgatgttagggggggggtaaaatactcattaaatacctcgatatatcatttatatggttttttcccatttatttctcttgtagtgatttattctattagtgtcttcttttttaatagaaaaaaatatttttaa

SEQ ID NO: 167881 - DNA, 996 bp, Enterobacter cloacae
gtgttttcttttttaagattatctccgttactacttatagtactttttttctcaaaatcatcaatttcagcgggaggaccagatccttggcaactgtcctcagacaatgctattgttgactttaataattacacagaaataagttatgtttcacaagactggctttctactcctaagactaggctggtctatcaggccgggtccggtgccgctggatatcaaatcctctcaacagataactatggggaaattgacggatatactatattcaagactggaatatcgggcgtaggagctgtatatgaagttgcttttggattgcgaacgtcatctatatcaaatggatggtataaagtcaatttgagttctggcacaggtagaattcaagtaggtaattacagtgaatgggttgacgtctatgctagggctaaactagttgctattcccggagaagtgaaaataccatcttcaacaactctaactatactaacgtctccctttgacgcttgggaatctgataactcaggtaatgttaacagacgtgctaccttacagtttactttatcgaacactcaagtcattgttccttcatgcatattgaatgcaacccagtacaacataggttttggggatgtgcaatcttatagtatactcaatggcggtgttaagtcaggtaaaatatctgtcgagcttgactgctctaaggttccttatgtgatgccccagtttataatcagagctatttcgcgtaatgttgacaacagttcgatttatcccgataaccgtgacgatcttaatactgcagatgtaaaatttacattgtttgtagaaaataaccctgtcgatttcaataatcaatacgcttggacaactattgatgctaataaaaaatatagtacagactttagcgcattgctctcatctttacccggagttacaagtgtcaaccctggccccgtaactggtcgctacgagcttcagactatttataattga

SEQ ID NO: 167882 - DNA, 513 bp, Enterobacter cloacae
gtgtttcataaaagaatgtttttttgcttgctcgctagtctgaaattattttcatttagttcttttgcggatgataaggctattttttatttgactgcagttattgtaaataatacatgcgagattgctacaatagctaatgatgttagattacctgtagttgatgctgtaactctccagaatagccctacaggtagtggaggaacagggataactccattttcattatccttaactaattgcggtcagcaagcttcacgcgtgcagataaattttaatggaattaatgaaggtggttatctgtctctctcaaataattcaacagctaaaaatgtagctattaagattatggatgctaataaaaatataatacctattggtgatacttctgaatactatgacataaatgctggtgacaatattttgaacttttatgctgaatacattgctacgggaaaagtaacaccaggaacggttgaagctaaagcttcgttcgatctgatattcccctaa

SEQ ID NO: 167883 - DNA, 288 bp, Enterobacter cloacae
atgaataattctattgttcatgcaaaatttgacgtcatacagggggcgaaaatatatgcttatgttactcacaaaggcacaaaacttccatttggctcagtagcaaaagttgattccagcagctcaatgggaatgatcgatgaattcggaatgctctatctgtctggtctaaaagaaaatggtgaaatttcaataagctggggtgaaggtaaatcgtgtaaagcacgatacgtcatagatgaagatgttacttcaattcagcgtaaggagattgaatgtgtttcataa

SEQ ID NO: 167884 - DNA, 309 bp, Enterobacter cloacae
gtgttgactggttcgtcagggctggcgtctgagggatggcagttactgccgccaatggaccctggcggcatgggagaactgggtttagttgaggcagagcaaaccgaaaacggcggactgactatccgcctgtttaagcgaaaatacctgctgggtgatgacggggagatcgtcaaaacgaaaggggaaccgatggacgtgccggtgaacagctggatcgatgttcgcctggatatgcctgatgattctgtctttaatcagcggatgagacaagaaccacagcttgagcctctttctccagttcgctga

SEQ ID NO: 167885 - DNA, 369 bp, Enterobacter cloacae; identical to SEQ ID NO: 131013

SEQ ID NO: 167886 - DNA, 927 bp, Enterobacter cloacae
atgtctttaccgccattgtatgcactgcgtgcgtttgaagttgctgcgcggttgaactccttcagtagagccgctgaaacgctcaatattacgccgggcgcggtcagcagacatgttcgtacccttgaactgtggttcgactgcgagcttttcaaaagacaaggtcctcgggtagaggtgactgaagccgggcgagtgcttgccgggcagcttaacgaaagcttcacgagcattgaatgggcctgccgggcatttcgcagtgaaaaccacctgctgcggcttaaagctcccagtaccctgaccatgcgatggcttctcgacgtgctgcggtcctttcgtcatcagcatgcgaagccacaggttgagattgccagcgtctggatggatattgataccgttgatttcaatcttgagccatacgactgcgccattcttctcggcaatgggcgttttggtgacacaacggaaagccagctgctttttcaagagtggcttatcccggtttgtaccccatcacttatcgaaccggcgcggcaacggcttccgcaatgcgagttgatccatccttcaccggacagacgtgtctggcggcgctggctgcgaagaacagggttgttcccgggcctcgatatgagcagcggcatggtgtttgatacccttgaacagggaagtatcgccgcgatgaacgggcacggcatcgctatcgctgacctgcatctcacgcttgatgccctgaaaagcggcctgctgggcctgcctttcagggaagctatcgcgacgggggatggctattacctcgtctggccaaaaaattcgctcaaaagagagagcattcagcatcttctggcctggctgcaaaaccataccccggtcgttccggcgctggatatcgattatctggaatatgatgacagtcgggtttattaa

SEQ ID NO: 167887 - DNA, 999 bp, Enterobacter cloacae
atgaagcgtgtgatccttggcgttgtgttagccagcctgtgcggctctgcaatggccgaccccctttcggcctggaatgataccgctgcgaaaaaagcgattatggagtgggtgaaaaatacaaccaacgccgatcgttcaacctatattccaccggaaaaaaggtatgtcgtgtttgataacgacgggaccttatggcctgaggcgcctcttacctttcagatccagtttgctctggatgaagtgaaacgtctggcgccacagcatcctgaatgggcgaaagagccgctggtacagtccgtgcttaataacgatatcaacgccgtcgcagccgcaggtgaagcaggcttgcttaagctgctggcattaacccacagcgatatcaccaccaccgagttcgaccagcgcgtggcgaactgggtgtccagcaaaaaagatccgcgtttcgactgcggttacgatcggttagggtatcaaccgatgcgacagctgctggattatttgcgtgagaatggcttcaaaacctggattatctccggtggcggtatcgactttatgcgcgtgctttcgcaaaaaatgtatggcattccgcctgaacaggttgtcggatcctttgcgctgggggaatttgcactcacccccgacggggctgaaatcaaaaaaaccatgcagggcgcgtttaacgatgatgcggccaataaaccggtcgccattcatctgtttatggggcaccgtcccgtcgcagcctttggcaatagcgatggcgatcttgccatgatgcaatacactgcggccaatccggatgcgaaaacattcggtcttatcgtccatcataccgatgccgaacgtgaatatgcctatgacagccatcccccggccagtggaaaactgatagagggattacaggttgcaaaagcaaaaggctggacggtagtggatatgcaaaaggactggaaaacggtgtttgatccggcgctctgtccggtaacaacacggtag

SEQ ID NO: 167888 - DNA, 1014 bp, Enterobacter cloacae
atgagactgctctggctgatcgtatttttgacgttaccctgtcacgctgcaatgaacattacccgcgagttgatcgcccctgaacacgtggcaccgggccaaccggtgcgcgtcgccgtcaccttctggaccgatggctggtttaatcccccgccgacgtggcccgattttccggtcgaaaatggtgacctgcttactacggcgatccctaatcagcttgtcacccgccgtgaaggtggcatcacctggagcggcgtacgcatggagcggcaggtcgccgcatgggatcagggaacgcttcgcttacccgcgcaggaaatcactttcgcggcagccggagaagcgccgactaccgttcagctgccgccgctggagaagaacgtaacctggcccagggatgtacagcagcccgatcgttttcttcctgcctcccgactgacgctcacccaacaggtgaacatacacaccactcatggcgacaaggggctgcgggcgggtgacgttattgaacgcgtggtgacggtgcgcgcgggagatatttctccggtgcagatccctcaactcctttttgcgatacctggttcgcattcccagcgattaacggcaaaaaatagccttattacgtccggcagaggcgacattgacggcgcgcagcgtattgaaaccctgcgctatcttccgatcgaggccggggaaattgttctgccgccgattaaattacgctggtgggacaccacccaccagcagtggcagctggctgaactgcctggcagtcgctatacggtcggcgcggcattaaatgccggtgccgaatcggtgctgaaagggaaaacggatctccctgtcagtctcattgcgctgtttattgcgttgactattgcgggctggatggcgctttggtttttacgtcatgcgctgcgccgcagcggtcaatttctcactaaccagtaccgtcgattctggaaacccactgcacttccgggcctggtccccaaaaacaggagtcatttatga

SEQ ID NO: 167889 - DNA, 1515 bp, Enterobacter cloacae
atgagcgacttccattttatttatacctggaggctactgctactggtgctctgcgttgcgctctggtggctcccggcagcaggccgcagcgcctggtcacggataatggataagccgctggcgaaggcgttaatcatcgggcggcatcgtaaagttgggcaggccttgccgtggatagccatgctgggcgttattgcgctttctggcccaacctggcaacgacagctgcccgcagcgttgacgccacaaagcaacgtcatggtcattttgcagcaggacggtgccatgctcgcgggcgatctcgcccccagccgacacgaacggatgcagacaaaaattatgacattaatggaacgtcagccaggcacgcgatttggcctggtggtttatcatgccggggcctggctgaccacgccgctgactgtcgatcccacgttttattccctctttctgcatgcgcaaaaaccgggtttactgccgtcgggtgaaggttccggtttacagaacgcagtgtcgctggcgatgaaaaacatgcccgcttcacctcgcagcatcattttagtggccgatactctcagcgcggaagatgccgcctggctgggcaagcaaagactgccgcttcaggtatgggtcccggggacagcccaggggggcgcgttacctgaaaagctcgcggggcttggtatcgacacgcgactgaacgtctcccgtttcgaggccattcgcaatgcgggcatacccgttacgctggtgacggccaacgacgacgacctcccggttattgttagccatattgaacagggcgtaacggcgcaaaacaatgcccgtggcgatctgcactggcgaaacgacggctggatgctggttatccccctgctgggaatgcttttcttctggcgacgacagcttttttgctgggtgattatcgccccgctgctgctctggcagcctgccggacatgccgcctggctggatgcgtggattagcccggacatgcaggggcaatatgccttttcgcgcggtgattacagcaaggccgctcaccattacactgacccgcttcgacagggtatcgcctggtatcgggccggaaattttccggcggcgactgccgctttccgtcaggcgcagcaaacacccgacgtgctggtgtggacgggcaatgcgctggcccagcaaaaacagtggcaactggcgttgaacagctatgaccgagcgttgagcctgcggcccgactggacgctggcgcaagggaaccgggcgaagatcgccgcgatcatcatgcagctgcggcaaaaagagcgagaccgtcaggctgcacagggtgaggagcaggattacaagccggatgagatcaagcgcgacctgaagccagatcagggtgttaatcaaaaagatattcaacccgttgccggtaatacacctcaggtcagccagtggtatgagaaccttaccgtgtccccctccggtctgctggagaatctttatcgtacgcaaccgggaggcgctgaatga

SEQ ID NO: 167890 - DNA, 978 bp, Enterobacter cloacae
atgtctgaatacctgtcccaaatcgatttcgcctggccctgggcctggctggtgcttttcgtaccgctactcgggcgtttcttgttcacccgtgagcgcaccgtaaaagagtatgttcgcgtccccttcctgcctgggttaatcgaatctttacagcttaaccagcagcctgagcgcagcggcaagatggccacctgtatgttctggctggtatgggctttgatggtctgtgctcttgcccgtcctgagtacctcatgccccctcagcacattgagaagcccatgcgtaatattatgttgattctggatgtgtccggatcgatggaaaaaaacgatgttgcaggcgggcttacgcgccttcaggccgtgcaacagtcggtaaaaaaattcgtggcggcccgcaaatctgaccgtattggactagtgatatttgcgaacagcgcctggccgtttgccccggtgagcgaggacaagcaggcgctcgaaacacgcatcagtcagcttgtccccggcatggctggccagcagacggctatcggcgatgcgctgggcgtcacggtaaaattgctggattcaaccggtgataaggaggccagcaagctggcgattctgctgacggatggaaatgacaccgcatcacaattgacccctcgcctcgccgcgcagctggctgtcagccaccatgttcagctgcacaccatcgcgtttggtgatgtgaatagcagcggggatgacaaagttgacctgaacctgttgcaggaccttgcccgaatgacaggaggacgttcctggacggcggaaaacagcggcgcgtcactggacgcggtctggaaagaaattgatgccatcacgccggtccaggtcaagagcatcggctggtcctggcgcgtgccgctctttgcctggcctctcgccgccgcgctcctcctgttgctggctttccagctctaccgtatcgtccgggagaacaaagtatga

SEQ ID NO: 167891 - DNA, 441 bp, Enterobacter cloacae
atgttagagaagggattttccataccagagctggcggagccgatcctgcctgagcctccctcctggctgccgctgcctgccggatggctggtcatgggcggcgtcttgctgatcgccctgctcgtttttgcccttatccgtctggcccgctggcgacggaatttgtggcggcgtcaggcactggaggcaatcacgcaatcccactccgtggacagctggcttgttttgattaaacggattttactggttcaccacgcgcgccagacgattagcgcgtatctggacccggcgctctggctgtcagatttgccgcttgatgcggacattcgcgaccagctttgtcagcgctattgccagcctgaaaaccacctcagtgaggaagagacgtttcggctgcgtcagcagctacgctcatggatagaggggcttccttatgtctga

SEQ ID NO: 167892 - DNA, 906 bp, Enterobacter cloacae
atgagcagtgcggtacgcattgaacgtgaaacgttgatcgggcttgctgccgatgcgcgagccattttcaatccaccggggcagatcccgccgggtgcattggcgggcgaacgtgtttcacgccagcaaggccgagggatgaactttgacagcctgcgtcgctatcagcccggtgatgacgtccgcctgatcgactggcaagccacggcgcgcatgcgaaccccgtggatacgcctttataacgaagagaaagagcggcctatttttatactggtcgatcagcgccgcgacatgtttttttctacccgcgtacaaaccaaatcggttgccgccgccaaaatagccgccctgctggcctggcggagctatcacgacggagaccggttaggtggcctcatctttggcgatgacgcgtattcactgcataaatgccgcagcccggctggcaccttaccggcgctgctggatgatatcgtgcgctttaatcaccaggtcgccgataactatcctgaagaatcgcctcacccactcacgcttgccagtatgctgcgtcacgccatcacgctgattccagccggaagctgggtggcgctcatcggtgatttccacgatctggataacgagtgtgacgccctgctggcggcactgcgccgccgaggtgaagtgagcgcgttcgtcacgctggatgacttgcatttacgcttaccctcccagggcaaactgtccgcccgctatgaaggacgcgaagctgacttctcgctttcaccctatcttcaggacggcattaaacagaacatcacggcacggctctccgatcaggaaaagcgccttacccggcttggggttcgcgttaatcagatagtcgttgccgacgatctgctctggcagttgcaaaaaggagtctga

SEQ ID NO: 167893 - DNA, 1005 bp, Enterobacter cloacae
atgatcgaacgcgagaaagtgctgcaacttgaacaacgaatgaatgaacaggttatcggtcagcaagagctggtgcgaatgctgatcattgccctgctctgtgacggtcacgtactgctggaaggcctgccgggactggcaaaaacgcgtgccgtacgcgagctggcgcgtcatgttgagggggattatcgacggatccagttcacacccgacctgctgccttcagatatcaccggaagcgagatttatcagcaaaacgccacgcgtgaagaagatcagttccgctttcggcctggcccggtattcggcaacatcatcctcgcggatgagatcaaccgcgcctccgcgcgcgtccagtctgcgctactggaagcgatggaagagcgccacgtcaccgtagcgggaaaaacctggccgctgccgggggtctttatggtgcttgccacgcaaaacccggtcgatcaggagggcacctggcccctgcccgaagcacagctggaccgttttctgatgaaggtcctggtggactacccgacaaagcaaaatgaattgaaagtcatgcagctggtccgcggggagcaacagcaaaaatatcagcagctggccgcctccgccgggacgagcgccccccttcccgagaccttaatgctgagccagcaggagatagccgcctgctggcagggtatttctgccatccatgtggcgccgacggtcgaagagtacatcgtcaatattgtggatttaagccgtcacccgcaacaggtgagcgatacgctggcaggctatctgagctttggcatcagccctcgcggcacccttgcccttgaacgctgcggtcgtgcgcaggcctggctggaaggacgcgatgccgtgctgccagaggacatcaaaaaagtggccccggcggtgttgcgtcaccgtctgatgctgacctggcaggccagcgccgacaattgcaccccggatgacgccgtacaaatgttattagacgcagtggtggcgtaa

SEQ ID NO: 167894 - DNA, 1296 bp, Enterobacter cloacae
atgaagtacagcaccacactacccgttaaagcgttaccgtccgccgagaaatatgacggcaaaggccctgaatataagcgccgctttcatgtgatggccaagccgacgggctcgacctgtaacctcgattgttcctactgtttttatctgcacaaagaagagttgctgcatcaggatcgccataccggtatgagcgacgaggtgcttgagaatttcattcggcagtatattgacggtcaggacggcgatcaggtggttttctcctggcaaggcggtgaacccacccttatggggctcgaattttttgagaaagtcgtcaaatttcagaaacagtatcaaaagcccggtcagcgcgtcgaaaacgacttacaaacaaatggcgtcctgattaacgataaatgggctgaattcctcaaagaacataaatttctggtgggtctgtcaattgatggcccacgggaactgcatgaccgctatcgcgttacccgcagcggcaagccaacgtttgataaagtgatggcgggcgtcgatgccctcaagcgtcacggcgtcccttttaatgcacttgtcacggttaaccgcacgaatgccctcttcccgcttgaggtctaccgctttgtcacccgcgaactgggcgccacctatgtgcagttcaacccgtgcgtggagcctgtcgatttcaaacagaccgcgccgcagttctggcgtgacgataccatccccgtgaccggtagccgacgcgcgcaccccggggatctcgactccatcgtcaccgactggtcggttgatccggacgactggggcaaatttttaattgccgtctttgaagagtgggtcaataacgatttgggccgcgtacaggtcaatctgtttgaaacggccgtcgcccagactctggggttgccagcacaaatctgtacccactccgagttctgcggtaaagggttagcgattgaaaagaacggcgacatcttctcctgcgaccattacgtttacccggaataccagattggcaatatagagaatacccagcttgcgcatttggcgttctcagaacgtcaaaaagcattcgggatgggtaagcgcgatacgctgccaaaatactgcaaggcctgcccttatctgaacatgtgctggggcgagtgccccaaaaaccgtattgtgcgcgccccggacggcgaggcgggtcttaactatctctgccccggtatcaaagccttctttaattacgccgagcccatcctggtggggatcgccacgctggttaaacgtgactttgcaggattaaaacgatga

SEQ ID NO: 167895 - DNA, 981 bp, Enterobacter cloacae
atggaagataaagattacactgaaattagagagttttggaaaaatgaaatcatagcatttcttgcgttgacctgcttaaaaggtgttggttattggactctccgtaaaatatacgaatccaaactagggtttaaaaatcttttaaaagctagttcagctgatgctttggctgggtatctaagggttgcgttacccaaagatatcgcgtgggaggaatttcaacaagagttgtgggcgaaaggattagaacgagcgagagaattaaataaaaaaggaattgttctaaccttttttgatcaacctactttcccaactaatttaaagaatataagtgatcctcctttttggctttttgttcatgggaatcaagatattcttaataagaaatcaattgcaatcgttggtacgcgaaagccaacagatgatggcatttttctggttaaactaattgtatctgggttgtatgaaaaagatatagttactgtaagtggtttagctactgggattgaccaatcatgccattatgaatctattcgttatgggatacctacaattgcagtgttaggtaacgggatttttgtagaatatcccaagggctctaaaaatctctacaatcaaatagttttaagcggaggtgcaattgtcactgaatatttgcctgaccaaatttatagcgctgaaaattttgtaagacgcaatagaattcaagctgcgctgtgcacatctcttattcctgtggagtggaagataaaaagcggtactgctcacacagttgaatatgcttataaatattcgaagaaaattgctaatccgtacttacctaatacatataatttaagaccggaattgagcttttcagaggaaaatcgaaaatctttatcttttctaatgccaactgaattgaaagaaatgatggattatatttttagtgaagatttaaatctgagagcagaaccaacacagcagagcttagatctctaa

SEQ ID NO: 167896 - DNA, 1230 bp, Enterobacter cloacae
atgagcaagatcaaaggtgtgattctcagtgttgaagacactattttaccaaaaggtaaaattgatggtgatattttctctgaagttgataaattaattaaatattttaaaaataaaaatattgagtttgtcgtatttacaaatcgcgcttgggttgttggtgatgaccgtattcccttagaagatatcttacggaagcattggggagagtttacgtatttatgtcgagctaaggataggagtattcctggaaaacctacagctgatgcaactaagtatgtacttaatttgatgggatggcaaagtacagaaactttatatatcggcgcatcactaaacgacatgcaaactgcagtaaatggggagttgctttttttaagagcaacctggtgggccgataaaacagattacgggtttgaattttcatcgcctaaagatattgctagatttatagatacattttgtttgagagatcatctctggtgccatgaaattcatgatggtgattttaatttttatgcacttgcccctttcagtacaatgaaagaagaatataccttatattcggaggatgctcgtgcagcggcaaagcatggtttggggcatcctgagttctggacaggtgctttggtgtctagcttatattttagtggcatccacaaacatataaattatgttagtgtttatcctgggcataaagaagggcatggtaataacataatggatgaagctatttcactatttggtaaatgcttccgaaaaacatacatacctgatcttattttaagacacacaacatcaacaaaatcacaaaaggcaagaaatgaaggtattgcaattgatcattgcaaccaattaaatacaatttgtcttaatcctaaaccgcatagaaacccaacgactatttataaaagaccacctttgggatttggaaaaacagttctccttatagacgatattacgactcgaggttacagttttgaatcagcccgagcctacattgagaaaactggagcaaaggttatacttgtatcttggcttaaaacaatcaatactgatatttctactcttggtgagttgcctaactttgatccttacaaaccgaaccattttgaaaatgtaactttaggaaaatttcatagatacagggacaatatcgttgatatattagcaccggctgagttaactcgattgtttacagcttacaagcaatgggattggcctgtataa

SEQ ID NO: 167897 - DNA, 489 bp, Enterobacter cloacae
atgtcagcaagagagcgtttttttaagaaagtgcagcaaaataacggggataaaccgatttatattaatacagctgaagccgaagtcagggcattttgtcagcggatggatgaccttgcacagcagatcatggcgtggtttgacggttcaggtattgacgtaattttatcaaaaaaacatattaccgatttaagtacggttggctatagcctcaatagcagtatatgtcgttatgctatcacgacaatcagtctgcaaaatggagatcgcagcgtcagtattctgccagaacagatgattcggggagcagagaaggggtgtatgacaatgcgtatttatgcgcccggcagtatatcggaggaaaggatatatcatttaagcatggcacctgaaacaggctggtatattcgtcgcgaatatcaaagtgcaaaagagaatgtccttatgactgaggactattttttccagactgtcgactgcctggcctga

SEQ ID NO: 167898 - DNA, 546 bp, Enterobacter cloacae
gtgttacgtacaaatttaattaaaccagcttgctggctacctgctctgctggcattcagcctgacgggttgcggggtgacgcagggtatcgccgatggcaccaaatcggcatttaacgctgtgttctacaaaaagattaaggtactgcacctggattttacggcgcgtgaggcgctcaacaccgatacccgcgagagtaattcactctccgagccggtggtagttcgtatttatcagctaaaagaccgcaaaaccttcgataaaacggtttaccagcaactcctgaaagatggcgaagccatgcttgaaactgacctgttggcgacccgcgatgtggtcgtaaaaccgggcggtgatacgaatcttgatatgccaatggaagacgaagcgcagtttgtcgcggtagttggcctattccgccacccggacatggtcaaaaatacctggaagcaggttctaaaacgtgaagatcttgatccggataagccgcgcattctggaggccgggaataaccacctgacgttattgccattggaggatgactga

SEQ ID NO: 167899 - DNA, 888 bp, Enterobacter cloacae
gtggaagatatccggttctgcctcttcagacaggcgaatggtcttcgcgtagcagccgccttcaaagttgaacacgccgtcatcatcccagccgtgttcatcgtcgccaatcagacgacgttttggatcggtggacagcgtagttttaccggtgccggaaagaccgaagaatactgctacatcgcctttttccccgacgttcgccgagcagtgcatggaggcgattccgcgcagcggcagcaggtagttcatgaccgagaacatccctttcttcatttcgccgccgtaccaggtcccgccgatcagctggatacgctcggtcaggttgaaggcgataaagttttcggagttcagaccctgctctttccactgcgggttggtgcatttcgcgccgttcatcacgataaagtctggagtgaagtcttgcagctcttcatcggtcggacgaatgaacatgttcttcacgaaatgcgcctgccaggccacttcagtgataaaccgtacggaaagacgggtgtcggcgttagcgccgcagaacgcatcgataataaacagacgcttgccggaaagctgatgggtgacaagtcctttcagatgctgccaggtttccggggagagcggtttgttatcgttcttccctttgcccttatcagcccaccacagcgtatcgcgggtggtatcgtctcggacgatatacttatctttcggcgaacgaccggtaaaaatacccgtatcgacggcgatagcaccaaggttcgtcaacacacctcgctcgtatccttccagtgctggattgagctcttcctgatacagcgtatcgtaatcggggttgtagaccacttcctggacgtcgtgaataccataagccttgagatcttgcggggttaa

SEQ ID NO: 167900 - DNA, 570 bp, Enterobacter cloacae
atgcccacgccagcagcggcaataccatggtggtacctgccagcgccgcaaaaccaaactggctgtggatcagcagccccagtggtgcgcctgccgccagcgcgccgtatatcgccatcccgttccaggacatcactttaccggaacgtgcaggccccaccagccccattccccaggtcagggtgccggtcagcagttggctttcgccaaagccgaggatcaggcgccctgccaccagcagcgcgaatttatacgctgcctcaatcggtaacagtgccgccagcagccaggctccccccgccagcccgcaggcaaacatgccctgcaacgccgagcgttttgcaccgtgctgatccgccaggcgaccggcgtagccccgggttaataccgtcgctaaaaactgaatgcccaccgcaataccgaccatggtgttgccatagcccagctcctggtgaacaaacaaggggatcaccggcagcggcaggccaacggtcatataggtcagaaacaccgcaaaggcgatgcggaaaagggaaaggttcccggaaggagcgatcttctcaggggtag

SEQ ID NO: 167901 - DNA, 291 bp, Enterobacter cloacae
atgacgaacaaccgaccggcaggaatgccacaagaccacatcaccgcgcttgaattttcgcttttgctggcggtatcacataccacctttgcagcactccgcaagcgtgcagacttcccgcaggcccacccggcaccgcgcaaggcgatcacgttcaaccatgacgaggcgttagcctttgccctagcatggaacgaggagcaggccaagcgctaccacgggaaaatgacggccgatcgattcattgagcaggccgcccgcattaaatccctgaccgctacgcagcgctaa

SEQ ID NO: 167902 - DNA, 234 bp, Enterobacter cloacae
atgcaggcggcgatcgcctgggagcacgcagaggaggccgctttagtcgctttcctgaacgcggaggatgaggatcgggcctttcgtgagcaggtggccgcgaacgagcaggatttagagcaggagccggagatcatcgacgaccacggcgggctaacgttcgatgaatggttagccggtggccgcagcgcctacgaggcacaacaggccgatgattactcattctttcgctaa

SEQ ID NO: 167903 - DNA, 396 bp, Enterobacter cloacae
atgacattaaccgccatttttgcaggagccgccgccgttatcgggctggcctttgcttaccgcctgtatgagacacgcaacgacgcccaacaggacgagccaaaagccccaccagcgcccgcagctgttaaaccggtacaaccacaacccccgcgccgcaaaaagcgcctatgggccgccccccttgccgtattcattgccgccgaggttgctttacacatgctgatcgctactggcggttgtgctgacggctggcactccgcgagcattggccgcgctggcgcttgttcgtatcacggcggcgtgaaccattccgggggctttatcctcctgatctccctggcccttgccggttacacgttttaccaggtaacgaaagaccgcacgaagaaataa

SEQ ID NO: 167904 - DNA, 339 bp, Enterobacter cloacae
atgaaacacgcccccctgattggccgccttttggcccttgccctcaccatgaccgcaggcagcgcagcagccaccaccggcgatcggatgttcgaagcccagcagcacgggatcgccaacatttgcgagaaatcagccaacccggccgagtgcgccgcagccgttaacgtgcttttggtaggcactgcgaaccagatcaccacggcgacactttgcgagctgggcgaaccggcgaacgccgccgaagcccggaaatgtgaagccgcgaaacagtaccgcgatcgactggatgccgcagggcaccaggccgccgccgagctgggaatgagcagccactaa

SEQ ID NO: 167905 - DNA, 159 bp, Enterobacter cloacae
atggcgatcggcatgttggaagcaaccgaaaacttatttaacagcatttgcagcaacaccacagatccaaagggctgtttagccggactaacccagattctggaagaggcccacaaagacgggatgttagttggggtcgtctcagaaaacggaaaataa

SEQ ID NO: 167906 - DNA, 558 bp, Enterobacter cloacae; identical to SEQ ID NO: 86000

SEQ ID NO: 167907 - DNA, 609 bp, Enterobacter cloacae
  misc_feature (566)..(575): n is a, c, g, or t
atggatgtctataagttaatagaagttgaactaaagaaaagtatcctcagcactagtgattatgacgcctccaaactacaagagcttttggagagtgtttacgattatatttatgaatgcaaaaatgctgataaaattcgaatatccgttagcaaactatctcaagtttttcattcggtaggagataatacaacagtagtcctattatttatcttgattaataaattacatgatcttaatggaataaacactcttaaacattcatctttagaaattgaacctgcacttgataaaatttcagattaccttcaaagggatatgatacttaaccatggtcaatatcatttctttcaacataaaacaccatccaatccgcttggaaagcataagctatacgtcactatctcttttatgcttcatgagtttttgagaaatactgacaaggaagatgatgacattaacttagcgatgatattattaataaacatgtgggaattagcacataaagttgatagactgcacgaattttatataattttttgttcctttttacataaactacatcnnnnnnnnnnaactacatctccgccaaaaaacacaaatggttag

SEQ ID NO: 167908 - DNA, 312 bp, Enterobacter cloacae
atgacaacccagtatggattttttattgattccagccgctgcaccgggtgcaaaacctgcgagctggcctgcaaggattacaaagacttaaccccggacgtcagcttccgtcgtatttatgaatacgcgggcggcgactggcaggaggacaacggcgtctggcatcagaatgtcttcgcctattacctgtcgattgcctgcaaccactgcgaagatccggcctgtaccaaggtctgtccgagcggggcaatgcacaagcgcgatgacggttttgtggtggtgaacgaggatgtctgcatcggctgtcgctaa

SEQ ID NO: 167909 - DNA, 747 bp, Enterobacter cloacae
atggatatcccacgtatttttaccattagtgaaagcgaacaccgcattcataacccctttacgccagagaagtacgcgacgctgggccgcgtgttacgcatgaggccaggcgcacgcattctcgatctcggcagcggttcgggagagatgctctgcacctgggcgcgtgattacggtattaccggtaccggcatcgacatgagtcagttgttcaccgcgcatgccacgctgcgcgcagaggaactcggcgtcagcgaacgcgtccattttattcataacgacgcagccggctacgtcgcggatgaaaaatgtgacgtggcggcctgcgttggcgcaacctggattgcggggggcgtagccgggacaatggatctgctggcaaaaagcctcaagcccgggggagtgatgctcatcggcgaaccgtactggcgtcaggtacccgcaacggaagagatagctcaggcctgcggcgtctcgtcgattgcagactttctcactctgcccggtctggttgcgtctttcgatcaacagggctatgacctggtggagatggtgcttgcagatcaggaaggctgggacaggtacgaagccgcaaaatggatgacgatgcgtcgctggctggaggaaaacccagacgatgactttgcgaaggaggttcgggcggagctgacgatagcgcctgaacgtcatgtgacgtatacgcgggaatactttggctggggggtgtttgcgttaatggcacgataa

SEQ ID NO: 167910 - DNA, 708 bp, Enterobacter cloacae
atggtttataggattctattctatatctcactattctctttgagtcgagcattaattggtatagttatcataaccctgtttttttctttcttattatcgaaaaaaataaaactaaaatttaaagttatgatggaaataataccattctttactgtgctatgtttcgcagtattggttaccaatccaaatttatataatttcttattgtggaaagtttctgatctgaatgtttttcaggaaaacaaggagatgtctggttcaggaaaagtcaggcagtatgaagttattaatatacttgatgggaacgagagttctgagatgaaggtactcttaggctatggtctctctggcagtttcaattttgataaatatccgctgccaattcttgaggcactagacagtaaaagtttttctgaaaaggagcgactagggaatagatatttcttccctcactcattcattgcagcaaacttgttgcgtggtggtttgctccttctgctgttctatctttttgtacattttgcgctatttgtttatttctttaagtctaatgaatactatttatcagtactctcaatatttctgatttataactcttatgttcgtgttgaatatgcattgcttttgtcaatacttatcacacttactttattgaagaatcaggtaagtactattcaaaataattctgacaaggctacacattcatga

SEQ ID NO: 167911 - DNA, 1398 bp, Enterobacter cloacae
atggattataattatatcgttcctgtaattatggctggcggttccggcacccgtttatggccactctcccgatccacatatcctaaacaatttttgaaactgattggcgaaacgacgttgttgcaggagacaatagcgcgtcttgatgatatagatcatgaaagatctattattatgagtaatgaagattatcgttttattgtagcggaacaacttcgtacgattaattataaaaaagcagagattatccttgagcctgaagcaaaaaatactgcaccagccattgctttgtcagcctttcatgctttaacttacaataagcatgcgatattagtggtcttagctgcagaccatcatatagatgataaagataagtttactgctctagtaacagaaggtgttaatgccgctgcagagggctatattgttacttttggggttgttccaaataaaccagaaaccggctatggttatatccgctccggtgatgagcttgacaacaatttatttaagattgagtcatttgtagaaaagccttctttcgaaaaagctgaagaatatcttaagaaaggcacttatttttggaacagtggcatgtttgtatgcaaggcatccacctatttagacgaattgaaaaagtatgctcctgatatattttctgcttgcgaaaaatcattactaaattctcaagctgatatggattttttacgggtcgatgccgaagcttttagctgttctccaaaagactcaattgactatgcagtgatggaacataccgaacgaagtgcagttattccattttcttcccaatggagtgacgtgggatcctggctatcgctttgggaaacatcacaaaaagacaaatcgggaaatgcgaagatcggtgacgttatttgtgttgatagtacgaataactatatgtattcgtcagattcactcgtgacattagttggtgttgaaaatctcgcagttgtgcaaactcaggatgcattgctggttgcttctttagataaagtgcagaacgttaaaacggtggtagaagagctgagtcgtttaaaacgtaaagaacatattctgcatagtgaagtatttcgcccatggggaaatattcgttgtatcacccgaagtaataattatatcgtaaacaagatcgttattaatccaggggcaggcatctctcagcagtatcatcatcatcgggctgagcactggatagttgttaaaggaacggcatatgtaacaaagggagaagaaaatttctttgttaccgaaaatgaatctacttatattcctattggaataatgcacagcattaaaaataatggtcgtatccctctggaagttattgaaattcagtctggctcatatctcgaagaagacgatatttacagggattaa

SEQ ID NO: 167912 - DNA, 1122 bp, Enterobacter cloacae
atgaaaaaatatatttacggattcctgttatcctctgctgccctgctcgctatagccccgattgcaaatataaaacatgagattgactccggaaaaaaagtgatagacaccacaaacaaaaacattttagagtgggttgattttaaaatattttataaaatggactttgctattccagctttgtcttataccctgtataaaatgggaatatccctttatccagaagatactattattggaaaagatgggtggttattccttggtgataaatataataagaccatttcagaaaatcgtaaccaaaaaccgctttctgtaaagaatattgatgcaatgatagagtctcgtcattcatgggataagtatgttaaatcatacggggggattggctattttgttacgtttgccccagacaagcattctgtttatagcgaaaaagcccctaattgggtcgtaaatagtggtggaagtaaaaatattaactatttactcgaacgttctataggcgatccgacgtttatcaatcttgggcagaatttctcgtcgttaaaaaataatgacgatatcatttattataaaactgactcacattggaatcagaatggcgcgtggcatgcttataagaaccttgctaaagaaatgagccaactgatccccggtattaaatggttgtctgatagtgacgtgacgttcagtaaaagccctcgtccaggaggagatttgagtaacttcctgcgattacaatatacgctatctgatatacagtatcttattactgtaaagcctgctcattctgcaacccaaaatggtactgataagaacgaacttgcgtatctctataagtcgtcatcgttaaaagctaatgatttttattataataagaatgcgcttaacaatatgaaagttttatggttaatcgactcgtttggaggcggcatgaagcagtatatgcatgctactttttctaccgttcatgaacaacactatctctctctcatgggggataagaaaaaattcctgaaagtcattgatgagtatcatcctgacctagtgatcgttactgccgttgagcgacaaatattgataccatcaatattcgatgggtcacctgccattaaataa

SEQ ID NO: 167913 - DNA, 1482 bp, Enterobacter cloacae
atgctgtttagttctccggtattcatctttttgttcttaccgatctcatttctcgtttactttttccttaacaaaatcaggatgatatacgccgggaaagtatggttagtcggttgtagcttgtttttttatggcttttgggatgtgaactacttaccacttcttcttgggtcaatattatttaacttcacccttggatgggcagtctcacctcataccaaagggcttcgcttgccagcaaaaagaaaagccctgttagcctttgcaatcatcgttaacctttctctgcttggctattacaaatacacaaacttttttattgaaaacttcaatgatttgaccggttacgagttaactttcagaaatattattttaccgcttggtattagtttctacacatttacgcagacggcatttttagttgatagttacagaggtagcgctaaagagtacgattttattaactatgcattatttgtgacattcttcccacatctcattgcaggcccgattttacaccataaagaaatgatgtcgcagtttcagtcaaaatggacctgtgcaatacgctatcgaaatatctttatgggcttatttattttcagcatcgggctgttcaaaaaagtagttattgctgataatttcgctatttttgcaaataagggttttgcacctggcgctcagcacgacttttttagctcatgggccacaagtctttcatatacatttcaactctatttcgatttcagtggttattgtgatatggcaatcggcgcagctttattattcaatatctggttgccgctaaatttcaactccccttacaaatcatttgatattcaagatttctggcgtagatggcatattacccttggtcgttatttaagagattatatttatataccactcggtggtaaccgatgctcaagtgcaaggacttatcttaacctctttgctactttcgctctaggaggtttatggcatggtgcaagctggatgttcatcatttggggagcaatgcatggcggagcgttagtcattcatagatggtggaaaaaacgtggttttgaaatgcctccagtattggcatggctcgttacctttatgtttgtaaatgtcgcatggatattctttcgcgcgcattccattgatgacgcgataaggatcctttccggtatgttagatttcaaatcattttactcaactactgttgaaaatgtgccaaccaatatgatcgcatggggaggttcatttgttgaccactttacagacatattgccgacaggaattatcgctaatttcctttgctacatcttaattaccattggttttattatgactccattcaaaaatgctttcgaaatgacaatctctaaaggaaattatggccttaaaacaatttggatggtgattctttttatcttcgcaatttacgcaacgataaaatcaacgaatacagttttcctatactttaatttttga

SEQ ID NO: 167914 - DNA, 1698 bp, Enterobacter cloacae
atgtccactttagttagtatatattgcttctactatctaatgccagacgatctgataagctatgctaaaagcctcgtttatgccatgggtggaattagtaatttctattttttagcaaatacaaattacttcgaaagcaccacatacgaacctttattgcatacatggtctctggcagtagaggagcaattttatgttatattcccattcattctattgcttttaaatcgccttagacacagtcgattttacacattattctttgtaattttgtatgtactgtcaattgcaatatctcattattttgctgttaatcataaagatgccgcatattacatgctccctttccgcttctttgagctgatgacaggagcaatgaccgctatatttttaacaaaaatcaccgagctaaaatataataaaaatatcgtttccattacaggcgcaactctaattgcggccagtgcttttataatagatgataaaactgttttccctggcttaacagcactcccagtctgtcttggaacaatatttttaatactgtcgcgcggtgcgatagttaatagcacattagagctaaaacctgttgtttatataggtaaactgtcatactcactgtatctttggcactggcctgtgatcatcttaatggagtatcgcggattcgatatgaatgtcactaatgcctgggctgccgtcggtttttcattcgttatgtctatcatcagtttacatctgatcgaaaatccaatacgtaaaaccaagatcgcattccctacagcattgacaactatatatttattccctttagctatctttggattagtagcctatagcgtaaataataatgtgggttatccatacaggataaaggacatgtctcccgaattgatgaacgagaatagtccaaatgtggtgagagctaaatgtatcggcccaatgaaagtcggcaatttcgacgaatgtaatcttgggattaataagagttcgcacgatggcattatgattggtgactctttcggaaatgcttactccggctttattaatgcccttgctaaggatgctggtctttcgataaatgatacaatgaagtcctcaacgccgtctataccgggtgtatttgtcactgctgtagctaataagatttcagatacccttgcagaagaaatagcagattataatactaggcgaaccgaatatggtttgaaacaaaaaattgttatcctctcagagatatggggtcagtacgacgatagaaataaagctttccgtgtatatgataaaaactggaatgatcttagtcctgtcgcctataaaatccaaacagattatattaaaaaactgattagtaatggtgttaaagtagtaatcatagctcggccttggggcggtataggtcaagaaggaataaccaaacttcgtagtttgaaacaaagattcggtaatgccgatgatgtgctgatgccttactcgggtgaaaagaatagccgtctggaatacagaatcaaaagagaaattcctgaggtaatcctcattgatcccaatgatgccatttgcaataaaaatgctaaatgtcatgtttcagtagacaacactattttgtttagaacggatggattgcaccttaactacccagcttctgaaaaatgggggcaattatatcttgaaaaaattggaaatccgttgaagggttaa

SEQ ID NO: 167915 - DNA, 408 bp, Enterobacter cloacae
atggttatgaaaaaagtattcggtgcattatcggttacgttaatggcgagtgcctgcgtgtctcatcccgcacaatatcagtcgcttaccgttacgctaaaaaacaacgaaccctgcttcgcaattcctgctaattccggattagatgcgcctgttaccagccattcgcccaccattatgaaacgggcggggaatgaatggaaaacgatatcaccgccatctacgtatagccctgtggtgacgttgaatactcagcagtgtcaccaatggagcggtattgcgtggcaaaccggggaatatgatgtcgccctgaaagtctcgggaaaaaacgattctgttcgttatgctgctcgattctcgctcgaagaaaatgcgtcaggccaatttaagattacgcagaccgaatag

SEQ ID NO: 167916 - DNA, 618 bp, Enterobacter cloacae
ttgctcgatcttcacagcgaagatgccgttattaatcattatgccgatcgttaccgtaacctgatgccgaatagccgtaagtccataaagataatggatacagcagaagcgcatgcgtttgaaatatgggataaatcattacctctcgtcgtatcggaaacgaactcactctataatgcagtaggcgctttagtggggctggctgcgggagatgctgtcggggcggcgctggaatgtatacgaggtgatagcgaacattcattaaatttgggaacactagcctcaaaagcattctcaactacggatgaagaactggcgaagcatttatcgaatgcaaattatatattgagagtaaggtacttagtgtttttgaaaatattcaggaactttatggacatctttcgcttcagtgggcgaaagaggggcagtatttgctttttgaaaaacagggtaaacagctcagtattgcacccgttccgggcagccagccccttcgttacgcgctgtggacgactttcgcagacgagtcacatcacttgctttcacagctttccgtttgtcgtcaggtcgctggctctgaccagcttagtacacccgatcggatacgtggatatctga

SEQ ID NO: 167917 - DNA, 594 bp, Enterobacter cloacae
atgtgtagcgctgagattagtcagggatcgcgtaacgttattattggtggaagcaaagttcagaccgatgaaataagtcctgaaatccctgaatgggtaaactggacgatgctcgccgttggtgccggagcgatggcggtgctggccagtccggcaatcgcacttctgagtaccctcggtgcgatgggcggtgggactgttggtagctatgcggggggaatgctgtttggcgaaggcagcgacggtcagaaatgggggatgctgatcggctctgttatcggcggcggggctagcatgaagggtggtgcaaggtttgatgcgtggcgggctggtaagcctgttctcgaaccggttaagccaaatatctcggcccgaagagctgaacttaatgaaaaatttggacgcacgggcgatcttaatagagatattaatatccgtgcaaatcaaaaaattgttgatgattttatgcgttctcagggtgttgaagaaagtaaaataccagcttatcgcaccggtatagatcttgagcagagagtgacaattgaaacaatcagtaaaggtaaaatagcctttcagaatcaatcccctaggtaa

SEQ ID NO: 167918 - DNA, 927 bp, Enterobacter cloacae
atggaaattactgcgggattgcgctgcccgacttatggcggtgcgattactggcggtgtcggtaattcgaacacaaaaacagttgaggggtatgtagcgggttcaaatgttatttttataccaactcagaccgtgataagcgactacggaatattcaagcttgatagcgtgactatatcaggtgcgagcgttacacaaaactggagcggacactcaattcccggcatggccgaccctcaaagcgtggcattctccggtacgctttggcaaatattgccgataagccagaactcgaatatgggtctactgattcagaacagtacggatttcaccgcaattacaactgcatcaagtgtgggtgtttgcatttttaaaggccgcgtttctgttggaaccgcaggatgggctacaccagccattgctgggtttgatcgcagcaaatatctggtctgctgcaagtgggacagtccttatacgcttgattatgacgggaaccgacttctttttctaaatgacggttcaaatacgggtgaccagccaatgaccggcacggtggatgtcgttatttttgcaggtggtgttacgccagtggcggcaaatcccgggttcaatatatataactcaacagggcagtgcacattttcaagcgcgcgcaggcctttcgtttatctcggcgttaattttgttccttctgccacggcccagactgttccgggaggtgggtatgtcccggtagggcgttttggactgagtgtaccgagttacagctcaggacagcgcattaatcactatcattatgggctggttatgcagaacggaacgcttcgggccgcaagaggggcatacgtcggctgggcagatatgcaacttgcgaatcagggcgtgaccccaatctcactcccggttatacctgacatgtacgtttaa

SEQ ID NO: 167919 - DNA, 363 bp, Enterobacter cloacae
atgagcacacagattgcacaccttatgcacacagagaaaaaaggaatcttctggcgtaagcgttacgacaaaaacaccattgaaattgtgctgcacactaagcagcttccagaggcacaaccacgagcagcagcccttactatttgcttcatgcagcttaaagtgttgggtgtgccattccagagcatgaaagacaccctgaaagcctatcgtgatgaaatgatgaagcaggaaaagctttctgctctacaggcgatgttatcaggttcacagaaagccctacaaggcgctgtagcaggtgaggtagtgcaagagctacacaagctgagaaagtggctcaaatcgtcatacagcacgaattag

SEQ ID NO: 167920 - DNA, 507 bp, Enterobacter cloacae
gtggattacttcaagcatgaagggttaagcctgagcatgagtgattttagcaaaatgcttgaaggaatagttgcagcagcagaaacacgcactaagaaaagcagtcagaacgtaatacccacacctgttcgctctattgcatctaataatctgttcaccgcgcaagagggctttctgtttaatgccctgctgaatgaagcggctaaacttccagacggtgaagcaaaaggtgtgcgcaaggagctactacagcgtcttagtgttgctttgggtgatgaggctctgcataacgcgcgtcgtgaggttatgcgctcatatctgaaagatattaaagaagagcgccgtaagcgtgaggagctagagagagaagcagagtgtaagcgtaatgaactggctgattcattcgataatattattgcacaggttttagcgatgcaaggaaagcttaaagccactgctcatagtgtgatgattcaacatagtttaattagtagctggagaggatag

SEQ ID NO: 167921 - DNA, 150 bp, Enterobacter cloacae
atgtatattccggtctggagtttgctcttaattgcagtagtaatcatttatcttattagctctaaagcttcaactgctaagtattataaagctgcttactatgacctatacaaaaaatatggtaagcgtcgctgggagtttgaaggttga

SEQ ID NO: 167922 - DNA, 273 bp, Enterobacter cloacae
atgcacttacatttttgggataagtccgagctaatggtaatgcttacggaggaacagaaagggcatattagcaagcgtatctttggtaagtgggttgaatatgatgattgggattgctggaacacaagcaatattcatgataaaagatatgcgctaattaaaagagaatttgaatcctactttatggaatatggttatcgtgatgttaactcagacctttgccacggaggatgtcagggatacgataaattaaaatacaagggagggatttaa

SEQ ID NO: 167923 - DNA, 585 bp, Enterobacter cloacae
ttgggagcctgtgctctggtgctggctaagtgtgatggtgaaagtagctctgtagctccagtggttcgggctaaccataaaacaccagaagtagaagctaattatgctgcttctgatttagttcctttcactgattggaatgatgtaacagaccatacaacaactcattttaaatgttcaggtggtcagagcgtcactgtagatgatttgtctacaactgataaagaccttaacggcagcttacctgttataaatatgtatgagtttatttctgtttcacagaatggctttgtgattgctaaaaatgatgttcttgatagccgctattatcacgagggagtgcagtcacaagattatacaggggcgtatgtaggtaaggcttcggcaggtggtaagaatgttaacggtaatgaagtggtgtttacattctttactgttactccccctgattctggtagcaacatgtttaatgttttaaattctgataataagactaaggctaataaatattatctttccacgcaaaccttagatgaaagcaataattttgctggcgttcaatatacttgcgagaaaattaaatga

SEQ ID NO: 167924 - DNA, 483 bp, Enterobacter cloacae
atgatgaagcgtctatttgttgtctgtgctgtgcttactccttttacttctaatgctgctgatttctgccgtgtggttacgtttactgactggactgttaccagcgctaaaggagttcacaaagaagatttaagtgaaggtgtttctgctgaaatctatatgaaaactggcggggtgttattctacgaacctgttaatcctgctaatcataatatgttgatgggggtaactatgattggtgatatgctggattcttacatggtaactgttactgacccaaacaacactaatacctttgcttttgaacctcatacagatagcttctatgaagcagatgtttttataccggatgaagagcagcgtggtaaggggtttgattcaagcgctcaaatcattaggggtaaatataaagcctgcactgttaaacagaagctattgctgtattcagactacagcaaacatcgtaaagacatcccctattaa

SEQ ID NO: 167925 - DNA, 474 bp, Enterobacter cloacae
atgaaacttaaagccgtggctgtggcttgcgcctgtgcattctctttatctgcttgctgcactatgcacgatggcactacacagagcgttaatattgaaactaatgctcctgctaaatacagaattactaatgaagatggtgatgttgtaggtgagggcgtagcgcctacagtggttagccttaagcgtggtgatgctccttacactgtgacccttaagcgctctgatacttcaccagtggctacaggaaccattaacgataatgggaatggctgggcgtggggcaacatcctgttcggtggcatcattggaaccatcgtagattactctgatggggctgcatgggatttagataaggttgttaacattcctacaatggctagccctacagacactttagacccgcttacagcgcctcctgtagctgctgtgcctgtaaccatcaataacactgtgaacaacaaacaggggtaa

SEQ ID NO: 167926 - DNA, 147 bp, Enterobacter cloacae
atgaataattattctgatatgttttttaccgatttccctaacttgaaagcggttcacttactcacttatttacgccttttagaccttactaattacggaaagaatattgtgattccttctctgtctaagctggcagaggaaatgtaa

SEQ ID NO: 167927 - DNA, 165 bp, Enterobacter cloacae
atggaagaccatctctgcattctcatggcgcatctgaacgcgaaagaagggaaaggaacgctctactttgccgggcagcgcatacagcagcagtggcaaatgaagcgagaaatgctgtcgcctcgatatacgacgagatattcagatctgcttagagtccgataa

SEQ ID NO: 167928 - DNA, 1095 bp, Enterobacter cloacae
atgcgccatgcatcgttgaatgaagccacatcaattaaccgtaccctaatccgaaatcgcatcatggttgcccccatgacgcgtatctctgcgtcagaaaccggggtgccgggaaaaaggatgcaggactattacacccgctttgcgaggggtgggtttggcgccattatcaccgaaggtatttatattgatcaggcgtggtcacagacttatgcatttcagcccggcatcgttaacaatgaacaaatctctggctggaaagatatagttgaaaaggcacatcaggtcggaacacgagtaatagcccagctcattcatgccggtgcactgtcacagaaaaatatttattgccctgactcggtcggcccttcagctgtaaagcccaaaggtcaacagcttgagttttattacggctcaggtgaataccgtacgcctgtggctcttactgaagagcagatccgcggcattatctccagttttgctgacagcgcagagcgagctatcagtgacgcgggcttcgacggggtggagattcacgctgcgaatggttatctgcttgatcagttccttactgattataccaaccaacgcacggataaatggggcggttcactcgaaaaccggctggccattacgctggaggttatacgtgctgtacgaaacaaaattggcgcagacaaggtgctgggtgtaagggtttcgcagggcaaagtaaacgatttccatcacaaatggaaagagggcgaggctggtgccatgacaatctttggtctattggccgatgccggtgtggactatatccatgttaccgaatacaaatcttggctgccagcgtttgaaaatggggggaagagccttgttcaaattgctcgtgaagccgctccggagaccgtcatcattgctaacggtggactggatgactgtgaaacagcagaaaaattactggatatgggcgctgattttgtttctatcggcaaggcagcattagcaaatcctgactggccacgaaaggtccgtagcggtctcccgcttcaggatctgcctggcgatattctttcaccggttgcagacattaaggaaaaagaacggttttaa

SEQ ID NO: 167929 - DNA, 921 bp, Enterobacter cloacae
atgaaaatgcatcactgtataacggaaaaggttacaatgaatctcaaagacgtcgaactgttcactgttctagctgaaacctgcaaccttactcaggccgctcgcaggctgggcatgagcgctatgagtgtgtcacgacatctcgctcaactggagaaggatctgggaacgcttctgtttcagcgcacgacccgtgcggtatcactgaccagtgagggggaagaatttcttccctacgcaagaacaatgctcgaagcagagcagagcgctcgggttatgtttaatgaagacacagccggagcatcaggtctgctcaaaattaccgcaccctcaggtatcggtcggcgctatatacttcctctgatgccagaactaatggaacaaaatccaaaaatgaaggtcgatctcaacctcagcgacgacgtggtggatattgtaggtcatggctatgacgtggctatcagggtagctccactcagagattctaacctgatagctcacaggctcagcagcaatccacgcgttctctgcgcttcacctgattacctgtctcaattcggcatacccaccgcgcttacagagctgataaatcaccagtgtctgagaaccgctatggtgtcgcagtggacgtttatgaaggatgggaatctcatcagccacatctttgagccgcgtttcatctgcaacaacgttgaaggtgtacggtccatatgcaaggctggtgcgggaattgcacaactgactaaagccgatattcagactgaattggctagcggcgagctcgtcgagataaatcttttggatgcccagcctcatatgctggcgatatgggcgttgtttccgacgaagcgatatttgccgtgccgcgttactgtgtttctggatgctttaaagtcatcactgaaaaacctgatgtcatga

SEQ ID NO: 167930 - DNA, 252 bp, Enterobacter cloacae
atgcgtaaagcggtgttttgcgaaactggaaagagctacgcaaaagagggggattttgggggcagatttgggggcattttgaaagaagggacaccgataggggctacgcattgttccactttgtacaaggagcggacgttgcggcatgttgtgcttctggttcgaatgctgccatttttcctgtggcttattgctattttcaaacctgaagaacgtaaatatacggcctcgataaatattcggaattactaa

SEQ ID NO: 167931 - DNA, 195 bp, Enterobacter cloacae
gtggaagagtctgctgctgcggcggcggcgctggaagagcaggcgagccgtctgacgcaggccgttgcggtgttccgtattcagcaggagcagatgaaggcgcgcgagtttgcctccgcgaaaagcgttgccgcaccggtcgtggcgcgtaaaccagcgaccgcagacgcgggcgataactgggaaacgttctga

SEQ ID NO: 167932 - DNA, 333 bp, Enterobacter cloacae
atgaacgaactcgatgatctgcataataaaataggtcagttattagtagatgccggtcctgctaatgcaaagaagatcattgctcgtgctaaattatcacttgatggtgaatcatgtgagtatgagtatgattatcttgatcaagatggagatgaagactggttcgttcctgataagttagccagtcacgatcttagattgctgttagttagtatgagggatttttatatccgaaataatatgacaaatgggaatcctgtatggataggttgcgaaataaccattgatataccggaagaaaaaataagtataagttttcattatgatgattaa

SEQ ID NO: 167933 - DNA, 444 bp, Enterobacter cloacae
atggccatcctcaagcaggccgaggccggaacgccggtaactgaactgtgtcgcgtgcatggcataagcagtgccagtttctacaagtggcgttcacgctttggcgggatggatgcctccatgatgtcccgtctcaaagaactggaagacgaaaatcgccgcctcaaaacgatgtatgccgaagaacggctcaaagccgagatcattcagaagccatggcaaaaaagtggtaaagccatcgcgccaaaagcagatggcagaggatgcggtcagaaaccgaaatgtcagcgtgcgttttgcctgccagttgttttctgtcagcgaaagttgctatcgctattagccccgatgacagagcgcgtggatatagtttttcctgttggtgactttggacttttgctttgccatggggctgcctgcgttttcagggtgatgcagatctga

SEQ ID NO: 167934 - DNA, 480 bp, Enterobacter cloacae
atgtataacgacacaacgtcaaaacacaatgatcatcataatcacagccagaaagagccgactggagataaattacttcatgccactgtgatgcctgatggaatgcgtatcagcttctggccacagcactttggcgctatcccacaatggataacgctggaaccccgcattttcgcctggatggatcgcttctgtgatgagtacagcggtggtatctggtccttttacacgctcagcaatggcggcgcgtttatggcccctgatgctgacagtgacgataaatggcgtctgttcaacagtatgaacggtaatgatgcggatatgagtgcagaagctgccggtatcgctgtcagcctgattgaatacagccatcacgcctgtcgcaccgaatgcgatgccatgacggagcactattaccgtctgcgggactacgccctgcaacatccagaggcccacgccattctgcgtattatcgactga

SEQ ID NO: 167935 - DNA, 1545 bp, Enterobacter cloacae
atgaacatgatttgcgtgcctctggatatcagaccctataattacgactttctgatctctctggcttcaatggacagtaagttgtcattaaaaatgcccgctaaagatattttaggctataagaagcagcccgcatcacatcaggctgtcgatgaatttataaacagccattgcgccgatgccgacgcgttgattatcagcctggatatgtatctctacggagggctttttccagcgcgtattcatcagatggaattgagcgagcttacggcaaggatgaaaaaaattaaaagtctgaaagagcgttatccgtctcttaagatatatgcttcttcactggtattgcgtacgccaaagtataattccagtgaagaagagccggattactacgcacgtatcggacattctatttttcaggtcggttacctgtctgacaaagaaaagcgtgttgggctaagcgaagatgaaaaagttgagctgcgtgcccatcattccgccattgattctgcttcctttgatgactggctgtcgcgccgaagcaagaatctgctgcttatcgaaaaagcgatcgaactggttgatgaaaaaattctcgaacagctgatcattcctctggacgatacggcggagtttggtttcacgatgcaggatcaggtacgcatttacgaaaaagtatcccagctgggggtacaggatcgggtgtttgttcatcccggcaccgatgagtctggatgcacattattgaccaaagcctatttatcgctgaaggagcaggattttttagcgaccacgttatattcaaacgaattgtttaaacattttattcctaattatgaagatcggccttttgtacactcactgcgctcgcatgccgccgcgtcaggtctcacattggttgataatgatgtatcgctgcctgtcttagcgatcaatggttgtggtgagatcatgcaggaggcttttgatatcagttatggctataacctgcaaaccggcgcgcgtaagccaacgtataaaaatataacgtattacacgcatcgtgatttggggtcatatgcaaagcacattgccgccagggcggcgcgggtgccagtggtggtcattgatgtagcaatgtcaaacggcggtgaaactgaactggtgcgtgcgctggataaagccggtgcgcttgatgtcattaagggctacgcaggctggaacacgacctgtaattcgttaggaacggggatcgcgcaccttgtcttttcgaccctgggcgataatgctgacgctatcgaacgtttctataaagaaaggctgatatcggactgggcttatcagactgaagtccgttttcccgttcagttcgaatatttaccttcagttggcctgagttactcctcattcgcagaaaaggaatccagtgtattcgataaaattaagactgaaatcgaaaacacctggcaggaaaatattaaacatagctttaatggttgctgtcctgcgattacatccatttccgcaccttttcaacggatgagcggtttacattttactgttgcatga

SEQ ID NO: 167936 - DNA, 312 bp, Enterobacter cloacae
atgaataaaatacttttagtgtgtgctgccggtatgtctacctctatgttaatgaagcgaatgaaagattacgcctgctccatcggccacgagtctgtgattgaagcgcacggcgtagatgttctgaaagatgttatcgcaaaatatgatgttgtcctggttgccccacagatccgattcaagctggctgaaatacaaaagctggcggagatgcatggcaagaaatcagacgccatcaacccattacagtatggggcgatgaatggcgaaaaagtgtatcaacaggccattaacctgatttcttcgaaatga

SEQ ID NO: 167937 - DNA, 306 bp, Enterobacter cloacae
atgagctatgaagatgatgttatgtcgctgattattgccgcgggtgaagggcgtagctgtgccatggaggcgctctgttttgcaaaagcgggtaattttgcagaagcggaagcttctttgagcgtttctgcggatgctttcagacaggcccacgagatccagacccggatcattggtctggatgagggcgtgggtaaagtacccgtcacgctggtgatggtgcatgcccaggatcaccttatgacaggtatgctttgccgggaacttgtgacagaattgatagagatttataaaaagatggagtga

SEQ ID NO: 167938 - DNA, 252 bp, Enterobacter cloacae
atggaaaacgtgatccgtaaaaataaaagggcaccgtttccggtgccctggggtcagtgccttaacctgcagtcgtctcatctgtctccggggaaaaatcccgacgcggttttcacggagtgcatgcgtcttacaggtcagttagtgtgcaataacttcctgccaggcctgctgcgggtaaatcccgttatagtttaccttacagcaccgtggccagcggggcacctatgcatcaaagcctggcaacaatag

SEQ ID NO: 167939 - DNA, 240 bp, Enterobacter cloacae
atgggaaagaagatgccttactggtggctctcgtgctgcctgatatctgtgcccgctatcgcggcaaaccctgcggcgatgattaataccggacaattgagcgaaacgcaggaactcccctctttaaatggccgcgtggcgcccgtagccagcaaagccgcccccggcacacttgagctgaatgaagccgtaaaccgcgccgtgacctggcatccggccatcagtgaagccgtcggctaa

SEQ ID NO: 167940 - DNA, 228 bp, Enterobacter cloacae
atgagactcccaagattcatgatgctagatggaatagatgatggcggtatggaaaaaaatagaagtcataatttacaagagataataatcaatgagtgttctcattatgaacatgattatcaattaatatttgcaacatctgagattaaccctaaattcactgaaagcgaatttgtggtcggagagtattattccccaaacaattactcattaaaaataattgagtga

SEQ ID NO: 167941 - DNA, 1428 bp, Enterobacter cloacae
atgacattcattaagccaacccttattgtaaatagactaacagtatttcagaatggacatcgtgcatttgattgcgaatttcataaaggtgtaaacattatccgtggaaggaatagctccggcaaaaccactatcatggatatgttggctttttcattaggcgcggaaaatatcagatggaaaccgcaagcattgaaatgtacaagtaccattgttgaggtatttttaaataatgagaaggcatgttttaagcgcgaaatatcaacagatccaatgcgccctctgtatatttactgggggccaatagctaaggctctagaggctggcgtacatgagtgggagttatatccattcaaacgttctgaaagtaaaataagcttcactcaggctgttttcactgcactttccatgccgctggcgcaaggggctggctcatcaaatcttacattgcatcaggttttgcgtgttttatacgctgatcaaccttctgtgcatagtccaattttccgatttgatagatatgacaatgcactgacacgtgaaactgtagggggatacctatgtggggtttataacgatgaattgtacaatgcacaactctctctcagagatgtagaaacagagttaacaaagaaagttgccgaattaaaaagcatttttaacgttttaggccgttctggtcaagcacctgatatgcaaggtattgatgaaaaaataaaagacctgaacgacctaagaactattgaaaataaaaagcttacagatgggacagcatttttatctaatgataaagttgactcagaaaaacgtgtaaattcgttacgagatgaactaaaccatgctaaaggcaaaacagccaaactgaaaaacaaaattcagtcattagagtttgagatttcagactctgaaatgtttatatcagaactacaagacagactgaaaaatttggaacagtccggagaaacccgaggcatatttgatagcatgaactttgaattttgcccaagttgtctcacgaaaatcgatactattaacagtagtcatacatgtcatttatgtaaatcagaacaatcagatgataaagcgacaaatcagttgctaagaatgaaaaatgaacttacgcttcaaataaaagaatctcttcaactgatgagtagaagaagagatgaattagctcggttaaagcgagaggttcctttagcagatagtgaactaaaaagacttgaacaagaatttttcaaggagtcgaactattgggcatcccctcaagaagcagctataggtgaaatatatagggcaatcggacgactagacgaagaaataaaaagagcttacgaggataagaaacttattgtcgtaatcaatgaattacaagaacgacgtgatgaattacaggctgaaaaaaaaacagactggatgatcttatag

SEQ ID NO: 167942 - DNA, 501 bp, Enterobacter cloacae
atgttagtttatcatccagcgtatgatgcctatcattgtctttttagaatgatggcaattatcgaaagaactggtgaagttgaaatagacaagcttaaaattttggatttttatgttttgtttccatttttattaagcaatgtaaaaatgcctcgccagcatgtgaaaataaaaaagactgccgaacggatttataatgaatatcatgacccactgaatccagagataatttttaaagaaatgcgccatattcaggatgcggcaataaaatgtatgctggcagcaggttatattggatccgatgaactgaatacaggttatgttgtaaggacagataaggaattaccacaaaaactggccttggaaatgaaggaattcctggacaacaaagaacctttttcatccttcattatccaaagcatggctaaatttcatttgattggaccagatggactcaagtctagaactaaactcatggagcatagatatgacattcattaa

SEQ ID NO: 167943 - DNA, 567 bp, Enterobacter cloacae
gtgtttagcaaacaagaacaatctggtaacagggttaatggagggagtattgttggcggggaccaaaaaaattacataactaatattgctcgcagcagtaatcgaactctggatcgcctgtaccaaaaactttcacaagaggatggggtaagtagtggacaggatttttgtgataaattaaaacattatttagcaacagacactaaccctgacatcagagatttagaaacaaaactaacagacagtgacagaaccgaacttatatatttcgcaacggaccttaaagaaaaggcatttaaggcgatattgaagtgtcagtcctccaaaactgcacaagaaatttatgcgctaatattggataaaattcacactgactttatgttgaagatcacaccgcttatacaaggtgaagaagatagggtagttgtcgatgagaaaacatcattaatattagagaatattagtgaaatgttaggtgataacttgttagatttatcagaaaaagatctcttaggattattatatttcttaggtggaaactgtcatataaggtgggataaatgttag

SEQ ID NO: 167944 - DNA, 435 bp, Enterobacter cloacae
atgacttacaaatacagcccatcactcaatttattttttgttgaaagtgccgttcctgggtacgaagcagcaggctggaaacttgacgatctggtggatgtaacagatgaacaatttgatgagttcaatatcgacaaaactctggagggattggttcgtgtggcaggctctgatgatttacctgaatggggcgagatcccgcctcccacacatgaggaggaagtagtggcggccgaagcgcagaaaagtgtactgattagtcaggccaacgactacataaacggtaagcaatggccaggcaaagcggcattaggccgactaaaagacacggagaaagagcaatataaccaatggctggattatcttgatgcgctggaagctgtggacacctccagcgcaccagatattaactggcctgctgctccggcggcgtag

SEQ ID NO: 167945 - DNA, 279 bp, Enterobacter cloacae
gtggatatcgctacgcttgcccgtaaatggggcttaagactgatgaagaccgtctggtttgtgctaataagcttcctgacaggacgcacgctgggcccatcaacagtttatattaatcatgatgttgcagcagctatttgcacattcatctatggtgatgtgaatgcagagacaatgtacgaaacatacattaacaccgatattttaatcctgtttattatcacaacgattctctatctcttaacaatgaagttatttaacaaaataaggaacaaatga

SEQ ID NO: 167946 - DNA, 414 bp, Enterobacter cloacae
atgtcacagacagcgatcacactggcctttgagcagtggaaagcaagccaggcggtaacgggtgaagccgttctgctggatgaatttgtttttgccaacgtgccggggctggatgccactaagcccgttgaccgcaaggaaacactgccacctgccgcgcaaatcgttcaccgccaggccgtcagccgtaaaggtgtggtcaatgaaaatgccgtggttcactccgttgtactgggcgcggaagtgggtgatttttcgtttaactggatcggcctgattaacaaggcgagcaacacgctggccatgattgttcatgcgccgctacagcagaagctgaaaacgaaggatggacacatgaaaaatcgcgtaaccatcctgatgccactactaccgagaagggattcacaaagttaa

SEQ ID NO: 167947 - DNA, 861 bp, Enterobacter cloacae
atgactatgaacaacattgaattgccatatgaagttcgaactgcgtggtgtcatgctgctttagttttgagtaagaaactcgcaataggttcgacgcaggcaaatgacgagctaagaaagcttctgaaagaatttggaagtatagaaaatatttatcaatattttttttcaatggttccagttgatcctgacgtcgaaaaagaagtaaataaagccttttctaaggttgattttaaatttaatgtaattacgtgcatggatgataattatccaagttcaatgaataacgtgaaagggactccaccaatattgtattgccaaggtgatacttctatttttaatttagaaaaaagtatagcttttgtaggtacgagagaattaactgaatcatcacatattctaagtgcaagaaatgccatcaaaagaatcagtttagcgggatatgaagtaatagttagcggcttagcttctggttccgacacgctagggcatcgatcagcgattgaaaatggtatgaaaacaatagcggttttaggtacaccgcttaatatgtactatcctaaggaaaataaagaattgcaaatagatattgcgcaaaataatttggtggttacagaataccccattggaattcgctcttttggcgccttttttgcaaatagaaatctaaccaccgttacactttcaaatatggggattatagttgctcgggctggagataaaagcggtacacagcatgccattagacactgtgtaaaccaaggtaaaccagtatatatactggagaataatatttttgaaagtgagtataagtgggttgttaagtacaaggataaaatcaagttaatcagagataaataa

SEQ ID NO: 167948 - DNA, 1326 bp, Enterobacter cloacae
atgaaagctatattgtttgatttagataatacactttttgctacacaggaatgcaatgtatatctaaggagtcgtgctggccgagaggttgtctgtgatttaataagacagggtagtcttaacgtgacgccacttgatgcacgattgcctggtttcattaacatgcttgatgaggcgaatgatctagatgtatatattatttctgactcgcctaaagattattgcataacgatacttaataaatttggtattactgttagtcatgacaatgttttgggagcaatgcataagccgtgtgtcgaagaggaagttgaagacatattttctgattatgaaaaagtactagttgttggggatacgccgaaagatgtatactttgctcatcgtctaaaagctgcatcagtatttctaacatgcttgacagattatgatatcgatttttcagttaataactccatgccctctgcggttgctaagtcctatatagaattggtagacgttataaatcacttccttcgagatgagttggcttttgaaattccatatttcaaacctcatttcaaaactgttgatgcggatactgcttctatcattgatattgcggacgaaaatatagggttcgcaatgaagtacattcctgaactcgatgatattgataatgaggaagataaatttacatggtttaaaattcatagaagtataaagcctgcgaaaatactgagctattcagatttggatttaaaaaagaaggtttctttctacaataataattccaaaattagcgaaggcgttgcatttagggatgtggcatggtttgctcgtatttcatttgttaaatggttgcaagataaaaatataactgggaaagtatatttggttgctgcaccatcttctgttccgagggagtgtaataaatctcttccgatggagatgctggtgctctggtgggttaggtggttaccacatatttctgaaggaagatttcaggtattaaatggtaactacgtcgagaggttctggccaacaacccccgcccatatgtctaaaggcagaagagagattagacctcatttccacacgttaggagtctttaatgatgtaaaaccatatgatgaagatacatctgcgataattattattgatgatgttgttacatcaggaactcaaatgaaagctgttgcatcgttactgcaaggtacaggaatggtacctcgaggcgttccgatctatgggtatgccttagctaaaacaacaagagctagtgtcagtgatgacttcaccaagcttatggaagcgtttagcaaggctgaaaaatctggtgggtaa

SEQ ID NO: 167949 - DNA, 408 bp, Enterobacter cloacae
atgccattcaaaacggctattaaatggattcatcgccttgttaccatttcgcttctggttttggtcattggatttatgtggctcaaccaccagcccaatcagcgaaatagcgatgagcttctgcgtgtttataaattatctgacagtgtctggctctatatgacggtgaacaatcagggtggcgcaactgtacccaccctctatcgttactatctgtcagcggagatcgcagggaaagaaaccgacattatccatcaactggccatgaagcatccggtcattgaagggacaggtacgattaccgcggccagcataggtaaaaacggagaagtcataatcacctatagcgggaaggttatttcgattgagaacgatatctccgatctccggttctcagttaagccctga

SEQ ID NO: 167950 - DNA, 2595 bp, Enterobacter cloacae
atgctggatgctgcaccatctttgcaggctgctccggctaaacgcccagacgctactcctgcgctgaacctgaccccttctatccagaagactccggttgctggagttaaggccccgattgctacccctgcgttggaactgaccccaaccattcagaaaacacctgtgaagcaggctcaggctacgccgcgtctgccggaagctgcaccgcagttccagaaggcacctgtgaagctgccgcaggccgctccgaaacgggtactggcaccacagccattgaaggcaccaacactgcatccacaggcaactccgaagatactgggcgctgcgccacagcctctgaaagcgccaaccatccagccacaggccgcacctaagctggaactgaccccaaccattcagaaagcacctgttaaacaggctcaggcaatgccgcgtctgtcagaagctgcaccgcagttccagaaggcacctgtgaagctgccacaggccgctccgaaactggtactggcaccacagccggtgaaagcaccaacgctgcatccacaggcaacgccgaagatgctggacgcagcgccacagcctctgaaagcgcctgaattacatccacaggccacgccggaagcgccaagcctccgtctggttagcacccagcgcacccaaaaaggcgcgatggaagcggtttatgctccggctccggtatccgttgctaaagaaagcacagagcagcacgtatcccagactctgcgtactgaaaagggtgcaatggaagcggtttatgttccggaaccagtaaaagtagcgaacgacaacgcccgtccagtccgtgaacaggacgccattggcactaaggctgtccacctgcaagcggctccggttgtactggctgctgctccggctgcggctccaggtactgcatcagcaacggctattgctgcccagccagcagtaactaatattgctcagttgcaatctaacctggatggtgcaaaacagttccagtccctgcaaaacacgcagatcctgaaagatatcgcagctgcgcaggccgcaatgaaggctccgaacgctacaccagcccagattgccagcgctaaattgaccatcagccttgcccagcagcagcaggccaaccttgcgagtcatgtggcacaggctcagacggctattactaactacaacaaagcgggggccgctgttcaggcccaggcgcagattaacaaggcccagcagccccagaaagccctgttgcagtcccaactgcttgcccagactgggcaggctaaacagcaagcagcctatgtgactaaggccgagctggatcaggatcaggcgcttcaagactcgaaagcgaatgcagaacatatcgtgcttgagaaatcaatcatgggtgaaagcagccgcgctgttcaggccgaagcagccaacgcaggcgagatcaaagtaaataccactgcgatagatgaccacgaaacgcgtatcaccgccaacacaacccgcatcagcacccttgaaacagataaggctgacaaatcaaacgttgatacccagttcgatgcggttcgccaggacttagctaagaaagccgaccagagccatgtagatactcaggttgacgctgtgcgcaaggctctgactaacgggctggctgacaaagttgataacgcagcattcctggcttcccaggatgcgcaggatacccgcctgaccaaccttgaaaacgccccagtgccaaaagacggcaaggacggcaaagatggccgtgacggtattgacggtgcgcctggcgcggcaggtaaagacggtaaagatgtggatccggcagtagcccagcaggttactaccaacaccaaggctatcgataccaacaccacccagattgaccagaacaaagccgatatcgcggtcaacgttctgaccatcaacaccaacaaagatggcgttgctaccaatggcaagggcgttgctaaaaatgcctctgacatcgcgctcaaccacgatcatgcccaggtactggctaaaggtgagctgactgttggcaagttggccgttcagaacaacaagctgatcgccactaaccagcaagccctgagcaaacaggcgcagaacttcaccgctctgcaaactcaggttgcgcagaaagtggataccagcgtgttccagcagcgttcctcagtagttgaccagcgtttcgcagataccgatgcgcgtatccaccagcagaaagttgagcagggcaaaaccaaccagaaggttgcagacaacagcaaaaagctggctaaccacgaagcgcgtatccaggacctggaatccaacaaccagaccaacttcaataagctgcaaagccagcagaataaggatcgcaaagagttccgcgcgggtgtagccggtgctgttgccctgactcagatccctcaggtacaggctgaccagtccggtagctttggtatggccgtagggacgttcaacggggaaaacgctatcgccgctggagttagctcccgtctttccggcgctgtaaccgtcaaatctggcctgtcctgggacactcagggcaacgtaggggcgggtgctggcgtgtccgtaggctggtaa

SEQ ID NO: 167951 - DNA, 234 bp, Enterobacter cloacae
atgtcggcgctggtggaacggctgctcaccgaaatggctaacatctttaccactacgtacagcagaaacgaaaacctcagcgtcgttaaagttcaaaccgaggcggcgcatagctacatcctgagcgcgagcaaattgagcgccattcggatcgttcagtgccgttttaatttcttccaatgctgccgggaaaccgttctgagaagccaggccaccttcgatagcgaacgctga

SEQ ID NO: 167952 - DNA, 687 bp, Enterobacter cloacae
atgaaaatttgtttttttgatatggaggggactttgcttgaaaagaactcatcttttgataatgggaaggttgcaccgagcgcgtggacagtacttgcaaaagaaatcagcgaagcctgttttgttgaagaagaaaaaacaaaagatttatggctagcaaataaatacatcagttacacacaatggatgaaggaaaccgtagaaatacaaatcaagcatggtatgaataaaaatcatttacaaactatattatctcaagcaaagatacaaagaggtgcggtagagcttattcattctttgaaaactcaagggtatttaacggtattgatatcgggaggatttaaagaattggcggacttgactcaaagacgcctaaaaatagatcatgcatatagcgcttgtgagtatttctttaatgatgatggtagcatcgaacatttcaatctattaccaaccgatgaggaaggtaaattagttttcatgaaacaccttgcgtccgaatataattcagaacttgaaaattgcattttcattggcgatggaaaaaatgatgtgtttatcgccaaaaatgtaggtacttccatcgccttcaatgcacaacgggaattaagagaagtatctacatttattgtagatcaagaaacacctgatttatcagtgattattgaccttattagagctctttga

SEQ ID NO: 167953 - DNA, 834 bp, Enterobacter cloacae
atgcaaattagtgctcaaaaagcaattgaatatggattcgtttgtgacagaaataataatagaatcacaacagatcattctagtaaatcaagtgtggatctctctatcagagaaatcctttttaaagatgaaaaaaatcaggtaaggtctctcggaagaactttattaaaaccgcaagactcggcttttgtaatatcagaagaaatacttcatgtaccagagggctttattgcatatgtttttttaaagaatagattgtctcaaaagggctttcttgctctcaatactggtattatcgattcaggatataatggtccaatttcaacattgctaattaatttttcagcagtagaggaatatcttccaattactgatagcgagcaagataaatctttctttagagttgtgtttcacgaaattgaaaacaatccaaattatcaaccgattcctcctgcacctggttcttatgatgttgcagataaatataatacatataggacttaccgtgtttcagatataactaagtttccaaaaacttttttagaacccgtgatcctaaaagaacaaataagcaaagagttaactgagaaattatcaagtatatccatagctaaaatagggatggtaatcgcttttgttgggttattcctctcacttattccttttggcagagattactatttcgcagaaaaatttgatttgaatgaatttaatcaatataagttgcagtccgaagccaaaataaaagagttagaagaacaactggaaatagttaagggtaaaattggcactacaaacaaatcaaagagctctaataaggtcaataatcactga

SEQ ID NO: 167954 - DNA, 855 bp, Enterobacter cloacae
atgtctgccgaaaaaaaaattgaagagataacatgtggctatgtgatgccaatagcaagaaccgacggatatcctgaaagccactggaaggatgttttaactattttagattctgtaacatctgatttaggaattagtaaaaaaagaatagttagcgatggtgataccataacaaccatacactccagaatagttaacaatcttaatgaagatgacattattatttgtgatgtaagttcaagaaatccaaatgttatgtttgaacttggaatgagaatagctttcgataaaccagtaattataattaaagatagcctaacagactattgttttgactcagggactatcgaacatttaccgtacccgaaagacttgcgttatggagaaatacaaatcttcaaagagaaacttaagaaaaaaatagttaaaacccatgaagagtttattcaaaatggagacaaaggcgtaagccctattctgaaaaactttggttcctttgaaagaaagaaaataaaacttgataaacttagtgctgaagaagctttaatacgagatattgactcaataaaaagctcattattacatatacaaatgtctgctcctttcatgatgaatcctatgaaagaaacaaacacagaagtaaaaatcaatcctacaatgttttctaaatttataaaaatcgaagtcaaagatttcccttctgaaaaaatgaacaatcttatttcacttctagaatcagaaagattatcttttgaattacatgatgagggttatttaaaaattaagacaaccaattcttctgaaagacaacgagcccaccaattaattagttttatcaataataccccgttttaa

SEQ ID NO: 167955 - DNA, 144 bp, Enterobacter cloacae
atgcaggagcatgaccggcctcagggtgcgccagtgctggcgctggcggggaattcagtgtcgttaaaacgcatgcaaaaccatgcaccttatgcatgcatggcttttatacgtaaaaataaagggattttcgtggatttttaa

SEQ ID NO: 167956 - DNA, 909 bp, Enterobacter cloacae
atgccttttctaagcatcatcatagccgcgcataatgcccaagagacgcttcacgctacgttcgaaagtttgctgagtgctgttgataacgcaggaggtgacgtggaggtcattatatttaatgaccaatcagatgataacactcaggatattattgatcagtggctgattaagctacccaataccatttatcgatatgttgaatatagtaacgttggtcttgttcggcaaagcgcagtctcgcttgcttcgggtgaatatattacgatgttagatagtgatgaccgaatgaagccccgcagcatcaaagatgccatcgcttatttaaaggtacatcgcccagatatgttacttacgcacctgctggagattcgtgacctcaagaaaataacttctatctggcatggattttcccccgttccagtatcacaaagtgatgcaataaaacgctttttgcaacataaagactttcaggcacatcttattgggcaattcatacatcgcaaactgtatgagagcaaccccgtaccttcgatgaaatgctatgaagattttgctgtttttcccggcatgctgatgcagtcaagtaaaatatattttcagcgtaatggtcattattattacatcaagcgtagcgacagtttgtcgagtcgtatggattcaagcaaagtttcagctcttattgaatgcactgtacagatggaaaggacgtttcctcagcactataagcacctcgtcaattgccattggtttgatatctatagtaatcatcgaaaatatcttacaaatcaacagttgcaaattgttaaacatcgagtgaacgcgctttattcattatcttttttcttttccggcgatgttcgttttagttacaaaaaaagggttattgaggcgttatggaaaaaataa

SEQ ID NO: 167957 - DNA, 2649 bp, Enterobacter cloacae
atggaaaatccagccatcctgttacgtcgtcttaacccttactgtgcccgcgcgatggaaggggccgcttccctgtgccagacccgcgcccatgcggaaatactgcctgagcactggctgctgaaactgctggaacagggtgagggcgacctgacggtgctggcgcggcgctacgaatgggatatggatgcgatatggcaggacatgctgggttttctggacagtctgccacggtcggtgcgcagccgtccgcagctttcggagagtgtgcagactctgatgcaggatgcctggctgcacgcctcgctgtctggggaagaacacatccgcagcattcacctcctgatggcagtggtggaaaaaccgaagctgctgcgctgcgacggcctgtggccgctgctgacgctggcgcagagccagcttgagcgcctgcgtgggcttctggatgcgcagtcggatgaacgtccggaggtgcagcaggaagcggaactggcgcagggcgatgaggttgagtttgttggccgcccggtaaatgcggatataaaaggagagctgaacccggccttgcagaatgcgctggacaaattcacccttgatgtcaccgcccgcgcccgtgaaggcaaaatcgacccggtgtttggccgcgacaatgaaatccgccagatggtggatatcctgtcccgccgccgcaagaacaacccgattctggtcggcgaaccgggcgtcggcaagaccgcgctcgtggaaggactggcgctgcgcattcatgagggcaatgtgccggacgcgctgaagccggtctccgtgcgcacccttgacctcggcctgttacaggccggggcaggcgtcaaaggcgaatttgaacagcgcctgaaaaacatcatcgaagcggtgcagcagtcaccctctccggtgctgctgtttatcgacgaggcgcacaccatcatcggcgcgggcaaccaggcgggcggcgccgatgctgccaacctgctgaaaccggccctggcccgcggagagctgcgcaccatcgccgccaccacttggagcgagtacaaacagtatttcgagcgtgacgccgcgctggagcgtcgcttccagatggtgaaagttgacgaaccggacgacgacaccgcctgcctgatgctgcgcggcctcaagtcacgctacgcggagcaccatggcgtacatattaccgatgaagcggttaaagccgccgtcacgctctccagacgctatctgaccggacgccagcttccggacaaggcggtggatttactggataccgcctcagcccgcatccgcatgagcctggatacggtgccggagccgctgacccgcatgaaggcgcagctcacggcccttgccatggagaaacaggcgctgctggaggatatcgcggtgggcaataccgcgcatggcgaacgactggcggccattgagcaggacgaaatccgcatcatactggaactcgacgaacgggaaacccagtacggccaggagctggcgctgacgcaggaactgcttgcctgccgcactgatatctcccgtcagggagagattgcggacctacagatgcagcttactgccgtgcagcaaaataccccgctgctgggccttgacgtggatgcgcgtacggttgccaccgttatcgccgactggacgggcgtaccgctctcctcattaatgaaggacgagcagacggaactgctgagtctggagcaaaacctcggcagacgggtggtcggccaggacagtgcactgaacgccatcgcgcagcgcctgcgcgccagcaaaaccggtcttgcaccggagaacggcccgcagggcgtgttcctgcttgtggggccgagcggcaccggcaagaccgaaaccgcgctggcactggcggacgagctgttcggcggcgagaaatcccttatcaccatcaacctctccgagtaccaggagccgcacaccgtctctcagctcaagggttccccgccgggctacgtgggttacggccagggcggcattctgaccgaagctgtcaggaaacgcccgtacagcgtggtactgctggatgaagtggaaaaggcgcaccgggacgtgatgaacctgttctaccaggtgtttgatcggggcttcatgcgcgacggcgaagggcgggaaattgacttccgcaacacggtgattctgatgacctcgaatctcggcagcgacctcatcatgcagatgctggatgagcagccggaagcgacggaaactgacctgcatgaactgctgcgcccggttttacgtgaccacttccagcccgcgctgctggcgcgtttccagacggtgatttaccgtccgctcacacaggcagcgatgcgcacgattgtcggcatgaagctcggccaggtgagtcagcgcctggcccgacattacggtatgacaaccgacatcagcgacagcctgtctgacgcgctgacggccgcctgcctgctgccggacaccggggcgcgcaatgttgacagtctgctgaaccagcagattctgccggtactgagccagcagttgctgagccatatggcggcagggaagaagccgcagcacctgatgcttggctgggatgaggaggaggggatcgtgctggagtttgatgaacaaacggaaggagaggtgtcatga

SEQ ID NO: 167958 - DNA, 762 bp, Enterobacter cloacae
atgtcgctcagtccctctattgcctataagcttaatgacaggttatccattggtggatcggtaaatgtgaactatggtctgctgtcgctgacccgaaatgttaataacaacgatgaaacggaaaaggaccatgactgggcaacgagctatcggcttggtttgctgatggcattgaccgatcaaacccgggcaggcataacctggaccagtaaaacagaatatgattttaatattgacggtacggcccgttttcccaatttacctaatacagaatatgacttgcccatttccgcgcaggtcagaacaccgcaacaaattatgctaagcctggttcatgaccttaatcagcaatggtccgtcatgggcgatctcggctggcaggactggagtcagtttggcagtcctcagatcagggtagcggggcaggatgttgacaaacagaaccgtttaaaggattcgtggcatgctgcgttgggtatgcagtatcgtccaacagaacagtggcgcctgaacgccggtgtcgcttttgacagcaccatttatgaatcgcaaagcgatgtggcgatgacgctaccgaccggggacgaatggcgttttgccaccggcgcgcaatatcaggtgacgccgcaaagtaatgtgggatttgccgtttcatatttgcatatgcagtcgtcgaaggctcaaacgcctgaacaattgaaaggtcggtttgacaatccttacttatggttcgccagcgtcaattacagctatacattttaa

SEQ ID NO: 167959 - DNA, 921 bp, Enterobacter cloacae
atgaaaagcgagatgaacagtattcctgtttttgtagccgcagctgaatcttccagtttatcccaagccgctgaaaaaattcacgttactcgatcggcggtggcgaaaacgatatcccggcttgaagaaaggctcggagttaccctttttaaccgtacaacccgcagccagagcctgaccgacgagggttcgctttattatgagtcctgccgacgggcactgaatgaaatacaattagcggaggacattctggaaagtggtaaactccaggccagcggaaaactgagagtctctgttccggttctgctcggacatctctgtatctctccgttattgtcggcgcttgcaaaagagcatccaaaactggaactggaaatttcgttcagcgacagacaggttgatttgtctgaagagggttttgatttggcggtcagaatcggcacgctggctgacagcagcagcctgatggcccggaagctagcctctcacactatggttttttgtgcttctccggattatctcaggcaagctggcgaacctgcttcatcagacgaacttaaacaacatgctgctgttgcatacatccactcaggccgcattctgaaatggcagataagaaatgaaaaaggtgaaattgcagagataaatcctctctcccgaatcatgatggatgatatgcaggcggtaaaagatattgccatcacaggtggtggaattgcctggcttccatactggcttgtcagagagcagctcatcagcggcagtctgaaagaaatattaaaagatcggtcttcgggaagctggcctatatatgctgtatggccacgcacgcctcacctttctcttaaagtcaggctcaccattgataagctggtaagtgcactaccaacaatgatggctgcggttgaagccaagatataa

SEQ ID NO: 167960 - DNA, 1026 bp, Enterobacter cloacae
atgaaaagcacaatgagacgctggatgttaagcgaaaccggacgacagaatctgaagcttacggaagcagaaatacctcagcccggcacgggcgacgttctggtccgggttaatgccgtctcccttaactttcgcgacaaagtgatcatagaaggcggaatgggtaacggtatgcctatgccttttacgcccggttctgatatggccggtgtggtagaggcagtaggtccaggcacaacccgctttcgccccggggatcgcgttatctcctctttcaacgccgactggattgacggaaagctgaataacaacgctaaaaacccgcactatgacacactgggatatgcgtttcagggcgttctggctgaatatgttgttatcagtgaggattggctggttaaagctccagagacgcttaccgacgctgaagccagcacgcttgtctgtgccggactgaccgcctggtttgcactgattgagcgcggcgctcttcgtgccggtgaaaccgtgctggttcagggaaccggcggggtggcgctttttgctcttcagatcgccaaagctgtaggggctgaagtgtttattacctcatccagcgatgagaaactggcagctgcggcggcactcggtgccgatcacggtatcaaccgtaacaaggaggactgggttgaagccatttaccgtctgacgaacgatcggggcattgatcacgttgtggatacggtaggcggtcgtaactttgcagactctgttcgcgcggtggcatcacatgggcgtatttcccttatcggcatgatggacatgcacgatacagcagcccccggagtattactgctgcttaaatctccgaccattcagggcattggcgtaggccatcgtcgcgcgcttgaagacctggtccgggccgttgatttggtcaaactaaaaccggttatcgacaaatcatttcgcttcgacgaactgccggaagcactggatcagcttgaccagggggcgttcggaaaaatcgttatcaacgtgagctga

SEQ ID NO: 167961 - DNA, 1128 bp, Enterobacter cloacae
atgaaatttaaatattgcactttcttttgggggatcctgttattgtggtggagccatactgcgcttgctgcctgttattttgatccgacatcttcagtgcagcaggcattaaccgttacggtacctcttcatattgccaacgtaaccgtgggcccggattatccaaatggttcggtggtgtatcgtcaggcctatagcccgtcttttgcatcaggaagcaatttacgtataacctgcgatactgccggacagttttacattaataaaacactgccgattatacctcttccgcgctctggctggaatgcagacccctacgcagggaatatatatgaaaccggcattcctgggctaggcgtggccattacttatggtggctattcttacgttaacgggcagcctttccctaatactgtacaggcatgtgcaggcgtagccgatcatacgtcgtgtgacgttcccaatacgaattttgggtttgtacttaccatcatcaaaacgggtgtggtctcaccgggcacattatcgggcgccagtttgccctgtgcaaacattgccatgggaacagcaggtaacgacgttgacgtggtacatgcctgttttagtggtggggtgaatattgtctctaaaacgtgccagaccccggacgtttatgttgaattaggtacgcacgataccaccgagttttcaggacaaggttcggcaacacaatgggtgaatgccaatattcaccttaaagactgcccgatattttatggggaaaatcggttcggaggaacgtggtccgataacaacgtctatacccccgatcgggcgactccaaatcaggtctggtttcaactgacgcccaccacgacgattttagatagcgtgaatgggattatggacgtcgataaaagtgatgataatgccgcagagggaattggaattcagatagcgatggacagctcaggcacgatttctcctctggatttcaataccggtcatcttgtggatctcccgacgggacagcaaacggatattacgttacctattatggcgcgatatgttcaaacggcgacgtccgcgagagaactcaaaccgggcattgctgacgggaagttaactttccttattgactatttctaa

SEQ ID NO: 167962 - DNA, 2622 bp, Enterobacter cloacae
atgaaaaaaaacaaatcgaaatacctctcccgtaaaatcattgttaccaggttatctccactttgggttgctatgtctgggctgagtgggcagatcggcgcgacggcgttgccggtagcgcagatcgcaaaaaatgtgcagttcgattcgtcatttttgcagctggaaaacgtcaacgcggtagatttaaaccgatacgcaaatggtgccagcattacgccaggaacctataacaccgcagtctttgtaaatgggcatgccgtgggtaacgtggatgtagaaatgcgcgagcgagaggacaaaaccgttttcccgtgcatgacagcgtccttattaaagcaaatcccttttcgttacgaacatttgcctgcccatttttttgagaaggcgggtgaatgtggtgatttacacgccttgcttccggaggccgtcacgcgatatgacagcaatgagatgaggctggacattcagcttccgcaactgtatgtctctgatacggcgagaggatcggttagcccggcgctgtgggacagcgggatcccggctgccatattaggctataaccttaacggttatcaaaacacgtcgaacggcatcgagaataagtctttttatgctggcatcaatgccgggctgaatatcggcgcatggtatctgcgtcataacggcagttataactggaacagcaacggtttcgaaaaatacgacgccattaatacttacctgcaaagagatattcccgcgctgaaggcgcgcgcgctaatcggtcagtcaaatacccggggggatgtgtttgatacgctgccctttaccggcgtcgcgttggcaacggacgagcgtatgctgccggaatcccagcgcggttttgctcctgaaatccggggcatagcccgaaccaatgccaaagtcaccgttcgtcagggtgatgcggttatttatcaaaccacggttgcgcctggcgcattccttatagacgacctttaccccaccggctatggcggcgacctgctggtgacggtagaggaggctgatggcactcgtcagtctttcagtgtgccttatgcggctgtggtagagcagttgcgcccgggtgcgacccgttttgaactggtgggtggtgaactccgcaacgattttatctcacacgacgtcgcgctttatcaggggacggtacgtcatggcctgaccaatctgctgacggggtatggcggtatgcaggtcagtcagaattactatgcgctcctggggggagtcgctgtaggtacggagtatggggcattttcctttgatgttacccaggcaaggatgcaccttcaccagacggaaaagcaggccagctcgggccagagctatcgcctgagttacagcaaaaccgtcagcgaaacgcagagcaatatctctgtggcggcttaccgtttctcctccagcggctttatggattttatgaccgcgcagcagacgctggaggccatcgagcggggtgcctcagaaaatgccatttcacgatcccgcaacagattcagcgtcaccgccagccaggggttaccaggggcgtgggggcagctttatatcagtggttccgtgcaggattactggaataaaacccgttccgacaagcagtaccagatgggttacaacaacagttatggctccgtcagctacggggtgtcggtaggcaggacgtacagcctgaatggcactgaagatacctggctgctgaccatgagcatgccgctgggccgttcagacagtacctaccgtccacagttgtcaacgcagctgacgcatgacagcaccgggcgaacgggagaacaggcgacgttgtccggtaccggtggcgaagagcaccagttcagctacagcgccacggcgatgaacgcaaaccaggggatgggagcctcgggtgcactcagcggccagtatcgaacacagtatgcgaaccttagcgccagctggagcggtgggcgcaactaccacagtgaatcccttggcgctaacgggaccatcgtggcccatcagggcggcgtgacgctgtcgtcatacacctctgatacgtttgcgctggtagaggcaaaaggagcaacgggggcatccgtatcgggataccctggcgtccgtatcgaccgtttcggctatgccctggtaccgtatctcgatccctatcagatgaacaacgtgattctggatcctaaaggggccagtgatgaagttgagatggtgaacacagagaaaagagtggccccgtattttggcgcagtggtgaaggtgaaatatggaaccaaaacgggatcgccggtgctgattaacgcgacgcttaacggacagccggtgccatttggtgccgaggtgcttgacgagaagggccgcagcgtcgggaatgcgggacagggggggcagttatacgcccgcgttgaacaacagcagggatcgctcaccgttcgatgggggcaaggtaatgatcagcagtgcgaaatccgctatcacctgatgccggtcagttcagcacagaaaaacacgcatattcagacgtttaattctgtctgcaagccacaaatggaaattcgtcctcgttccggtgacgcacttgctatgcaggtcgcgaccgaacgtcctcactcatga

SEQ ID NO: 167963 - DNA, 327 bp, Enterobacter cloacae
ttgaaaaaaaataattacctccaggtggcgtttcgttcgcgcataaagtttttttatcgcccgtccagtctgaaaggtagcctggctgaagcggcaaaaacattgcagtggacacattcaggcaaggggcttcatgtgaaaaacagctcaccatatcacgtttctctggttcaggtttcagtgggtaagaaacacgttgatggaaaaatgcttaagccattttctgaaatggactatgcgttgcctgcgacaagcggtagtcagctgaccgcgagttacgtcaatgactacggtgctgttattccagtgaaatttaccctcaagtaa

SEQ ID NO: 167964 - DNA, 372 bp, Enterobacter cloacae
atgatccgtaaatttattttttctttagcgctgttcagcaccgtagcgcaggcaagcatcgttattactggcacccgagtgatatacccggcctcttcaaaagaagtcacggttaaagtcagcaataaaggcgagtcgccggtgcttattcaaagctggctggataatggcgatacaaatgctaaacccgacaaaattaaagtgccttttgtccttacgcctcccattaatcgtgtagaaccgtccagcggccagacgctgcgtatcagagcattacccaataatttatcccaaaagcaggaatccatattctggcttaacgtccttgagatacctgcaaagcctaaagaggatgtcgttgaaaaaaaataa

SEQ ID NO: 167965 - DNA, 555 bp, Enterobacter cloacae
atgaagaaattaatggcatctacagctctgatggcgttgtttacagtcgttgcatttaatgcgcaggcggcatcaaccggtacgattaccttcaacggggaattaacggcgaccacgtgtgacgctgatgttgatggtcagggaccggatgcgacgattgtattacctaccgttgggacaaatcagcttaccgctgaaagccagaccgctggtcgcaccggttttaatatcggactgagcaactgcgcaggaaccttacagactgcttctgcattttttgaagctggctccaccgtagacctgactaccggccaccttaagaatatcagttctgacgctgcggccgccactaacgtcagcctgcaactgcttgatgaaggtaatactgaagccgttatccaggcgggtaacagcaatcagaccgcaaacaccagttactacgatatttcttccggttcggcaaatcttccttatgccgttgaatactatgctgacggtgcaacgactgccgggccagttgtcagcaacgtagtctactccatccagtacaagtaa

SEQ ID NO: 167966 - DNA, 591 bp, Enterobacter cloacae
atgaaaagattgctgtttatcagcgataatatcttcttttgtgcgggagtggatagcaacgttgcagatacccggatagtaggaggagaaagcgcgaattcaacgaatatcctgcttaacgatgatcaaattccggttgtcagagtaagcaatcttaccctaaggcgacagataattgagaaaatacaaagtattaccgataaatatatcgtcacgctggacgagatttatccccgaagttcattcaagttaggtgatgtgcttttttgcgggaatctgctgagctacaggaatatcatcaaattttttgagtgtaaccgtaaaagccactttgcgaaactaaccgaccgtgaattagcggtgttgtaccgaatgcataatgataatgcgcaaattgctgaagagatgaatttatcggtcaaaactatcagtcattacaagcttagtatcctggaaaaattgcgtgttgacatgaaaagcaatataaacctgttaaaggttaaactgacacttgatcaggcctatttgtacagcgtcaatgacgagctctaccatttctgccagatggatgaaactgaattcgcgttttaa

SEQ ID NO: 167967 - DNA, 909 bp, Enterobacter cloacae
atgcgcaattcaaaggtgctaatgataacgcaaatcaacttaaaggctctgaaagccatacatatacttaccacctgtaggagcgtaacgcggacagcggagttaatggatgtttcaccagccacgataagttacttacttaacaaggtgaggaaagcaacaggctcagcccttttttgccggaccaagaacgggatgatacctgacagtaccgccctcgagttgagtcagcgatatacctcaattattggtgaactacctaataatgatgacggtcaacctcttggaagtagaaccctgacgataagcacgtatgcgctgattgagctgatgctgtcgtatcagttaaaaaattccatcctttcgcccaaaacgttacgttttattccacccgaaatggatgatgaagcgagactgatacgcctcagaaataaagaggtagacatggacattggttccaggttgccgcccgatcgcagcattattcaggttgattttatatcctgtgatattgcgatcattgcaagtaaaaatcacccgactatcaaagatacctttacgatgaaagactggtatgaaaacaagcacattgtctggtcacgaggaatgaatctggtctgttccaacatcgaacacgctaaccggtttaacgaattagtcaatctcagggatatttctgtcacctccagcaattcattaaatatgattacactgtgctgtttttctaacgatattgtactgatgccgcgcgatattgtctcattcattgaaacatgcttccctgtcaaagctttcgatccccctgaggagttacgtatgcgctttgattgtagtttgcattaccatcactccgtcgctaacgataaatccatggttgatttattaagcatgatcaaagaactaaattaa

SEQ ID NO: 167968 - DNA, 189 bp, Enterobacter cloacae
atgaaacgtacagcagagtctaacccttcaagacgtatcccatccacaaagcctgtagtcgatgcgaagccatactctgttgcctcgcatcatccgtctgacgcggatcgcgcatttatacgagcaatgaatgagtttgtggagaaacatgggactataactgatgatgattttttcaaggtgctttga

SEQ ID NO: 167969 - DNA, 255 bp, Enterobacter cloacae
ttggaattaatcaccgacatctcctactggacggacgccgtgggccagatcccattttccgttgacacctaccgtagcactcagagcataactaaaacagtacaaaacggaattgaatggggtgcagatacaataacaggggatgtggactattccaacgagtataaaaatcatttcgtattgagaggggctttatttgctagtaaaaattttacatataaagcaaaatcaaccattatttctgaaaaaacttaa

SEQ ID NO: 167970 - DNA, 228 bp, Enterobacter cloacae
atgactgaacaatcagctttaaccaatgaaaccccacattcaacatatgatataactgggttgttaatgcccgctcgagcattttttttaccgttgttgatgagccaggtaaagatggctacttggttaggaaaatatatgcttcaaattctgatccttacctttcaaaaatggatttatcagaggcaaagatgctttctgaaactaatccagagcgatatggtttaa

SEQ ID NO: 167971 - DNA, 1137 bp, Enterobacter cloacae
atgattaccattgaaaaaacaaagtatccaatggatgatgacctggtgagacgcaaactgttctggttgttacagcgactgagtagctataccctttggcagcgcaaacgggatgcctggaactattttgtgcagaaatatgaagaagcgttaaagacttggccggaagaaaaaacagatggttttcatccaaagaatattatctgggcctatgatgcgctacgtctctatgacgaagggctcgctgaactggctatgggaaaccgacaggtgtggcagcgtcagacaggggcatttcatcaattagcccgtccggttggattgatcgaaagctttttttatcctctttgtcatgaacgaggagctcagcaagaaccgtatccgccagaagtcgaaaaactcaataagttaaagattgcagcaaaaatacgcggtgattatctaatgtatccaccgcatgacaaagtatgcaatgttttcgacgctgcatatttattggaagctgataactatgaatataatttaaataagttagcgtacccggtatttccgaagaacctctcaccggttcctcaacgcagtgatatcattattaaaaccgatgacctggtgccttgcgacggcatctgggaaccggtaaaaattaattacaattataagctattgattattaaagatggagtcggtggattcaaaagtctcggcgcttataattattttatccgtggaatgaatgctcctcgccaggtgtattacgacgtattaattgaaagtgacacagaaatggtcgtacccgatgacccaatccgttaccgggacgttcactggcgtctggtctgggaagacacgcgctactgtgacggaattattcccgatgaatcagaatactttctggatgatgcgccaggcaaacgcattacctgcccgagcggggagctttgcccgcattcaggccactgggcgaccatagccggaggacatcagcagtttattgatgttcaggccgggcagttgatgccagaagcaaccaaatatcagagtgatatgtatgcagatgaaattcatcttcctgtgatatggagccttttacaccgggatgatgaggggaatgtttatataaaaacaggggatagttaa

SEQ ID NO: 167972 - DNA, 738 bp, Enterobacter cloacae
atgtccgctccggaagggatggccatgaccagtggggaagatatgcagctggccgctggccggaacctggcgcttaatgccgggggcgatatcagcgtcggaacgatgggcaatctgaccacactggccggagagaaactggggctctttgcccgcaccggtcagctgagcctgaaatccggagagggaccaatcgatgtccaggcgcagaacgccagcatgcgattgtttgcggagaagaagctgacgatgagctcagcgggtgacatctcgtttgcggggaaaagacgcatcaccctgattggtggcggaagctacctgcgactggaggcggggaaggttgaatacggcacgacagcgatgtacctgcgcagggtgaagcggacgatggcggcggggtctgcgtcacagcagccggaaatgccctggcttgccgacccggttaaatcctctgccagtgcgctgatgcagtatctgtatcacgacgatatcccggtagtgggcgcgtctttcaaagcgactctcgctgacggtactgtccgggaaggtaaccttgatggtgcgggatatctgcatctggaagacgtgccaccggggagtgtgcaggtggagttcgggccggatgcccggaattatttacgtaaaaataagaccgctaatcagttgtttattggaacatctctcagcgaggcagacattgactcactgatagcgaagcacagcggaggtgtggaatga

SEQ ID NO: 167973 - DNA, 237 bp, Enterobacter cloacae
atgtctactcccgcacacttatggcttgaagatgagaacggtttgccggttgtcggtagctgcatgataccgctgcgcctgggctctattgaattaaaatcattctctcacggtgtgaccatcccggttgaccccaattggggaaaactcactggtactgttcacaacggtagcgccatatctgtcacccaacggcacgagcagtactcacctcgaaacgctcgaattgcgctatga

SEQ ID NO: 167974 - DNA, 213 bp, Enterobacter cloacae
atgcgcagcagcaatattttctccggccagcaggacgatcgcctgcaacgttacgtgcctcaaaaagaccctaccgctatcatcaccttcgccacccgcattccttgtaacattctgttttcatttggctggaaatccccgacccatttcccgtttaaaaattatggaaaggatatttatccattcaacgcagaaaataatattggggaataa

SEQ ID NO: 167975 - DNA, 189 bp, Enterobacter cloacae
atgtgtgggcgcaaaaaagccgggtggcggctacgccttacccggcctacgatccgtgcttttgtaggcccggtaagcgcagcgccaccgggcaacagaaccaatcagtacagttttttcgcgcagtccagccagtcacccttgaacggacgcttcatgttttcaatggcgtcgatgatgtcatggtga

SEQ ID NO: 167976 - DNA, 549 bp, Enterobacter cloacae
gtgaaagtaattgaaacatctatctctgatgtaaagatttttgagccaacagtttttggcgacgagcgagggttcttttatgaaagctttagccaaaaaatgtttaacgaggcggtaggacaccatgtcgattttgtacaggataatcattcaaaatctagtggcggggttttgagaggattacattatcagatgcctccttacgcacaagcaaagctagtacgctgcattgttggcgaggtttttgacgttgcggttgatgtacgcgaagcctcaccgtcttttggtcaatgggtcggtgttcatctgtcagcaacaaataaacgtcaattatggatccctgaaggctttgcccatggtttcttaacactcagtgaaaacgcagagttcgtatataaaacgaccaactattatcataaagaatcagaagccggtgtgatctggaatgatccagaattaaatattctttggccgctgggtgaattgaatattgctctatctcaaaaggatgtggaattaccaattttcgcatctgcacgctatttctga

SEQ ID NO: 167977 - DNA, 1011 bp, Enterobacter cloacae
ttgctcacccttataggtgatgaagtcctcaaacgcgatagtctgtgcacgaataaagcctttctcgaagtcggtgtggattttaccggccgcctgaggcgcagtcgcaccgacagggatggtccacgcacgcacttctttcacgccagcggtgaagtaggtttgcaggttcagcagttcatagcccgcgcggatcacgcggttcagacccggctcttcgagacccagctcggccatgaactcttcacgatcggcgtcgtccagttctgcgatatcagattcaacggcagcgcaaaccgctaccacgacagacccttcagcagccgcaatttcacgcactttgtccagatacgggttgttctcgaaaccatcttcgttaacgttggcgatgtacatggttggcttcagggtcaggaagctcaggtatttgatcgccgctttgtcttcgtcagtcaggtttttcagcgcgcgcagcatgcccgcgttttccagctgtggcagacatttttccagcgcagccagttccgctttcgcgtctttgtcgccgcctttggctttcttctgcacgcggtgaatggcgcgctcgcaggtgtcgaggtcagagagggccagctcggtgttgatgacgtcgatgtcgtcagccggatccactttgttgtttacgtggatgatgttgtcgttctcaaagcagcgcacaacatggccgatcgcttcggtttcacggatgttggtcaggaactggttgcccagaccttcacccttggatgcgccttttaccaggcccgcgatgtccacgaactccatggtggttggcagaatgcgctgcggcttcacgatttccgcgagctgatccagacgcggatcgggcataggaacaacaccggtgttcggctcgatggtacagaacgggaagttcgccgcttcaatacctgctttggtgagcgcgttgaacagggtggatttgcccacgtttggcagaccgacgataccgcatttgaatcccatttctaa

SEQ ID NO: 167978 - DNA, 243 bp, Enterobacter cloacae
atggcaacagaaagaatgacaatcggtagtgagccagttcaaataacgaatggtacgaatagcgcactggtaacggttctgggcagctatgcaatcagttttgcggaatctgacgtatccccggatataaatgccggtgactacctcagggacagaatggtaattcatccgccgctgaaggtatgggtctggaacgcaaatccaggaacgttgaaaattgctgtgacacgctggacggactga

SEQ ID NO: 167979 - DNA, 279 bp, Enterobacter cloacae
atgattaaatacctgtgctttcctgacgaattcacagctcgtaaaacgactggctggtggtcgaaaaaatcaggctggatagcgccaacacctcagcttcaaatagcggtgcgtggcgtgttgtacagcgatgatggtgaatatgatgccgacggaaatgtgacgacacagccaaaggctcttccggggtttcatgttgatgtgatttacggcgtgataccggaggctgcgcagaaatttatcatcaatccatcaacacctgaatacgtactggcgtag

SEQ ID NO: 167980 - DNA, 936 bp, Enterobacter cloacae
atgaaaggcttatttatccctggtgtgactgagcttggcgtatcatcagatagttttccatccggcatagttattcccggtgctaatgttatgacgttgccgcctggcgagtgggttgaccttagcgatatcgatcttacctcctctgcactggattatcgggtttcgttcagttgtgcaagcaaccatgcatactactcagctgacggaactattcagttcgctgcacctgacgtatggccgcttgagtaccgaaatggagtggcagttggaaggcatgagcctgagcctcagtcaacaaactacatgcttaacacggcaactcctgaattgctcaaaaccgcattgtcaggtggaggtactatttccgcgcgcagacttgcgcagccggggatccccatagctgaatacacattttatacgccatcagctctctcggaatgctactcacttatcggtggtcagggagtgggggagggtggggattcagcctattcagtttttgtccgatccgatcagaaaaataagcaaatcgtcatgtatgcggactcgacccttgagcacccgcgatatccgataacgtcttcactcactcgtttagttataaagagaaccgccgccgggactgctagattttcgtggctgggcctgagatctcttgcagatactttaatcgcgtcagttagtgggtatcaggtcgaaaaagggacctttgtaacatcgccaatcgtcacgggggcgacggccgccacgcgagccgcagcattcgttttcatcaaaaatcccggcggcatagcaacttcctgccgggtaaattattcagacggtacgacaagtacactggactttgctggcgcagaagaggtgcagctcgctcaggcagcaactgactggggcaccaggtacattcaacggatagagtatttgaaattatga

SEQ ID NO: 167981 - DNA, 1065 bp, Enterobacter cloacae
atgaaaaaaaaatctgaaatcacgttatggggctattacggctttaaaaatcttggcgatgacgtaatgcttgatgtctgcctccaggctatcaaacgttcacgacgctacgaaaatattaatgtcttcggtaattatgatacagaaaaaattgaagacggtgttacttttaagccattggcagggcttaaaaataaattatgctttctgtgtgcgttaatgaggtctgaaaaacttgtttggggagggggaacctgcttttataaagatgaaaacaccggttactctggtcttatattactttttattgttactcttttctgttttattactggaacgaaaaattattttgtcggggtaggaattggtcatttgacaacaaactgggcaaaaataattgttaatttaattcttcaattttcaacatttgtcgtttttcgtgataataaatcatatcaaaaagcaatgcatgattttcggttaaaaaaatgtgagttgggtggagatcttgtcctgttaaatggaatttatgccaattcagatcaatcacatgaaaatgaatcctttatttctgtttctggtcattacgcttatgtttgtgatgagaagttgatccacaattatacagttgcaattaataatgttattgaacgcacaggtatatcaaatatttgttttgtttcgatgcatcaacatacaataaataacgatcatgagtttcatcgcgaactatgtaagcatctacctgatactattaaatttcatttttgtaacgaaaatgaatctgtacaaaaaattgctctgtctaaataccatatagggatgagattgcattcgatagtttttgccacattgtataaagttccgctggttgcctttacatattctcccaaaataaatgcttttttagagcatatgtatttttctccatgtgtgttcgatggaacatcattggttgataatcttgaattagaacaaatgacctgcactaatctgaatataacgaacatatctgatgagaaacaacgagctttaaaaacgctaacagatgtggtgacaggctaa

SEQ ID NO: 167982 - DNA, 444 bp, Enterobacter cloacae
atgggagatatacggcaggtcgatgtcaccgttgctgtacgctatcgccacttccgtgccgtcggtgagcggggtgtgccagccgtacgtctctccggcatacggcttcgccatccgcagccacaggtagccgtagcccggctctgtcccttcccggtcaaaatcaagcctgacgcggtagcggccctgcgggtcaaggtgggcgtaaatatcacctttttcccggctctcgatgcgggccggaagcgtgccgtggatttccgggcgcggaacttccaccgggcggaaacagtagcgttcagtgtagggcatgccccggaccgacacatgcaggcgggaatcacgggcaccccggaaggtcaccagtgtgaggataaccccctccttcagggccgtaatgacatccccctgcggctccagtacctgaccgggcgcgaggtgtga

SEQ ID NO: 167983 - DNA, 240 bp, Enterobacter cloacae
atgttcaggataatccagtctaatacctggtatgccgatccccacggcgtaccctgcaaaatcctccgcgctacccacgaagtcatccactacatccgcaacggtcgcacctgcatcgccagcatgggccgctttcaacacgaattcgagccgctgaccaaaacacaggctgagcggatcgccgaagaaatagaaacagcagaacacctgaagaagctgcgcgcccagcgtgcggcatga

SEQ ID NO: 167984 - DNA, 174 bp, Enterobacter cloacae
atgaatttaaaagataaaaagcctgtttcagaaaatattctcaaacaggctgacatgtatgagcgctgggtggagtctacttcactgcaaagaaaatattttcaaaaactgctttctgcttttccagcctcacaagagcttcagctgagccaccaacagaaagagcatgaatga

SEQ ID NO: 167985 - DNA, 537 bp, Enterobacter cloacae
atgaatgaagcatgggcggccataacagcaggaattattgcagcggcggcagggtgcataggtttggttatgaccaaggaaaataaaacatccgaatttaggcagcaatggatacaagagttacgttcggttctcaccgaatatagctcgactcttagtgcgatttgtacaagcgtgcgtaatggtcataaaaccgatgcatcagagttaaaaaaaattaacatgctgctttgtgaattgcatctaaggataaattatgcaaagcaatcctctgaggagaaaaagctcaatgaggctttgatcgatcttcaagacaaagcctttaatggatcgaaagattttgcaaattcacaagaaaaatttacagctgcatcatttgcagttcttaaaaaggagtggaaaagagtaaaaaaaggggagaagatttatcgggtttgcatgtatccatgtttgttaattactggggtgtctgttatcgcctcattgatatatatggtcaggcattatgaagcgatctggcatttaatcgtaaattga

SEQ ID NO: 167986 - DNA, 618 bp, Enterobacter cloacae
atgcttgatcatgcagactactcgccaaacgtttaccactggattaaaactgattactacggcaaagatgacaatgtcgccaaggaaaaagcatttgaagttatgctgaggatcattgatgacggagtcttaagggcgtcgggtaaagacacctttaagcacatcaaaagcatttgcttcaccgagtcaccaaaggaagttaaagctcatcagagctcgcgatacttaacctttggcttctccttcgataaggaatttatattccaaaaaggtggaaggcacgttatctaccaaactaaagctgaaggggaagatttgccacctcacttgcattggcggcatgtcacatatgaccctgctgacaaaagaaagcgtgaggatggtatcaacttcacttgggaaagagaatggcggcttcatcacgaagaactaagccttctttcaagtaattcggtcattgttccgaacgaagatttcaaagaaagactcatcgctgaaattgaacatatgaaggggtttccgaaatacatgagagaaaatgctggcattcatgttgaccccagaccgtactcacagtacaccccggactttatcaaaaagttcgacactataagttga

SEQ ID NO: 167987 - DNA, 288 bp, Enterobacter cloacae
atgcaaacgaagcttattgcagaattaaatagaatcgaaaatggaatcatgagaaattctggaaaggatattccatattcccaccctgcatacgatcaattaattgatgacttttcagttcaaaataaggtattcaaagacgtcgatccaaaggatattgattatgatgttgcttataacttaatcaccgctatcgataatgagcttaccgccctacatgagaaagagaagataatgggttcctttaaaggcgaactaaaacgtagacctccatttaagcgtttatag

SEQ ID NO: 167988 - DNA, 141 bp, Enterobacter cloacae
atgaaaaaatatatttacggattcctgttatcctctgctgccctgctcgctatagccccgattgcaaatataaaacatgagattgactccggaaaaaaaagtgatagataccacaaacaaaaacattttagagtgggttga

SEQ ID NO: 167989 - DNA, 594 bp, Enterobacter cloacae; identical to SEQ ID NO: 167917

SEQ ID NO: 167990 - DNA, 1227 bp, Enterobacter cloacae
atgccaatcaagaagacttcttatctttatgcaaacaaagatgggatattcatctttcaaatctttatcccggtctacatgcgccacctctggaacgggcggcgctcgcttaagaaatcgacaggcacacgggacatcatgcaagctcgcattttccgtgaccaatatctattagagttccgcaagctacagctcatgatgaaaccggataaccccattacccggattcattccgctataacagatcttcacttgctggcaggggtatccagcagcattaccacacccgcaactattccagcagagcggggaaaaccagcatcaccaaaattgacagatgtcagtaaagaatatgcagagcaatacaaagatcggcgctcttattccactctgagtaaatcagttcgcgctgtatcggcatttactaattcaattaagcgtccagccattacaataaatggaatcgggcggcggctcgtctctgactttctggaagcgaaccaagataagttttcccgacagacgctgcaaaactggctaacctgcttagggacgctgtatgacttcgctcggcgtaaatatgacaatatcgcccctgataatccctttcacggccacaatctggaagctcgccagacgaacgaaagttatcaaccttttgaaccacaccagctacaggcattaataaaagaggcaggtagcgagatacgagacgtaatcataatcggtttgtattccggtatgcgtctcgacgaaatcgccagcatcaaacgagatgagattatcaaagttgaaggggtacgctgcttctacgtcagcaaatctaaaactaaagcgggcataaggtacgtccctatacactcgttgttaatcggcatcgttgataaatacctcagccagaacagcggagagtacctgctgccccaatcgaacaagattaaacgcgccgatggtaagcgtggcccgtggtactcgcaggcatttacacggctacgccgtcgcgtgctgccagcggctacagatcgccaatgcttccattcactgcgcggtcacttcatcacctgcttagatagggctggcgtaccagaacagcgcataggtgctatcacaggacactccgaacaaaaggccaaaacagaagcattcagaacgtatagcaaaggcgcggggatgcaagaattatcgagacttgttgagttagtcaaatatgatgcgataacatgctga

SEQ ID NO: 167991 - DNA, 918 bp, Enterobacter cloacae
atgaacaattctcccgtccttaagttacaagaaatggctagctcaagctcaaccgatattgaggagctattggcacgagcaaaaatgatctcagtcaaactcgacctaaaggatatatctgagtggcttgagcatgaattaaacggctatccatcacatgatctacttcccgactacagagttctcagaaatgttccgattcgagcgttcaatccatatgtcggttggattccatatcaactaggtaatacacaggaaaagcatcaagatatctacgataccttaacaactgttcacataaacaatcctgtatcaatgttgattgagtacgcgaaacgggacagcacactatatagtgacctcccatcttttctggctgacttcttgcaggaaatgggcgactgcgattttcggatggcatatagcattaaccccacacagataaccaaaatactttcaaatactcgctcaaggattctcgactgggctttattacttgaaagaaaagggatactcggtgaagggttgttattttctctcgaagaaaagaaagaggcggcaggtatgacagtaaataacattaataatttcaacggaaatgttaacaactctggtgcaattggtgcaggaaatactggggatattaatcagcaaaatcccataacagcaggtgacttcaatactcttgagcgtcaactaaaagaatatggcattgaagacagcgacattaaagcactgaaacaagcaatagagcagtccccaacccccacatcatcaaataatcttggcggggaaattggtaactgggtcggagctatgataggtaaggcttactctggcagcctcaaaattgcgggtgcggtagctcctgctctactgactaatgcaatatgcgcttacttgaatattcctgtttga

SEQ ID NO: 167992 - DNA, 528 bp, Enterobacter cloacae
atgaatattgatgcttatgccccggagctgttgcgctctttgtttcggtacgatgcgaagactggccgcctgttccatgccgtcgaccggataggagccaacaagcggatttacgctaaagccggggaactggccgacacggtaacggacagcgccggatatagacgcgtatctgtccgcatcaatggcaaatctcaagcgctatacgcccaccgtgtcgccttcatcattgttaatggcggtatccctgctgggatgcaaatcgaccatatcaacgcgatacgcgatgacaaccgccttatcaatctccgcacggttacgccacaagaaaaccagcataattaccgcaaagccaagggttatagccaccatgcctgctctggcagatgggaggcttacattcgcgttggtggtgttcgccatcacctcggcttattcactaccgaagcggcagcgcgtgctgcgtacctgaaagcgaagcgacgctatcacccttcaacaccagtcgacttattaagggctgcttaa

SEQ ID NO: 167993 - DNA, 237 bp, Enterobacter cloacae
atgattaccgtgttagtgcaaccgcgaactgctattgcctgtagcgagcaactgaaattcctttctgaaatcctgaacctccgccagatcgacattgcccgtgtttatcagattgaccgtcaagacgttaacaagatgattcacgggcagaagcgtatccctgagcgctgcattccagcgcacatgctgcttcttgaactggcacaccgccgagccaacgcttatggagataattga

SEQ ID NO: 167994 - DNA, 234 bp, Enterobacter cloacae
atgggcgacaacaacgaaatcattaaccctgcattcgacccggcgcggtacgccaatctcgacgaacagcgtgaaggatacgccccgattgagtcgcggggctgggatatcctgacgcagaatctccgaagcgaggccgcaccagaacagccagccgcagaccgtggacgccgccagcgcccgcgtggttcagcgggcgaacgtcgatggctacgcaaacgtggcctgatttaa

SEQ ID NO: 167995 - DNA, 699 bp, Enterobacter cloacae
atgatcgaattcatcacacagcatatagatactataagcacaatgatctctgcttttgcagcactgctaacagcaattgctacgtttttcttgtggagagtaacaaggctattagcagacgagacaaaaaggatggttgacgcatcagttcaacctcatgttgttgtgactcttgaaccgaattcttgggctgctttttattttgatatcaatattgcaaataccggaaatgccccagcctatgatattgaagtcgaatttaatccccctcttgtaaatgcagaacatagaaaaaatagcggcataccatttagcaaggtcagcgtattaaaaaacgggcattccctcaacagtagtctttgcaagtatgaacagattaaagatcaagtttattccgtcagtatcacttgggcgaaacagccgggctcaaccgaaagagagcggaatgagtattcttatgatatggcttctttcgagggggttagctatttaggggcaaggagcccaatgacacaaatagccgagcaggtgaaaaagattagagaagactggaggccgatatcccaaggagccaagaaaattaaaacagacaactatagttcaaatgacagagccgaggaacaacgagcacaagaagagtggtatcagaacactgtgaaggaatgggaagaaaggaagaaaagcaaagaagataactaa

SEQ ID NO: 167996 - DNA, 348 bp, Enterobacter cloacae
atgaacctgagtgaagattatgaactgatgaaaacccggctattgctgattcggtactacacagcgtacgtggatacgagaattgctacaggtgagttcggtgacatcctctcggaggatagagaagaacgatgggaagctggacgggcgagggctaacttgcttgttcggcatgtagatgaagtcatggggatggggcttggctggctatacgaaacgcttgagggcgtatggagggatggtgaaaggtacggcttaagcacatatgagacagaggaagcgtttgagctgtggaaactgctcagggataagcttccagaagggtacgtgccagagtatctaaagtag

SEQ ID NO: 167997 - DNA, 621 bp, Enterobacter cloacae
atgactactaacgcaatcgtccgcaaaaacgaactggttcaactgttaaacgttgctgagttcgctctgaaagaagtttccgcaggtaaagcgatgaaaggcttcaaagaagttctgggtatcgtgtgtcgtctgcgtaaagacttcatcaccgctgtatcccaaatcatcgagaaagtgaaagctgatatcgctgatgttaaccaggatatcaacgcggtagacggcgaagtagtcaccaccaaagaagtaacccgcacccctgtctctgttctggttcactggtctgaatcaagcgtgtttcgcggtgaagaacaaacttattcgttcaccgaatttgagcgaatggcacgacaggccgcagcgattaacggcaacgtcaaagacaacggttattcaaaaacaaaagttacggttgctctggttcgttcagataccggatgtaccgaaacatatggttgtcgccttgatttagcgctgggtgatgttgtcgggttccgtgaccacgctgaacagatggtccgttatcacgacaccgccgaggggttcgcatatcacaaagcgatcggtttagtggaacacgtcgaattcctcaaaacaatctgctggagtgatgcgtga

SEQ ID NO: 167998 - DNA, 390 bp, Enterobacter cloacae
atgaaagtattaaaaactgtagttgctctgggtattgtttctgttttggctggttgttcagcaaatccagaagttcagcaagcacgggaatttattgccgcaaactctccggttaaaggagcgaataaagcggaatgtgatctgatgtggcaacaggcgcaatacttcatcatgaagaattcaacgcgtaaattgcaaatggcaacggatattgtgattgaaactcataacacaaccgatgttggtcaacgctctggtagtgcgatgcgtttaaacaaatccgatggttcgtgtgaaattgaaggttcaatgaacatgtatatggtcggaatggattcagttatgaccgcaaacatgattcgcgctatcaaatcagcgcaaacgaaataa

SEQ ID NO: 167999 - DNA, 1677 bp, Enterobacter cloacae
atgaaagctgtaaacaccgttaaaactctggttgcactggctgtagcttcttctttctctgctaacgcttctgttaaagatgttggcgattatcttacccagcagggtaaagatgattatgaatacgctacaactggttcttctaatcctgatatgagtttcattatcaaaggggaaacggcggtgattggtcaaactgatggttcttatccgtctgattttgacccgggtaaactggttactgatattcagaatcagaaccagaatcaggaaacagttaatcacgaactttcaaccgaaattacaggtatcaaaactgatatcgattccattaatagccatgtttcgagcaaagcggaacaaaccgatctcgatgcgctgggaagccgtgctgatactgttgaatctggattagctaacaaagcagataaaacggagctggatgcattagggggtcgtgtaggtagcattaacgaccgtgttgacgatatcgaaacaagcgtttcgggcaaagcggatcaaaccgcgcttgatgcggtgaaagcaactgctgaacaggccgcgaaagatgtacagcaggtacaaggcgaagtaacaggcgctgttaccgtagcaaccgcagcgaaagaaatcgctgatcagaacaaaaccgatatcgcaaatatcaacaaccgcctggacaacatcgcccctgttgatgtttcaggtaaagcggataaaacggatctcgatgcattaggggatcgtgttggcaatgttagcgaccgcgttgatgatatcgaaacagggctttctgatattaacaaccgtctggataacatcgcttctgttgatgtttcgaacaaagcggataaagcggatctcgatgttgtaagcaacaaagcggatcaggctttagcgggtatcaccaccgcgaacgataccgcgaacaaagcacaggagatcgctgaaaccgcaagtatcgcagcgggtaaagtgaaagatgacgttgacgggttgaagaaccagatcctggataaagctgataaagcgagtgtagaagcgattgcagcaacggtaagcgataaagcggataaagccagcgttgacgcagcacacgcaaaagctgaccagattaaccagattttgcacggttccccaactacgctcgatgcggattcaacgggtgatatcggtttgattgcgaaagttgatcagaacacaacagatatcaaaactgtttctaaccaggcagcagaagcagtttcaaaagttgatgttgcttcgagcaaagcggacaacgcggtcaccgttgcgaacaacgcacagcaaaccgcagacggtttgaaaaccgaagttaacacggcaacagcgaaagctgataacgcgatgaccacggctaatacagcgaaccagaacgcgtctattgcgtacaacacagcgaacaccgcctacaacatggcggagacaacccagaaacagtttcagaaattcgacggacggatcaccaacgttgaaaaccaggttcagggcttgaacaaatcattctctaacctgaaaaaccaggtggataagaaccgcaaagaagcgaacgcgggtattgctggtgcaaacgcaattgcatcaatcccaactatcgcgggttctcgtttctctctggggctggtgttggtgggttccagggttcacaggctgtag

SEQ ID NO: 168000 - DNA, 282 bp, Enterobacter cloacae
atgaactttgttaaaccggaatatctgattcgtatcttcgccatcttaaccgatatgaatcataaagttgaattcatggttaatgatgaaaatgcagttgtaatgatggtttcagaaaacgataaacaggaaattttatcttcagctttattttcgattcataacagtaaggaagaagcgaacgatgcgaaaaaaacatatgaggcggcgtttgtgatttatcgtaatgcgatggaacaatacaaagaattagcaaaagaaaaccaatcagaatctaaatag

SEQ ID NO: 168001 - DNA, 321 bp, Enterobacter cloacae
atgattatcaaatgtgcatcatcaatgtgtaattttgaagtagtgcagcataacgcgcggtttcttcttcgagaaatggaaaagcgacaaaccaacaaatcgccaatgttcgcccatttaaaaatcatcgttaagttagaacgatgcagaaagtatcacagaattatcagatttattcgcaatatgaaaactggtatcacaaccgaaggaacccagttaggttatattgacaacgaaaacaattattacgatatcggtcttacgttgaaaggtaaaacaactgatacatttttcaacatgacgcaagacggttatttgtag

SEQ ID NO: 168002 - DNA, 1788 bp, Enterobacter cloacae
atgaaaccacgtttattttcatatgtccgtttttcatcgggcaaacaatcaacgggtcaatcggtagaacgccagcttgaaacagcacaacggatcgcaaatcagtacgatcttgaactggatacactttcgtttaaagatttaggggtttcagcgttcaaaagcaaaaacgccgctcaaggtaatttacgcgaattcatcgaccaaatcgggaaacgggttccggttggttcgtggttggttgtggagaaccttgatcgcctttcgcgtgatgatgtgctatcagcgttggatattcttaaagaaatattgcgtcgtgggatcaccgttgtaactgggatggattcgaaagtttatacacacgaatcattatcaacatcaatgatggatctgatcctttcgataatgttgttttcccgtgctcacgaagaatcattaaccaaaaagaaccgtgtagaatcacaagcgcgttcgttgatatacaagaaccttaatcgtgagccaggaacgccagcgttcgctattgaatctattgggggtaatgtatggtggagttctcaacagaacgggttaattgttccgcatcccgattattattctgttgctcaaaagatgatcgaaatgaaatgggatggttgttcccctggcgagattcaaaaatatctcaacgagcattacacaccacccactaaggataaaaaaggaacgaaaactaaatggggaatgaatcttgttagaggatttttgaacccaactacacacggacggaaagaatttattcttgataagcgtgatcagaatgggcaattagtcaagaaaaaatgtattgattcggaaggaaaggaatatttcgaaaaccaaaaagaaacattcattattgaagattattatccagcattactaaccgagactgattatctcacattggctaatctggacaaagcgcgatcggcaacacgcaattcatcaaataatgattcattaaacgaaatcggtctgttatctggaatcggtgttttgcgttgtggtaagtgtggtttaccgatgaccaaaaatagtgcagctaaagcaagatttagatatgtatgcacctcaaagaatacaaacgggaaatcatgcggaaatgcaggctttaccggacaaccgttagaacatgttattcttcaattaatagctgatcatatctggacaacagcgaaagaagataaaacagaatggttcgtttccgagatagccaagttagaccaacaaattaaaaagttggtaagacttgcatcattaaccgatgattctgatattgatgaactcgcaaccgaaatcaacagttatcgaaaacaaaagcgtgaactcgaattcaagttcaacgaatacaaagttgaacgttcagaacaggttagtacaggttgggacgaattcagaaaatttgataccgaagatgttacgaacccagaacgcaaacggattagattacgtattaaacaagcaatcagaagcatcaattgcactacgttcaacaagcggttcggattgttcatgataaaatacatagacaattctgaacagcgggtagtattgaagtacaaccggagaagttcgccgggcgaagcgttcgttgatatccacacggtcaataacaaagttctggtagagcttgcagggatcacgcttcatactcatatcgaaaaattgatcgagcctgaacaatatgaacaggcccgtaagaaatggacacaagataaccaagttgacgatacaccaaaaacgataatcgatgaactaacccagtaa

SEQ ID NO: 168003 - DNA, 321 bp, Enterobacter cloacae
atgagagtagaagactttccgtgtcatccatatgacaatttaaaagatattaaactgaacggtaaacttgctgaatctgttacgtatgatttcgaaaagaaacatgtaaagcaaaagaaacttgttcaaatgctggttaacgataatcgttgttttattgcatctatccaggaacaaaaaccaacgattcgattcaagccaggaaccgaagttgatattgaatcaccgttcatttttgaaacacgttcgatctgtattggttcgttcccttataattacaaagggtacagaatgaaagcgttcttgttccagtacgtttaa

SEQ ID NO: 168004 - DNA, 606 bp, Enterobacter cloacae
atggctaaaccatcaaaggcacagcttagagcgcaatcgaaagcggacgcacggaacaagcaagcaacggagaaagcgaaagagcaattgcgcaaatatgcaatcaaacagggtgatgactacatgaagcgaatcggtaaggcatcgagacaatcagcgatcattctacgtgaaatgcttgctgaaaaaatcgaccgaccgattccattcacccagaataattcaacgttctattcgttcacgaaaatatccgatacaaaaattgttcacaaagtcggtatcaaggatattcaggatcgttatctgggttcactcttcaaaggccgtattaaaccaactgataagtttattccgatcaaccgtagttatatcgatggtcacggaaatatcaaagggctaaataagaatacacaatcagggcggtacgtatcagtttcaaagaatcaacacaggttcaatgaaatccttatcgataaaaaccaaaaagaccgggctaaacgtttaatcgcgattaagcataatccgacaaaacgcaagcaagttttcgattgggaacagatcgaaaccgaactgattaccaatattcaaaaggccgcgaagaaatga

SEQ ID NO: 168005 - DNA, 168 bp, Enterobacter cloacae
atggcaacagttaaaacatggatcaccagctcgaaaaagatgttgattgctttgctgttgcttgcttctgggtacaatctaaccgcgtacattttcgatttccccgtgttgcctgaatcaatgctttcgttcgtgaaaacagtcgggttagttatcggggggctgtaa

SEQ ID NO: 168006 - DNA, 276 bp, Enterobacter cloacae
atgcctattgaattaatcattggtgctatttctggtggcgtaactatctgtgctgctatttggaaattgcaccattcaatgacaaaaaagacaatcgatcatgaatcaaggttgaaagatatagaacacacaaacgaaattcaatctcttcatatcacaaatatgaaagaagggcatgaaaatttaggtgttcgtattttgcgcgttgaaaataatatcgaatcaatgaaaatttctattgctgaaattcttcaaattctgaaacaaaaaggttga

SEQ ID NO: 168007 - DNA, 3759 bp, Enterobacter cloacae
atgccaataatggctattgctgctatcgctattgctgctgcttcaaccgctgcggctcttattgctgctggtgttgctatcggcgtggcaatcgggatcggtgttgctgtaggtgctgctatggcgattatgtcgctttctatgcaacctagtgttccccgaatgcaatcacctgacaacgcaactacactaggttcgacaaccgacccagcaactgtaatccctgttatctacggaacaagccgtacaggtgcaatcaacgtgtttaaagctgttgatggtgtcgatcaacgcggtaattatctggttcaatgtttcgctattgccgaaggtgaaatttctggtatccgtcaaattttcatggataacaaagcaattttgattcctgggaattttcacaccgatggtatcgtagataaatccaaaattactcaaacctatcagaactatgttcaggtagaaatttctactggtaaaaatccaggtcgtcatctttcgttagcgaaaaaatatatcggtgataaatggcctgttagctttacgggtaatggggtggcaacgatttgtatcgtgatgcacaaaacgaacaaagcattaacaaacggtgttgatattcttcaaccgaactcacaagttgcggtagaactgaatggtttgaaagtaactaatttggtaaatggtaacagagaatttaccaataatggtccgtcttgcttgctcgatttcattaccaacacacgttatggattaggtacaccaatttcaaaaatcgatatcgattcatttaaaagtgctgctttgctcacgaaagacacttatggatgcgatggtggtacagacccgaacgcaagcaataaagcgaacatcgaaaatatctgttcaagtttcggcggtattatctttgattcgttcggtaaactcacgttaaaacttgatgcaccggacgtaacgaaatatcatttcaatgaagataatattcttggtggtcagattacaatcgaaaacggcggcagtcacaaagagttcaacactctgaacgtgagttttaacgatccgaaaattgattattcgaactcagtattacgttatccttctgatgctacgaatgatgctttgatcaaaaaagataaacgcatcatcgcgaaagatatcacgatgcgtttttctaaaaatcctgatgctatcgatcgccttgcttcaatcgaacgtaacaaagcattaatcaaacaacagatttcattttccactgccgacgctttcagcctcgaagtatgggacgttatcagcgttagtctggatgaatataatctgaaaaatagactgtatcgtgttatcgcactgaatccaaaaatggatacaggcacaggcggcacggtagatgttcaggcggtagaatatcgttctgatatctattcgaatcaggatatcgcggcaaaaccagattatgatccgatttctatttcaaccagcatttaccaaccatacaatttgaaagcgcttggagtaggtgaaactgtatatggtagaaatattttgcttacgtgggaatgtgaacaagatttcaaccgttatcagttctatattcaatatcgcaaaacaggtgatatcgaatggattaacgcgggtaatacatccgattatgaatttactttgtccggtttggcaatgggtgttcaatacgatttccgtgtttgtgctgctggtctgtattatcaatcaccgtggacagaacttggaaatcccgatctgagtgttcaatttttattgcctactccggttattcgtttacgtaatggtatcgctccgggcgcggttgaaacccgtcatcaaactttcgacctggaatgggatgaccagacccagctaaaagtgaatatcaacggtgttgaaacacctttcgtggatctgttcgattattacgaaattgaagtaactcagaagaatcaaacgttcacttacagaaccaaagatattaactggtcatatctgtacgaaatgaacgcggttaacgggctatcacgtaatgtgaaattcggtgttcgtgctatcggttacagtgggcgtaaatctgatcaagctgtgttggaatgtttcaacgcacaggcaccaggtttaacaggatttaccgcgacccctggtttcggtgcaattttcgttaactggaatccgatcgaacctctagcggttcctgattatgctggtgtagtggttcaggcttcgaaagatgccagcttcacgggcgatatggttaaaacgttcgttgctccatttgcctcagagatccacacaactaatattgtagacgggaactggtatacgcgcgtagctgcatatgacgtgttcggacaagatgcgctgaattggtcaagtgcggtaatggttcagcttcaatcaaaagttgattggactacacaggacgcaaacgcagtagcagaactgatcgcacttgaggaaaatttacagggcgcggttgattcagcatttgaacgttcgaaggatgctttacagcaagaaatttcaaatcttcacgcgaacattaccagcgaaacagatcagaagattgcagcaaattcaacacagcttcaacagattgttaaagatggtgataaagtagttgttgatcagcttaatcagttgaaagtaaccatcgacaacgaaatcaccgcacagattaacgatctgaacacggttgttgcaagcaacgataaagcgcaagggcaagccctacagacggttaaagccgaactacaaggacaagtcgcacaagtcagcacaagcgcacaggcaagcgttgacgcgctcaaaaacacggttaattcaaactataccgtgaaggtaaacgcaaatggtgttgttgctggtatgcaattagttgctgattcaaccaacaacaaatcagcaatctattttaacgcaaaagaattctttgtgatttcggattcaagcaacccaacgaacccggtgatcccgttcgcaatccagaacaacaaagtattcatcaacagcgcaatgattgcgaactcttcgatcggtgctgctcacatcatcgatgcaaatattagcactgctaaaattgccgatggtgcgatcaccaacgcgaagattcaaaacgctgctatcaccaatgcgaagatttcaggaacgttatcatcacaaaacgccgctggttgggcgttgtatcaagatggttcgtttgtagcaaccaaagcaaacattaccggaactgttaacgctaatggtggtgtgttcaataacgtaaccatcgctggaaactgtgatattcagggtacattacgagcgaatcaaatcattggtgatatggctgttcaggggattttacctgcaattgattggatgcgaccaacagaaaaaacatggacaacagtttctagacaggtttatacaggacaaggaacgagtaatattatcgtttcagttccaaacgtaaactgttatgcgaaaggtggtacaggttcaactactggcggttttttccaatatcgtgttctggtgaatggtacggctatttgtactgaaacaatttcaggtggtactgatgcaccagcagggcaattttcacagaatagcggtcaagcgaaaacaactatgggcggtgggattcgtttaaacaacgtaacaggcgcaaccattgaattacaaatttatggacaggcttatgttggttcttatccttacgcaaaaattgatgcaaccccagtaattgttaatgttttgtatcgtaacgcatttactgattaa

SEQ ID NO: 168008 - DNA, 513 bp, Enterobacter cloacae
atggaattcagaagcaatctggacagccaaaaaataatcataaataccccatatatcactatggggttttttatgttatcagacatcatcaaacaaacattaatcaccgatttcataaatgaaaccgttggtcaccaatttgaatacggaaagtacgattgcaatcttcaattgttaaagttgattgatattctcactggttccgatctgtattccaaacttcacaatcagtacaccgatccgaaatctggttttgcaaaagcaaagaaagaaatcggattcgctaatactcaaagttgtattgaacattatttcatcaaggaagaaacaccgtcatttgagaacggaacgattattgtttcagaacaaaaagttcgaaataaaaaaacattgcacgttgcgatcgtttattcgggttatgccttagcagttaattcacacaatgtttatcaaatgattccggtatccctgatcgatttcaattcttcatggaggattaaaccatgccaataa

SEQ ID NO: 168009 - DNA, 660 bp, Enterobacter cloacae
atggcaactaaacaagaagaaattaataatctgtgtgttcatcccgattttttaaaggcgtttaacacaacctacggcacgaacaaaactattctttcacaacaggaattgttttctgttggtacggtatatcatgttatcaccgtcacaatggcagtaggcgaaggggtgatccgtatctgtgatggataccatgatatttcacataatggatttaagtttttggcaacgggtgacctattagatgttcagactcctaccaaatcgaaagagatcaataaccaggggatgtctgttaagttttccaacgtcagaaaagattatatcaatctcattcaacaaggtaagttggataaagcacaagttcaaatcgaaatggtattcctgaatccgttgaaaggtggtgtcgttggttcgttcgatgtatttgttggtgaagttgattcaactgttcttagtctgaatatgaccgaaaatgattctgaatggacaaatacagcagaaattaaacttaactcgaactgggcttgtttagatcagaacgcacgacatcacgcttctgatggtattcacagaagttatcctggtaatgcgaacgatggattcttttctaaagctggtaaatggaattcagaagcaatctggacagccaaaaaataa

SEQ ID NO: 168010 - DNA, 564 bp, Enterobacter cloacae
atggctaatatttttacagatttacaattcaagccggaaatcagtattaaatcaattgcgcctttcttcgcgaataaatccgcatcgggaaaggtactacgacgatttaccggaattcaatattacaccgctgatatcaccgtgaactttgttggtgaagaccaatatctttttgaccaatggttagccgaatatcgttacggtaaactgtttgttttcccgatgtacaacgcgaccaacttgaaatacagaggtaagcaaacagcgctttgtaatgttgctagtgctgttcctgctggtgctcgcgaagttcctgtttcgatattgctcgaagtcggcacgaaatttacctttgcaaaccaaacaaaagtttatgaagtaaccgctgttgatactgcgaataaatcgatgcaaatttttcctaacctgcgtcaatcagtgcaagctggtgaaatgatcaattatcgaactcctgtactcacgttaatgatcacttcgaacgatttcgattatgacctgaaacagacgactcagattagtattgaagcaacagaggctttataa

SEQ ID NO: 168011 - DNA, 2166 bp, Enterobacter cloacae
atggcggataatagacatacattagaaattaccgctgatatcggcggattagcaaccaacgcccaacgagcggaaaaattgcttgatgggctatcaggacaagcaacgagtttaaacggtatcttgggttccctgggtaacgggatgaaaggatcggtgaatccagcgttaatgggtatcggtgcggctgctggcgttgctgctgctggtttgtcgttgatgatgtctgctgcacaggacgcgattcaacttgataatcttgcccaacagacagggttaacaacggatgcacttcaacagttagcgcacgaattcggtgataccggaatcgcaatggatcagttcgcatcgatgaataaagacgcgatcaaaaatctgggtgaagctgttgctactggtggcggtgttggtgaagatttagcgaaatatggtttagacctgaaaaacttcactcaatatatcggcgctacgaacgggggcgtaaaagcgtcaattagtctgttctatcaaatgaaagaagctggtgcgtctgtttctgaaattacatcggctatggaaaaattagctggtggttcttcggatatgatccatcgtttatccgaaatgagttcagaacaagaagcattgaattctattgctggtcagaacgttgatattaccgatgatgcggtcgaatcttatcgtgaattttcgcggagaatgggcgatctcgaaaccaaggtaaaaggggctgttgctaacggattaaccccgatggttgataccattaccgccgtttgggattggttcgaaaaagattgggcgaataccgcttttgctaaagcgatgaagcaattcaacgctgatgcacaaaaggtgcttaaaactactgcgccttatcgttcatccggtatgacccagggacaacttcaaaatgttggcgctacctactcaaaggaagaacttgcacagcaagcatatgatagagcgaaagcggaagctctagcgaagtgggaagcgaacgaaaagatcatcaaagagaaccaggcgcaagcaaaacggcaagccgaagaagaagcggcagcgaacgcgaaaattgatcagcgtcgtcgtgaaaaggcagaaaaagaagcggaaaaggcagcgcgtgaagcagcacaaaaagctaaagctgctgctgcggaggctaaacgccttgctaaagaacaagctgatgctgctaaaaaagctgctgatgaactcgcacgatcccgcaaagaaagctatgacgcactgaaccggatcaccgttgaagggttcacggctgatgctgctgctatggcaagcggtaacgcgaagattgaacgcggttatcaggatctaaagctgctgttcgatcggggcattatcgatgctcaggagtacgagcaacgccgcaaagatttaatcgatgcaatgggcggtaacttctacgaacaactgttgggactcgacccagaaaagcgggaagagatcgaacaggccgttgaagatacatatgctgctgaactcgaaacccttcaaaacgcactcgattctcagttgatcacctatgaagaattcgcgcagaaaaaagccgctatcgatgatgcttacggtatgcgtaaaaagcaactcgaagagaccgaagaacaagcggctatcaaagcgactatggcaacccttgatcattatcagagcgcggcagatggggctatggctgctatctctgctgtagctggtgagaactcggcagcggctaaagcatcgttcgcggtgtccaaagggttagcaattgctaaagccactatggacgcttacagcgcgttttctgatggtatgaaagagggtggtttcgctggttatgctcttgccgcttcgaagatgggcgcggtgcttcaacagcttgccagtatcaaatctgtcaagggtcaatttcactcagggatcgataacgtaccggataccggaacttatctactcgaacagggtgaacgcgtcgttgataaacgtctgaaccaggatttaaaaaactatctcagtggtgaacagggcggcgggatcaccgttaacgctcctatgacaattcagggtaacgtaactgatcagcgttggttcagtgaacaactaaccaaacacagacagatgatcgctactcaggttgaagatgttcaacgccgtagaggataa

SEQ ID NO: 168012 - DNA, 324 bp, Enterobacter cloacae
atggaattggaactgttcgatcggtatatcgaaccatccagtatcgaaattttagatgcgatgttcgcccgtctgaacagttcaatttatgcagcgtcggggaatttatccaaagaaggattgcgaaaacttaattcatacgatttcaaattattccgtggtgaaaacattttcaaaacgccggaagaaatcgagaaagaaaagattcagcgtaaacgaaacacttacgcaacattgatcgctgatatgcctcctgaacttattaaaaaaatggaaaaggaaaaatgtaagcgtaaaaaacaaaaggtgaaacatggcggataa

SEQ ID NO: 168013 - DNA, 306 bp, Enterobacter cloacae
atgcaagattttgaacaaatgatgaaagacctaacggtcgaaaataaacctgttgaattcggtaagtacactttttacgttcgtcctatgaccgttgctgaatatcacgaacatatcaccaacgatgataaaggtcttcgtgatgaaaaaactattcttcgttgcaccctgaacaaagacggttcacaaatgttttcagatatcgaacaggtcaaaaaattggttgttcaggttcgccaaactctgatcggcaacatcgcccatttaacccttcatatcaatccggttgtattcgaaaaaaagtaa

SEQ ID NO: 168014 - DNA, 765 bp, Enterobacter cloacae
atggctaaacctcaagatattttcatgggtagtgcgattgatgttgcgatcggcactgacctaacaaatacatcattaaacggtattggttttttaaccattccagaaatttcaactttcccagaaatttcttcaacgcgtaatactattaaagtaagttctttttctcgcaatgaagatcgtacactggtaggtcgtcgttcttatgctgatactactatcgcaattaactatcagcctggtgatgtggttcacgaacgtctgatcgcaattgcggaagcgggttcccgtatacaactccgtatcacttactggatggacttcgaacgcaattatggtccatcattcctggtgaacggtttcctttcctctgatgctatcggtggtggtgatgaagctgcggttacacgtactttcaccttcgctattgataaaatcatggctaaaggcattctggatctgtcctctcagtccattgatgtggttaatcctctgatcattactcaggatttcccggcttctctgagtctgactactaacgaaaataaacgtctggaaattgaagttagtgggggatatcagccatatagttatcgctggtataaagatggtcaattaaccaatattggttcaactacaagcgcacttgatttcactggtgcaaccgaagaacctggttcccatgttcgtaaagttgttgtaattgattcaatgggacagagcgttacctcgcgtgaatgtactgtgacaatcacgccagcataa

SEQ ID NO: 168015 - DNA, 810 bp, Enterobacter cloacae
atggctatcgttggttatcctggatggatcggaagttcagcagtaaccgaaactggtcaaagatggatgtcggcggcacgtaccgccgtccgtcaatctgctgctggttggatgtctcaattagctggtcaaatggtcgaaataaatgttgcatattcaattggtgcaaacaacgcatatacaaacgcaacattgatcaactatgcgaacggattagcaaaccgaagtattaccaacttaacgattactgttactggaacaattgtttcaaacacttccggtgctccgtgtcttaacttttctgctgctccttttaatgaatttaaatcggtacatttgattataaattcgggagtaatggttttaggtcgtggtggtaacggtggttcaaatgcggctggtggcgctggtggtgttgctataacaaactctatcggtactaaattaagaatctctaataacggaaccatcggcggtggtggtggcggtggtggtggtggttattacgataccaaatacaacaatattaaatatatctctccgggtggtggtggtcgtccgtttggtgctgcgggtactggtaaaagtggcggctctgatgcaactgcgggttcaatctccgcgcctggtgctggtggtgtttatggttcggcgtttatcggtggtgctggtggtaatttgggtgctgctggtcaagccgctcaattctcacaaggaacgaaatatgcgggtggtgctgctggtgctgcgttaaacggtagtgctccaacttggggaaccctcggaacaatcaacggttctcgactctaa

SEQ ID NO: 168016 - DNA, 3102 bp, Enterobacter cloacae
atggcaaaaatcaagtttaaacgaacatctatcccaggacgcaaaccttcggatctgctccctggtgaaatcgcgattaaccttaatgatcgcaaaatttatgctggtaatgattccggctctattgttcagcttggcaacgatccgatcatcacagaacaccttcaagctaaagcaggggcatcaatcgagaacggattaaacgtaggcggtaacgcaagcgtacaaggcgatctaaacgcgtccggtggtttggtatcccttaaagaagttaaagccccacagggcgaaatagacgctatcatagcgaaaactatcaccactggttcgattgctggtgatacaggtacgtttaccggaaaagtaacccacggtgaaaccaaaacgggcgcacttgaagcaacaacagcaaatatcacaggtgcggcaactgttcacagtttgatgactcccggatctgttagcgctgggggcaatatcgttgcaacgggtaaattatccggtggttctgtagaatctcctgtgattattactacagatatcaccgcaacagatatcaataccgcaactgtaaccgctacgggcaaggctaaatctggttccgttgaaactggttcaatctccggttccgatatcaccttaacgggtaaggctaaaaccggttctgttgaaacgggcaatatctccgctactggaacagctactgttcacaacctggtaatcactggttcgagcaacgttacaggtggtgtaaacgcgtcgggtaaattggttggtagttcactggaaaccccactgatcaccactaccgatgtaaacaccaaaaatgtgaccgcagcaggtactttaaccgctccaactgttcaggctggcgcgttgtctggttcttcactgaacgttaccgctaccgctacagcgaaaacagttaaggctgataacgtcgaaaccatcgatattagcgcaacgggtaatttaaccgctggttctgttgttgctgtcggttctgctgctgttggtgcaactctgaacgtaacgggtaaagccacactcggatctgttggaactggtgctgttagtgcaacgggtatcactactggaacattaaccgctacgggcgcgaccgtgctcaaaggggtaacttctggttcgattagcgcaacaggtgacgtaaccgcgtcaggccgtttaaaaggggctacaggtgagatcacttctctggtatcgaacaacatcgatgctgttgggctggtgaaagccggtactcttcaagcaaactcgatcgcgttgaccaacttcgacaacttcgacgctcgatatatcaaagttggtacttcgatgaccacagcagaacgtttagcaactccgcgcactattgcgggtgtcgctttcgatggttccgcgaacatttcgatccctgctgctaacgtgggcgcgttgcccgttgctggtggcacgatgaacggaccgattgcttttaacgtgagttcaaccgatccagttctggtaggtctgtcaaataatgctactggttcgaaatgctacttaactaaattccgtggtggtgcggcagatactatctggcatcaaactgttcagggtggagtatatcgtttagcaactggtacaacagacacacaagaagaattacagatttctacagcgggttatattcgcggtcgaaacgaaattcaaagttcatcttgtggttctggtggtcaattccgcgctgttcaaggtaattatggtttctttatccgtaatgatggcggcaatacttatttcatgttaaccgaatctggttcaccgtggggaacgtggggatcattacgtccgctcactatttcgaacaccacaggccgtgtatctatgagtaatggtttgaacagtaccgatgcgacgtttaccggggctgtaactgttaatggaaccgtaaattgtaccgctgcaacaatcatgatgcagtcgaatcaacgccgtcatattcaattcaacaatggtacaagtaccgatggttatatctacaaagatgttaacggcgggtggatgttcaacaatggcgtgaatactggttcgtggtcgatgggtacagatggcaaatttaccagttctggggctattcaagcgggtgcgggtgttgctgttggtggtgcgcttactggtgctactacaggcgcgtttagtggattaattaccgctagtggtggtttaaccacaacgggtttaactgcaaatagcgtaacttgtcagggtaatatgtctgttgttggtactgcgtcattcagtggtgctttaaattcaacaggcggtattagtattgcagctaacagaggtatttcatctaaccataatcaatcaatgatcctgaatgatcacggtaacggcaatgttaccctgtgtgctgctcgaaccagttcaacagctacaacgggcggtgaactacatttaggttataatgctagtgcaggtacagctactggtggtggtttttatactgctcgaatcggaacttacgcgccgttatatattcgaactggtgctattcttaatgaccaaaacaattcatggattgttgcgcgtgatagttcgaacgcattacgttgtaatatgttaaccacttcttccgctggtatgatggttgtacagaaacacgccgatcatacatttactttgggtggtttgggcaactctcaattcggtatctatcgttatttgaattcacgtactgataatggtaatgatggttatgcggttatggcggtagataatacttggacatgctctggtaacggtaatttcaacgatgtttatattcgttctgataaacgattaaaaaccaatctggttaaaattgaatcagcactggataaagttaataaacttaacggttattcatacgataagaaattttctctggatgctactgaatataccgaaaaagaagatggtttgatcgcgcaagaactccgcgaagtattaccgaactctgttaatgaggataaagaaacgtccgtattaacaatttctggttctggtgtaaatgcgttgctagttgaagcaatcaaggaattaaccgcacgggttgaagaattggaggctaaataa

SEQ ID NO: 168017 - DNA, 1398 bp, Enterobacter cloacae
atgtctgaacaattcgacatctttacaggtggacggggtgaaatcgcggtaagtacacaacttgaccccgatgtaaactttcacgacccatcttttcaggtaattaatgagattctcgcatttcctgaattaacaatgactcgtgaaatgtcctcttacgaaacttacgattcagataccgaatcaaaattaccaggaaataaatcatacgaagatatcgaaatcgtcgttgctatgcagccaactgatccggctctaaaagttctcgatgatgcagaagcaacaaagcaaatgttgcgtttccgaaccttctacgtgatcgacacagcagaagacgaggcacctggatcacagggctattatcgcatttacgatgcttatgttgtgggtaaatcaaccacaggcgaaaatgatgctgtagtacagaatacataccagctcgcaattgaaaatatgtacgatgctggtattgcccgacgaggcgatcctttgctcactggtgatttcggtatcggtgcgggtacaactgattatccgggtatctttgactggacaaaacttagcggaaaccgtttcgttaccttcccagattcgagcgttcacaacccgttcggaactgatacgggcggtatcgctgttcaaggtaacgataatcaagggttccagttgattgcatcacctaatgatcaaccgcgtattcgtgttcgtggtgtttcagcaaataaacaaggtcaatggatcaaggtttattccgaagtagaaaaaccgacccccgctgatgttcaagcggttgccctgaaaggcgacaagatgacagggcgtttacagaccccagaaatcttgaccgataatattcgattcggtagctcaaatggtgttaattccagcggtactacccgtttaattcaaaccacaggcgcagacggtacacctgtcgatttagtttctttaagatatgaacaattgacacaaacccctgtattagaaacaggaacaattaacgcgcttgtttcacttaaagaccgtggtcagaatgtatattcacctctgaatattcctacacctggagttattggggcattatcaattcgaggtggagctttatttggtactcttgatgctccacggctagaagtacatgctgaaactgaacctacgttagccctttattcaacacatcaatcaattccggctgatcgtgctcagacctgcttaattcagtcaacaaacggagattttagtgttgtgtataaaaaccctaacacaaatgctgttctgtcaggaataacatttgaagcgggtaaatctggcaacgtttatcatacgggcaaccgtccgaccgctgctgatattggtgcaattgatcataatgatacagttgatttaggcactttctaa

SEQ ID NO: 168018 - DNA, 423 bp, Enterobacter cloacae
gtggaaaatataaatgatattctacctcgtttagcgatcaagcgacgtttagaagatattattgttgacgagtggaaacttaaccttgttgattacttcaaaacctccgttgatacaactccgcaagtctggattaccggaaacgatgaacaattccagccattgaatccaaacgtttacaacaaacgattagtttcaactttgatgaccacgatatcagtgttttctcaggttgaagaaaccaaagttcatcaaattatcaaacaattgctcaatctcgatccgaccgatttccccggattgctaatcctttcaataacaccttcaatatccggaacaagttatcaaaacgatgcaagtgaaggtcatgttatggctgatgttacactggaaattaaatattactttaacaggggcaaataa

SEQ ID NO: 168019 - DNA, 288 bp, Enterobacter cloacae
atgaaatttacagatgcacaaattaaagcgttcatgcgcttaggcgatgaattccagaaagaagacggttcgaaagttgccggacttttagaaagaacattaactgatgttgaaggcaggatcgcggaaacaattacgttaactgttcaatacggcgaactggtaaaaggtgattttgttgttgtagacggtgaaaaattcaaagtcgcttatatcaacgatgacctatcagggattattacttgttacctcgaaattgcagggagcggtcgtggaaaatataaatga

SEQ ID NO: 168020 - DNA, 1863 bp, Enterobacter cloacae
atgttacgccgtaatgttcctgttacggcgcgtgacctcaaagttgaaaccgatgaagcaggggaagaaacattacttgtcaaattctccagcgaatatccagtaaatagagaagtattcgacgaaaacggcgaccccgctgtttacggtgaagttctattacatgaatcaacggacaatgctgatttatcgcgccttaacgatggtgtagccagccttttattcaaccacaaccacgataaccacttggggattattgttccgggaagtgcgtttatcgatgtggacaaaaaggcgggttatgcccgtgtgaaattctccaaaattggaaatctcgcacaagaaattttcgcaaaagttaaagaagggactatttcgaatattagtttcgggtacgacctcggctcttattctttcgacgatgcaaaccgacaagttttagttgatcagtggtcagtaaacgaaatcagtttcgtaactgttcccgctgatccgactgttggattaattcgttctaaaaatggctccctaaatatattcacaagaggtgagaaatcacctgaacaaatcaaacaagagatcgcaaatatgccaaagcttcaaaccgaagaagaaattgaaaagctggaaacagcagaagaagaaattcaggaagtagaagcggaagttgaatccgaaatcgaaaccgaagaagaagaacgcgaagaagtagatcagcaggttgaagaggccgttgatattgccgctgtcgcagaagccgtaatggaaattatcgaagaacgcggtaaacgctccgcaattaataaaggccgtcgctcaatgactgttaaaaaagacacaattcaaaatctagaaaaaaaattcgatctgatggctggtattcgtgcccgtatcgaaggtaaagaactcactggcgcagaagccgaatatcaccaggaacaagaacgcaaactcggcggtcgtgctcgtggcaacctgcacatcccaactagcgcaatgcgagcggctccggcttatgctcagagttccgcaaccgttgataaactgcgtgttgacgatattcgcatggattccttcgtggaaatgctgatgcctcaatccctgctgggtaaactgggcgttcagactctcactggtctggaagatcgttccgtactggttccacgtcagaaatcaaccgctgttgattccttcggtttcattgcggaaggtgctgatgtccctggcggtaaaggtgcatacgatcagatcagtctgaccccgaaaaccttcggtggtgaaaccgttctgaaccgtcgtactctgctgactaccccaggcattcaggcgcgtgttcaggcagatctgatccgcaattccgcaatcgcacttgaaaaagctatgttcggtgctgctgatcaggctaatggccctcagtctattctgtctgttctggatgagtggaaaaccggaaccgctgattgggattacaaagcgttcctgaataccatcgctgctatgaccgatgctggcgttccagaagatcagatcatgttcgcgatgaaaggcgtaaccctggctcagttgaaaggcatcctgaaagataaaaactccctgggtatctatctggtaggtgatgacaatctgctgtgtggtcgttctatcgcttccagcggtgtattcggcaacgattccatgattgttggtgacttctccggcatcacgatcggtgaatgggctggcctgtctctggacgttgacccgtggacagaagcgcgtaacggtggtgtttgtctgcgtgtgttcgcggatatggattggactgtaactggtcaaactggttctctgattcacctgaaaactggcgttgttaccgctaaataa

SEQ ID NO: 168021 - DNA, 1482 bp, Enterobacter cloacae
atgcaatggaaaaatccgtttgcacgaagcaaacaaccacagccagaaaaaagaaattctcgttggaatcgaaaccggaaaatcatcaacaatgatgttcgtatgttcgaaaaacagttaaacgaacgttcacgcggaattatggacaggttgaacgatatcaccggggtaatgttcggaggtattaaccgccaaattcgcgcaactcaccagcgaatgattgaacaatgccgacaattaagcattgataacccgttcggcgctcgttacgtacagatgaccgttgataacgttgtaggtactggcattttcccacgtacccagatgacgctaccaactggcaagctggataaacgaacgaatctggttctggataaaatgttttatcggtggtctgaaaataaagaacgcgtatcgcttaacgggcaattcgacttctacgaattctgtcaacaggtagaacgtcaacgaattatcgacggtgaagtttttattgtaatgcaccgcgaagacggtgatcttaaactcgaaattatccctgctgaacgttgtgatatcaccttagaccgtaaagaacccgatgggacaattatcaaaggcggtatcggttacgacgaacgaacccgtaaacctgtttcgtactggttccgtagacacgatctgtttactgacactctcacatatgaatacgacgaatacgacgcggaagaggtgatccactatttcgacccgaaagatgcctctcagttacgcggtatttccgatttcgcaccagtgattaagacaattagccaactggattcgtacatctacacaagtatcgttcaggcgcgtgtatctgcttcaagtatggcgtttattactcaggctgataaatcgggcgaagcattagatgacgaagacgaagagaacgaactgatcgcagaatacgcaccaggcaccatcaacatgcttaatcctggtcaggatatcaaaagcgttcaggcgaatactcaggcgaatgaattcggcggttgggtagacaagattcaagcgactatcgcaatgggtttaggttgctttaaacaagcgctcacaggcgatatctcaggcgttaactattccagcgcccgattcggtgacctcatgcagaacgcgcgttttgcgagtctccagcgtcgtttaatcaatactgtgttgacccgtgtgtatcgcgaattcctcgaaaatctggttgatgaagatttaatcgatattcgagtgaataaagcaatgtttgatacctcctggattaaaccagaagtgaaaaatgtcgatccagaaaaagaaatcaaagcaaaagttttgatgattgaaaacggattaacttcacgccgcgcagttatcgaagaaatgggacgtgatcccgataaggttgatttagaaattagcgaagattcattttcgccagtgccaaaaaatcccgctctaaatacacctgtagacgtcccacaaaaggaataa

SEQ ID NO: 168022 - DNA, 501 bp, Enterobacter cloacae
atgcaacagcttatcactatccgcaaaggatcgcttttgtccgttaaggttcagaacgccgacgataccgttaccgttatgaccgaagacgaacaaaagaaaaataaatattccgctgatgaaactttgattgttcagatctccacggtggattttgaactaggtcagtattacgcggtaaccgaatcagcaaaaggcgatttactcgatatccagcctttcaaagtaatcggattattcgaaaaagaatcccgcaaggatactttgaaacaacagatcgatctactcgacaaagttatttcagcaaaattatccgaatccgaaggtgttttacaacagctttcaatcaacaacaaaactctagtttattcctcgctttcagaactcacgttgctggtggattcattacgtaagcaactcaacgcggaaattaccaaagaacaacgcaaaaacggaaaagcgccgtttaagcaaattaaattagttttaaacaggggctaa

SEQ ID NO: 168023 - DNA, 2043 bp, Enterobacter cloacae
atgatattttcattccggttagtgtcattgtggataaccttagacaagttatcttacctttataaattttctctctttgcccgtgccgaaaggtgcgggtttttttttcgcctaaatactcccacaaagggagaattcaaagtgaaaaatatagaaaaactaaaaaccatattcgaaaagagtgctgattttattatcccgcctccaatattgaaaccgtccgaatgggctgaacaaaacttaatgtttgttgatgggcctatggctggtcaaaaaatgcgattgttcggattccaaaaacagattgcggattcaatgcttgaaggtaaaaagaaaatcgttctgatgttatcagcgcaatcaggaaaaacgaatctccagaacgcaatgattggttataagatgttcaccactggtcacaacgtcggaattctacaatcaaccacacgtgaattaggccaatggctcaacggcaaattattaccgatgatcaaacaatcggattcgctgaaaaacttagtcaccgataagaacgataaaaacgcggtgaataatcaggctcagattcaattaacgaacggttcgtttctttacatgatgtcattaacgagcccgtcacatcttcgaggtaaatcgatcggtggtggaatctttcttgacgaagtagacgcggcgcagttcgacgacaacgaaggttcaccgatcctgcttgctgaacaacgcgtgacaacgttcaacggtgaatctcctgttgtgatatcgagtacaccaacaacgaagaacggcgcgatcatgctcgaatatgagaaatcagataagcgcgtgttttattgccgttgtcctcattgcaaccacgaacaaacgttagattgggaaaacgttaaacacgattggactgataaaaaaattccgatcgcgaaaggggctaaatatgtttgtcctcattgctcgaccccgtggacagaaggtgatcgtattcgtgcggctgctggtggagtgttcagagctactaacccggattcaccaatcatcggttttcacgcgtcacgtttgatttcaccgttagcgactatcgaatcaatggttcaggattatgcggacgcgatgcaatcatattctttgcagactttctacaatactgttcttgctacaagttacgacaacttaaacgcagatatcgacccgcacgaactcgaaaaattcgtcacgcctgtttcggtaaataatattccttctgattgtttgttccttgttgcgggtggcgaccaacaaaaggaccgtttagagaacactctgatcggaataggtgaaaagaaaatatacgtactagatcaccgttccttttacgatttcgattgtgaacgcgcagattcaaaagcgtataccgaactgatcaattttctaaaatctgatttcagagatatcgaagggaaaaaggttccgttgttatgggctaacctggactcagggaacggacgcgcaactcaagcggtgtatcgcaactgtaaccgctggagcaagctacacgctatcaagggtagttcgagcgcaaacgcgcccacaattccgttaaaagccacgacaacagcaggacaagaattatttgtgttgggcgtgaacatgcttaaattcaaagcacaagaaatcttgaaccgcaatttgtccgataaagcggttgttaagatcgaattctccaaaacattacccgatgactatttcgaacagctaacagcggaagaattaaaacgtgttggttctggcgtgaagtgggttctaaaacaaggtcaagaacgaaacgaagctggtgactgtttcaactactgtttagccgcgattgaacaggtgatgcaagggataaaacaaaatccgtggaagcggctacgggagtacaaacagaaaaagaacgttgatgtactaccacgcgaacaaaaccccgtagaacacgatgcagccccgcaagaatcgaaatctgaacccgttcagaacctacgtaaaccgaaacgtaaaataacatgtcctcggtcaagctggatgaacttctaa

SEQ ID NO: 168024 - DNA, 459 bp, Enterobacter cloacae
atggctgtattgacacaaaagaccctccagcaatggaaagaacaccagttcgataaacaaggcggtaaatgcgttctgtgcggcttaccgttggattcatggcagaaagcaaacgcggaccacaatcaccacaccggaaacatgcgcggcttacttcatcccctgtgcaattcgattctcgaaggtaaggttgctggcctgatgtatcgcgcagggctgaaaggtaaagcagattttccgaccgtcttacgcaacctggctacatactgggatcaggactacagcgcggaacccgttcacccttcgtttgtcttggatgagtcgaagaagttcgcacggcttacccgtgaacgcatgatcaaggaactcaaccaggaaggggcttgtgtcgataagacgtattcgaaagaagccctgatcgatatcttcaaaaaaacctaccgcgaaaagttggcataa

SEQ ID NO: 168025 - DNA, 891 bp, Enterobacter cloacae
atgaaaccattcgaccctttctcgatagtgatcgctgtaaaccatctaacagatgcagtaaacgaagccactcaaacgaatattttcaaagattacgcgatgccaatcattgttgtcgccttatctgcattgaccgcatattttatcgccattcgaggatatcaatatcaggagtcctacaaaaacgaaaaagcaaaagcagacaccctcaatcacatcattctcaaaatgcagggtatgcaagctaacctgattgctaccaaacaaaattactttaataaattggaaaccaatcctatacaaagggcggtaaacgttcctcctatgtctgcctcttttgaatatgaatcaatcaatttaaatgaattgactcagttgttatatgcaaagaaacgggatatagaaaagtacccttggtttaatatttcttcgtttgttgcgaccatcggtaattacaaccagttcattgagttagtacgatatagaaatgagttggataaggaagtcaaaccgctgcttgcgccccttatggcaacgggtggaaaaatacatgtgacattgattgctcacgctatgggaccaatgttgactatgagatatgtggacataacagaaaaattaataaccataattgatgatctattgatcaccacaaacgatttcatgttcaatttttctgcaatggctgctgaatcacttaacaaaaaatacctgaaaaattatatctacctacaagggtatcaaaataattctgaaaacttctacgagattgtcaaacgatgcgttgaagttgatatggtcgatttggctaatttaatgcaactcgatcatgacgaagcattgatagtatacaaagaaaactcggtagttataaccacacctaaagactga

SEQ ID NO: 168026 - DNA, 168 bp, Enterobacter cloacae
atgaaactgaatttagcaaaactgcaagtgttagcccctgaatatatggcagcatcaccagaccgtaagaaagaattgctgaaagaatacgggatcacccgccctactttctacaacgcgttgaagcggtataacatggtaatcaccaccgttaaaacgctggcataa

SEQ ID NO: 168027 - DNA, 888 bp, Enterobacter cloacae
atgaacgcattaaacttagtagtaaacaacgacagcttctttaaactgactggcgaagtcaacatttgcggttctgcctttatcgggaaggaatacaaaggtaagcgggtgatgacagttgaagatttgatgaccgtcacccaaatggaaaaagaagcaatgaaatcagtaatcaaacgatgtgattcgttatcagcgggggattatatcaaggtagaaggtgaggagcttaaaaaagttaaggaaatcaacaactttaacatgggttcaaattgcacctatgatatccccgctaaaactgctcgaattgtgttcttcacccgcaacggtttagaccagattacccagaaggttgacggcggtcggttcttgtgggaagcactgaaacgcgaatacttcgactatacagaacaaccagcgtttaaagttcctcagacttacgcggaagcgttgatgattgcagcccaaacagaagcagagcgtgaacgccttgcactggagaacaaagaaaaagaacatttgctaatccagcaggaagcagaacacgaaaccttcgttgatatgttctttgatgaaagcaaagcgatcagtatcgggacgtttgcaaagattaccggagtgttcggaaaaaaccagatgttcgattatcttcgcaattccggtgtaatgatgcaatcgaacgggaacgaaccataccagcagtatatgaaacacttcattattcgcggggcttacaatacaccgctgttgaaatgttcaagcgcaaaatggttactgggtcgcatggttcgcgataacctgatttcagcatctaaaaaagaatggtgttacgaagagatcaaagcgaaatattctgatgatctcgaaacagtattagccgccgcgtaa

SEQ ID NO: 168028 - DNA, 555 bp, Enterobacter cloacae
atgaatttcaacttacgcattgcagaaggttcgcgtttctataacgagaaaccgagttactattatatcggcacgaataacaaagattcaatcgagcgcgtttcttccttaacacctgtatctatttatggtgaaacatttaaggaacttcgaaagaatacccgcgatgaatttaaaaagagcgaaaacccagcgttcgaaatgaccgcagcattgaagaaaagattctctgttgttgaacagaaaattaacgagcttgtagaagcatgtgaaagcatcgagcgcgtttatttccactacaacaaggaaatgagtaagccaatgatcatcgtgtgcttaggagtgcgtacaggcaatttagcaggtatagaacaaggtcgggtaatcgtatctggtgttgataccattgttgaagagaacaatttcaaacataacaaccgctgtgattacttctggggtatgtggaattaccaaagaagtaaatccgacaaatactttatcaatattgactgcacccgacgccaggacgaaaagccgatcgcgttcaggggctaa

SEQ ID NO: 168029 - DNA, 639 bp, Enterobacter cloacae
  misc_feature (23)..(32): n is a, c, g, or t
atgaatacggaaaaattaggacnnnnnnnnnnacgtggtcacgttggcaagaaacgcaaagaagaacgtgcaaaagagcttatagggacgttgcaccaaacgaaagatggaacattagagattatcggttatgagggcaatacgcgcgttctggtgcggtttatcaaaacaggatatcaaacaacggtatcaatgagagctatcacaacgggtgaagttcacgaccgatacaaaccgaccatctttgggatcggatacgtcgatgataaattcagtatagaaacagaaatcaggaaaaaggcgtataacgtatggcacgcaatgttaaagcgttgcaccgatccgaataaccacaattataacgatgtaactgttcatccgaggtggcacagcttcaaaaacttctgtgaggatatccgagaattagaagggtacaatcactgggtgaacgaaaaaggatacgccttggataaagacatcaaggtcagagggaatcgaacctattcaaaagaattttgtaagttcgttaccgtgggagaaaatgcaatagatgcgatatcccgcaagatggaaaaacgctggttagataaacaggcacaacgtaaacccgtttacgaatcaagttcggttatgtggtaa

SEQ ID NO: 168030 - DNA, 174 bp, Enterobacter cloacae
atggacatattacagacgatagcactattgaacattctgtttcagacgataacgattctgttaacggggtatctgatattggatctgatccagatgattctaaccctgatttcttcgaagattaaacaagccccttcgcggggctgttaccacataaccgaacttgattcgtaa

SEQ ID NO: 168031 - DNA, 1233 bp, Enterobacter cloacae
gtgatcaaaaaaccttgggaaagaagattgaaagatcttgcacatgttctaacgagttgtacgcaaacatactttgatcctgaactttttcgattaaatttgaatcagtttcttaccacatccagaactgtaacattcatcattcaaaaaaacaaaaaagaaatcgaaggatacgaatcatggtataagcaaaatattattgatcgatggcgtgatgatcaattgatgacttgggctaaagactctcgtaatgttattgaaaaagaaggtgatttagagatgtttagtgaggctaaggcgactctgatcttttcgtatgtcgaagagcaagatatcgctatatcaaccaaacatgaattacttgggattggagttaaaaaactcgttcgtttggctcaaaaaaaatttccttctgcggtgtctgattctgctgtaattaaatcagagcgtcgatgggtagcaaatacccttgaaaactacgagcttctccatgctttgaatattatatatagccgtatatatgaatgttgtaagtctcttggagatttgttaggaaatcctattggtacagatattaccacaccgtcatcatttgactcgcttcgtaacgaaaaacggcatgtaacttatttaaagttaaatgactattcaactggtaaggttttattaaattcgagacgttatgatagcgacttgattccagatagcgttaaagaaaaagttaatttaatcgaaggtgtcggtgaagttaattgcatagctgatcttgttaaacagatttcgaaacttgttgaaattaattttcttacctatggtcatcttgttcaggtaatgttcctttttgataagaagtatcgtgtgattgatgttctaagtacacattttgatgatcaatcagataagtatattttttggcgaaccgctgcggatagagcgaaaatgatggacgcattcggattagtgtgggcatcagaattatggttgaggagacaagatgttaaatcaaaagggttaattcgtaatatgccaataattggagaacgattacaggtggttggtgttgacgctgaaaataatcacaaaactattaactggaatattttaagagataatgaaaatagcgaaccaacattagagctagttgaagaagaaaaacataatgaagggcggagctattttatgcgtccagttctaaaagcaataggcggcgatatcagcatgttaagcagttag

SEQ ID NO: 168032 - DNA, 951 bp, Enterobacter cloacae
atgcagcctaatatgcctacacacctctacaaatataaaagtttcagtgttgatagcttagatttattggttagcgataagctatattttgctaaccctaatagtttcaacgatccgcttgattgtaatccttcagtgagagacaacatgcacgatgttgacgcgctgaaaaagattcttaaacgattgattatcgataacacaaaaaaagaattgacagaagcagcatcaaaaataaattacaacgggccgagaacacttcagaaaatcgaatcattaggagagcacgaagcagcacaagtgttatccggtattgatgattttttggtgatttttgatgacgatataattttcgtgcttaatgacatgctcgcgttaatcaagaagaatttaatgacaaactacacaagcggggttctgtcattagccgagaattatgattgtccgttgatgtggtcgcattatgcggatcaacataaaggtttctgtattggttatgacttatccgataatgtttttcatgatattcatgctttgaattatggtggttctcgtttcattacaacgcaacagatatacgatatgttgtttgattctaacgaatccgttaggaaaagcgctaagaaagcaattgatgaagtcgtgttattgagtaaagcccctcaatggagttacgaaaaagagcatcgtgtgattcttgagcaaggattacaggaaaacccattcagattaagtgatgttacttttggtttgcgattcaaagattctgtgaagtattccgtgatgaaggcgttagaaggtagaaatggtggtttagctttttatgaaatggtgttaaacaatcattcatttgagttaggtcgaatacctttatctttaaatgatgcatcattgcgggactatccaaaaaataactacgcattttatcaagattttatatctgaggaatga

SEQ ID NO: 168033 - DNA, 327 bp, Enterobacter cloacae
atgaccactgaaacaaaagaagtaacccagcaagaaccaatcacccctacagaacacaccgaacagacccgcgaaccgttcactatggaaaccctaaaagggcagatgttccagacaatcgacccaaacggaaacatcatccaggttaaagcggaacaattgatcaaccttatcgttcgatatgtccgtaacggtgaaatcatcacccatgataaaagcgttgaaatggttatcggtgatgccgtcagcatctacccagaacttttacagattgcacaggacaaccgaccttatgttgggatgttcaaaccagagcagggcgcataa

SEQ ID NO: 168034 - DNA, 996 bp, Enterobacter cloacae
atgttgttaaaatcattcccgggggaaatcctctttagtcggctttgcagaagcttgtcagtaagtggactgcctgtgcagaaattttcaaggagcctcgggctggaagcccggtcctcatttcatcctttcctaacgcagcatctgacagagattgctgagaccagtcacgaaaacgctgagcttctctgggcggaacaaaccctgttccctctatgggtgtggtcaatgcccggttatgcaaaaccacttcggcaactgacgggccctccggcaagtttgctatggttttatcagcttacaggcaaccactcatcccaaaggatgcaacttcatttttgccctgtatgcgcaagggaagatgcaatgggatatggtgtcccttactggcattgtgaacatcagatcccgggagtgagcatctgtaaccgccactgttgccggttaatacccaggctggttccacccagtcctcacattgctgttgaattttaccccaacaagtacaacaacatgatcctctgtaagaatatagaaaatgattttgcagtctttgccagtaagatattgactcgcctggcgcatggtgaagaaatatcagataattacttttccggttttacctcgatcagaactgatgtgaagaacatgaagcacagcggaaacgaaaaactctacatgtcattgaacgacctgattaggcatttgtgggaggaaaattctggccctgttatctctgataaatcacactttctttattacatcacctctaactttgaaaatatgttccctgcacaaaaattacttctctgtttttatttgcatcgcatgcaaagcataaggcagcgtgttagtggagagcacccacccccaaaccaaacaaataaagaaaatataaataatgaaatacacaaggacgtcatggaattaaaccacctgatggtcaggctttggccttcatcaaaattcatcgtcgagtttcgaacctttgcatga

SEQ ID NO: 168035 - DNA, 159 bp, Enterobacter cloacae
atgacatattctttcgtcataaaaaatatcaaaataaaaaaagagcaattattaaagtttcaccattttagtaaacgcgacggcatgagcacttataacatcattcataactcagcacgtcagagcaatactaaaagcgggatgctgagcatactataa

SEQ ID NO: 168036 - DNA, 924 bp, Enterobacter cloacae
atgacttttcaagatgaaagtatttttggctttttgttcagaacccagttgatttatggttacctggatttctcaaatattttcagaatgaatggcatggtacgtactacgatcattgctaaagaagaacttttgcctgtctatcggcgggttaataaaaaaattttatacttaatgattaacaggagtcagcgtgaaaaaatttcacttgaacaaccatactctcatttagatgaacttaacagatttcttcaacaaggcgttgctgttcttaatggcagcgcctttttttttgttcgattctgtaaggaatgtctcgacgaatgctataaactttatgggatcggttattttaaaaaggaatgggaaaaaaacctgtattgtaacaggcacaaaagatcactttctgaaatgacaggaagggaggcaaagcactcagttgacatcatgacacgattgattttaggtaaccccctttatgatggtgatttttttacaaatcttccacttaaggcagaacttaaaaaaataacagggcgagtgacaagaccattttcactattatatataaagccatgtgcaatattatcaattagtaagtgggttgttgaaaaaagacatgcattatcactcattcttccgggggttgagggaaatatcgatagagccttgttgttaaagaaaatgagtgacaatcctgaggaatttataattaaactgtacaatgaacgcaacaatcctaatctcaaggaatttggtgtgtttctttctcaaaccacaaaaaatgtcatagaaaaatatggcgttttcagtgatgatgagttcagatttaaagtgatgaaatcaaaaaacataaactgtctgaactgttcctctgataaattaagtgaaaattgcagaatgcgattaagatataatatatga

SEQ ID NO: 168037 - DNA, 1308 bp, Enterobacter cloacae
atgactgcagccccccaggatcctccacataccgcaatttcaacatggagcggatttgtttatcagggaaagcttgctctgtatcacagcctcactctgattaactcaaattatgatgctcaccggtctcttaaactccagctggaaagtcaggatgactttgcgatttaccaggatcagcaatgtctttcaatccaccaggtcaaagcgtacaaggaagcgcgcttctcagcatatgctgaaagcctgtcaacccaacgggaaaatgcgttaaaacggcagatccccctcgcttactttcacgttgcacgtcagatcacaggcataccagcaacctttgaaaaagactatggccctgtacaattttatccctacccggttgacacggcagatggggccatcactacccagaccttttgtcctttaaaagaagtggaccaatatattcaaaagcagatcgagatattgctcatccggtttgcagcccacgctccatggaaaaaaaactgtgtaaataccatccagaatgcactagaagcggtagtaaacaaaaaggtcattctggtccacagtcgaatacacgagtccaggcggaatcaaaaggtcattgccgctaaagaatttatcgaattttcagttttatacgaagcactggaaactgatgattatgacttatataacaatgaatcttattttctgagtcggctccagattgatattggcacatactttaatgaattctgtgagttgcaggcaaaccttcctcctgccgcctgcagtaagcttgacgactatctggccactatcgcatcacttgatgctgagggaatgaaaatgttcctgcgcgcgacaatgcctcataaaacaggtcgttttgccacactgaatgaatttaaggatgattctcttgatcgggattcgatgcgcctggggatgtttacgattttctggaagcttatatccgcaacgcgtaatgaagggaccggtgctcctttttcctggctggatgatggcatcttttattacccaacagggatccatcaggcagttcaacaccaggagagcatttgtcatgacatcatgcgtcaggcaattcgtgaagatgtggaatgtctctatgaatgtggggtactgatcactagtgccatggaccacccctcaataatgaatgttattcatggcgtcgattctgtcggcgatgtcgatgatgctagacaggaattcctgagagacaaacgtatcggaaatttcatgaaggttggaatggtttctttaaacaatgttcccgcgagtctgaaagatgaataa

SEQ ID NO: 168038 - DNA, 705 bp, Enterobacter cloacae
atgaataaactgattgaaaaattattcgagtcagaggggttgatacgctatcccatttctgatttggaactatataaatataaccagtcggcaaaaacaaattactggctgataatccatgatgcccccatcataaccgccgaacggcaggctgcatggctgaacagatgtaaaagtgcaacggccgacccggcacttgagaaaaacattaatttactgatggtctggaagacggacagtgccagcatactttcaagcaaggaagtacaccatgcagaagaggactgttatttcttcaaaaagcatgttttgccctataccgttgatgaattcgaagcactacaacaacaaataatctcccggggttttgataccgtttttcgacaggacatcacagcccctcacatctttgctcagtataaatcccattatctggctggcggctggcaaagcttgttgtacaggcttgccataaagcttcctttcattgcgatacacagtagcggcaatactgatttagaaaatcttcagcgaagcattcaaggaaaagttcaacgtacggaaaattcagatgaactgattgcaaccgaattagtagtccactcacttgctgaacagattgcctcagcggatatactccctgaagaacttcagctcctgattgagaaaaaattagttgaggctggccatgaaactgaccgttaa

SEQ ID NO: 168039 - DNA, 2361 bp, Enterobacter cloacae
atgaaactgaccgttaagcgcctggaagtacgcaattttaaagtctttgaaaagcttgagctatcccttgatagcgatcatctcatcgtgctggatggtcctaacgggttcggtaaatcctctttttttgattctctggaacttctgctgacagggaagatcagacgctatgttgaactggaggcacgtactgtggacaaacgcagcctcaggccaggttgtccattactgttcaatcaggccagtgaagatgactggttgtcagtgcgtgcagaaatcgtggtagatggaaaaagtcactttcttgaaagagccatcagtaaatctgagctggacagtaacaagggggtcactgatctcacgtttccactttttgaacttaccgatttcagagcagaacgcggcgaagcaataccccgtgaagaaatctatctatcaacattgcttggtacgcactacctgcgagattttgagcttttccattatgtcgaacaggaagaaaacacccgcttattaaaacaaaaagaaaaagatcggcagaaccagattgcccacctgttcgatattggtgacatacaagacaagatgaacaccatctcccttgcattaaccaaaatcgtaaagcagtgcaatgcccaaaaagaagccgaacgactgcaactgaaagagaagttggatgcagccaggcagcaactcctgcctgcaggcatacaggtaaattatgaaagactgataacagtaacggagcaaccctgggatcgagaaacgccacaatttgatgcaaaacaattccagcagtggttgtcgccagagggtgagctattccggttaaaacgtttcaaagataacttcacacattaccagaatgccattttcaacaaagaactgatcaccagacttctgccaaaaaaagaactgcagcaacgctttcttatgtttaccaaccctctggattacagagataaatggggacaggaggttgctcgcattgatgccgcaactgttctgatcgacgcgttcagggatacgattaaggccgtcaatgaagataagctggtactatcccctctgttactccctcttctgccagaaaatatttcatcagaggagtttcatcgacaggctgaagcactcaaacaacaatttaccacaaccaataaagtgcaggcctgtaatgcagcactaatgcatacacgagaacaactggtgaatgccttccaggaacatcagacacagtgcgaatctaccgacgtttgcccaacttgtggacatccatggaagacccaggaaaagctgtttaaggaaatatttaaacagggtgagttgcttgaaaagctggccttgcagcaaggcaacaatttatccctggcactgtcaagcttcagacaacatgtgcaggaacccattgaacaagcgttacagcactacctggatcatgcttgtgagtatatcgaaagtaagcgcgacctggtgcgtatgtcagaagaacaaattcggtggattaaactgtatcatcaacacctccagacagacggagtggttattcaagatctgctgtctgataatttcagccctgtcccttcccaggcgcttgatgaactggagcgtcgggttcttgagaagttaaaaccagttgatgacagccatatctacgatgacttcgataagatttatcgtgagatgtttaataacgatccactggctgtcgaacaactcactgctgaacaaattgaattaaaaaaagcctatctgacacagcagcatgctcaagcatcatctgcctatattacggaatgcgagcaggcatatatccgagcggacctgcagatgaaaaaagcctgtcgactcagggataatctccgtaagctcaaaaagatctatgaagacgaaaaaagagtatatctggaatccattgtccaggagattgaaattctcttccacatctattccggtcgcctgatgcaaagctaccagcagggacttggtatcttcattgaaaatgacggcaatactattgctttcaatgagactccaggcaacgtatatgatgccgtgttttccatgagttcaggccagctgtcggctttggttctgtcgtttacgctggcactgaacaaacggtatgcaaagcattccctgcttctgattgacgatcccgttcagacacttgatgagataaatgttgcaggtttcatcgagttactgcgtacagagttcgcggatcggcagataatcatgtccacccatgaagaccgtatgtctgcatatttccgttataaatataaaaaattcggcatgtctgccagcaggataaattttatggaagaagctagtccaggtatcaaccgtcagatatcataa

SEQ ID NO: 168040 - DNA, 573 bp, Enterobacter cloacae
atgtggcttatgaagacattactaacatcgcggtgtattaatcaacggggagcaggtcaggctgcctgttatgtagataatgaaatggtaggatttatctctaaatttcatccaggcccaaaagttacttttcttgctatgtgtgaatcttatatgaaactttttcaaaagcgtttaaggcatgctttcactgagttaggaatgaatttgtctgagttagcaagactgcttgaggtttcgcctcaggcggttcagcgttggtgcagggggttaagtatcccacgaaaaataacgatggataaattggctacaattgccggaaggcctgtatcgtggttttactccacatatgaggatgagaccagtttagcgcgtgagcatcacgtatcacaatgttcaactacatcgttaactgataacaaggctgtattggttttatccccggatgaagagcttgttgttaaattatacagggaattgcctggagaagaacgacgacacatacttcgtcgcatgagttttagactgtcagaaattaataatttattaaagtcacatgagaacgacagatga

SEQ ID NO: 168041 - DNA, 393 bp, Enterobacter cloacae
atggctgtagatgggcaacagttccttgattttgctaaaaaaatctttctttctggcgatgagatttcgtgccgtaactgtataagccgtgcctattatgcaatgtatcatgaagccagggatactctaacagcggtccctaatttccaacaaagtccgcacgatggcttgataaaatatctgcgtgggaatgccagtcgtggtgatgagccatttgagaaaggtaagcttcgtgctttagcagcattgttagagcaacagaaaggcaagagacataaagctgactattatcttggcgagaacattgacgctggagcagcggaagaagcgatcttgtttgctgagaaactcttcaaaatttgtaaagaaatgagaagcgctccgctaaagtag

SEQ ID NO: 168042 - DNA, 780 bp, Enterobacter cloacae
atggctcagacagcgtcgataatcgaacacctagcaagcgagttgttagatcttcttgaacagggtgatactctcggtgagatggacgctgcgcgtaagatgcgtgaggctaaaggcatcgaatcgccatactttaaaatcgtcattcaggcactgatcacagcagccaagggtgaacgagaagcggccgaatcgcagttcgaaagggctttctcggattaccatagcgcaataataggtattggttacgctgcatatttatttcgcacaaggaagttaagtgcttatttaaatctatgcttacgcttagtcaatgagtttccattcgatgcagatgtgatcgagaagtgcctgcctatgctttatctttctggtaatgctgaacaatgtaaagccaaagcaataattagggcagggcatataaacgatgagaaggctgcggaggaggttaggatggtaggagaaaaatgggctgctagcatagttgcggctcaggatgcgtccggagcctctgaagcggaaatcaaagaactatctcaaactgtgatggaaatattagaacaatataaaagttatgctgctaacttttatttctatcccatggcaagcgatggcacagctgcgctagttgcaatcactgatgtggttgacccaaaaaaagttgctgagatgaattttgatttggcgatggcgctctctagtaatgatgagcttcaagagtctaatcttactgcctggttcgaacgtgacaaatcagaaaaagtaaataaggaagcataa

SEQ ID NO: 168043 - DNA, 291 bp, Enterobacter cloacae
atgaaactgaattatgaagaacttgaagccaagtgcgcggcgctggctgaggagaatgcggggctgaagtcagcgattgacgcagctataggatggcagcaatcaaccgattcggagaatgttgaaagcgttcgaatgctagtcgacgttaaaagcccagccaccgacgctttcctgactgaaatgcgggcgcagggtgtggagatgttcgccaaagagatgcatgcagatatcagcggtgatgatgcccgcgagttcgccgcccaaattcgcaaaggagcagcatcatga

SEQ ID NO: 168044 - DNA, 831 bp, Enterobacter cloacae
atggctagaccgttctctcaaagatatggacacgttaaagttgaagatgtaattcagctaaacagtttgaatctagaaactagaaaagcaatctggaactatttatatttaggcctctttgataacaaggatttgggtaagaacgttgaacagtgtgcggaaagcgtttggatacattttttaaataaaccagccgacaatgttccttattacaagacagatactgcatatgaagagtctgttttgacggtaataaaaggatttatatacaagtcagaatggttcagggtttttgatttactggaatacttgatttatctaacatcaaattatagtcgatataacttggggaattatatcaatcatgcctttgaaaaatttggggtgggatatcgtgttatagacgaattgattacaccaatatctgatgaggttgagattgatagtattgacacctcgctggcaaacaatatcaactcctcaaaaacacatctatctcgtgcactcgagttgatgtcggatagagaccaacccgatcataggaattcaattaaagaatctatatctgcaatagaagctctttgcaagaagatctccggcaatgagaaaggaactcttggagattgccttaaaactattgaggataaagggcatattcatccagcaatgaaacgggcatttcttcaattatacggatatacaagtgaccaagggggaatacgtcatgcgttaacggacgatagcgaggagccaaccttagaagatgctcgttatatgttggttatctgtagcgcgtttagtaattatcttatttctaagatgagtgattaa

SEQ ID NO: 168045 - DNA, 162 bp, Enterobacter cloacae
atgcgcctcaccatagaagctatagctatgtctatctcctttatcgtttctataactggttatgtgtatcatcactatttcaaagccagaaagaaacgcagagaaaaggataggcaggaatttatagataagctccgtaataaatataatgagaaagaataa

SEQ ID NO: 168046 - DNA, 273 bp, Enterobacter cloacae
atgagcattgaactttctgccataggcaacatggcaaatcaatcttcaatgattggggcaataaacaccaactttgaaaagattgagtcaacagttaactcccttttagctgaacgctccacgttacactacccattagattgcaacgggcaagcgctaatgaatgccgtaataccttatggcgcacaaatcgctgatatgcctgtatccactttaatctccaccatacgattattaactcagcgtattgaagcgttggaggcaaaactataa

SEQ ID NO: 168047 - DNA, 597 bp, Enterobacter cloacae
atgaaaaaaatcacacttgatgaagaaatctactctcgtgtgttcgatttccacccacaaaacaccccagaaatcattaacacttatattatttggttcagtcaatttaaaactatttttttagatagcccagatattttcttacaaaaaacgaaaaatgaaacattttttgaagtaataatttctaacctcatgctaagcaagttattcagcatagaagagaaagttaatttaataatttactttactgattactataaaactcatgatgtttctgatctaaacctgccacaagaggtttctttacttgcaattgaatcctgtgaagatattgaactgaaaacacttttcatcgcatacctaatctctactggttatcgcattaaaaatcgactagctgaactttgcctacggattaatgaaggagaactagctagtgtattcgtcaacagttctcaagcaactattgctgctaatgatgatactaacgtgtcactaattcttaaacatgcccaacaaacaaaaatcatccgtagctttgaaatacgtacagatggtaaatatgaagttaacataagacgtgacaaagaaatttag

SEQ ID NO: 168048 - DNA, 741 bp, Enterobacter cloacae
atgatatctgaattaacgttttctcgaaaattcacttcattttggaatcaattacttccaaatgctaataatttcatacgcatcattaacggcagtctcatcgaggacgtttatccccctctagatgacagcgctaataggtcaaataacgtctttgttaacgagtgcgcatttaatttatatacagcaatacagaataattcgttagacagaaatattctttcagcacatgatattttccatcatgctgattttcaggctgtttttgaaaaaacaaaagaatatctacagcggttcgcttacggttctaacttcaagctacccttaagcatgattgaatataataccataagggaaatagcaagaaatattttctctcgatatggaatggaaaaccaaattgaagtgtctccacaattcgatgggtgcggagtaattaataattcatatggcgatatttattattcaaatgttcttgtggaaataaaatcaggagataggaagtttagtgtttacgatcttaggcaggtgctaatatatttcaccttaaacttttactcaaaaaacaaaagaaacattaagaggtttgagcttttcaaccctcggatgggtatcatttatagtgattccattgtcagcctttgtaaggagctagcatttattcaacctgaagaattgtactttgagataatgaattctattactgaggaaaacttcatagtaactgaaatgcaacgctag

SEQ ID NO: 168049 - DNA, 495 bp, Enterobacter cloacae
atggctaaagcactcgatgggttgcagacgtttaaggaacttggcctaaaagacctgaggaacttggacgcagaggagcggcgggatcagctcgatgagatagcggcgggcagtaccgcagaggaggcgctggcgctccttgagcagcatatggggtttagctcacctgaaatgaccgtgttggttaagaccacccatatcggggatatgagcattgtgcgcgataagcttgctcatattgtcgaaaagcgtgttgatgcgcgtgagcgttacgtcaaacttgcacttgatacgctggagcagccgtatgagatatgggagaccatgtatgatgacggcatggtgcgctatatctttatcgggatgtataagcagaagcagcaaatgctggtagtggtcgcgccgtgggatggaaaggtgctatggaatttcatgcacactgaggcgaaaggtctcaacaaacaccgcaggggcaatttgctgtacagcagataa

SEQ ID NO: 168050 - DNA, 1269 bp, Enterobacter cloacae
atgaaaaatacgtattctcctttatcacctgagcagtcagtcgctgacctggcacacttttcctggtgtgccctcgttgcattacgtatcgcgcaactggacggtcaggcgctttcaccgctgaccattcattccttcttgttacgctggcttgcaaccgcgcagaaacagcggcgcttcccccgttccgtggcacccgatatagacagccttctgcggatggggcgacagaaaggtccttccgcacggctgcatgaacgactcaagtatttatggcagtcctgctccggtgacctttcccgacagtcagatttattcaggctaacatatgccatcgaacatctgaaatcacagggctggattaatgcagtagtggcagacaatgaatggatacccgagcttagctggagccagcaacaacgcctccatttcatggaacgacaacttctttggggtcgacgtctcacgctatcaatggtacaggagacattcgatatcagtcgtaatcaggcaagccgggacatcaagctataccgagaactcgctccggaaaatgtccccccctataatcctgcagatcaatgttaccgtccaggcagatcttttacgccattgtttgcggttactgatccgcatgaaatattaagcgttatctcacacccggttcagaatacgcagactctggatgctgttcctgtgctacgtcggcatatactggaaggcgtccttcctgctgtactgacagcaatcgaatacagggctgccttcgaggccatctatgcatcggcctccacaccaatagggataaaaagagttttaatccctgttgctatagcctatgtagacaaccgcctgcaccttagagccttgagtgaagaacacaatggttatcgtgattttgtactatcccgcatactgacaataccaaaactatttaaaacgaaaactaaactcccagtagacacgatgtgggaaacctgggtcaacatcagactcatcacgaatccatatcttccgaatgatggtaaacaattaattttcagagaataccagctaaacaaaaacagtctgtataaggtgcgtgcagcattagtccatcattttttacaaaccaatgtcctgccaaattcaccggaacaatggattcaggcaaaaagacatccttggtcttatccagttgtaatcagtaacaatgatgaaattgaaccctatttatttcgtgaagaaaagacatgcgaggtttttcgagcaaaaggtaataaaccataa

SEQ ID NO: 168051 - DNA, 537 bp, Enterobacter cloacae
atgaaaaataaagagaaatacatttcagttgacgttgaaacatctggccctgtacctggtgaatacagccttctttctattggtgcttgtgtggtcaatggatcggaaagtaccttttacagggagctgaagccagacagccccaggcatgatgctcaggctctggcggtggcgggattggatctttccgtgttggctcgtgaaggtcatacacccgccgaggctatgcgccacttcaaaagttgggtcgaatcggtcgcagaaccggacaagaaggtcatatttgtcggttttaatgcaccttttgactggtcctttatcaattattatttccataaatataccaacgagaatccttttggctttagtgcccttgatatcaaagcctattacatggggcttaccggttgtcattgggaagagacaaaatcgtctttgataacaagaaaactagaccttaagttgcaaccaagccataacgcgttagacgatgcccgattccaagctgagttgtttgcggcgatcctcaaaaattaa

SEQ ID NO: 168052 - DNA, 729 bp, Enterobacter cloacae
atgttggctattctgatattttttttaaaaaatgcacagatcctgggtatcgatcttacgcacattgataaaattgtgttatcacatggacataacgatcacacttgggggttaaaccatttattccagcattacgacagacttccttcacctccagcaaagaaggtcgatatcatcgcccaccccgctgcatatacgcctaaattttattcgtcaaaacccattgggatgaaccataatgccctttgttttgattacttctttaatatcgtcagttccacgcaacccctgaaattatccgaagacatcacttttttagggcaaattccccaccttaaccattttgaagcgcaaaatccggtaggccacacacataatcatgatggtgaattaacggctgattacgtgattgacgatagtgcagtggcagttaagacaaaggatgggctggtgattgtaatcggatgctcccatgctggaattagtaatattatcgagcacgcaaaatcagtcactggagagtcgaaaatcgcttctgttataggcggttttcatctccttaatgccgatgaatcattactatcggaaaccggaaaatatctcagcgcattgtcggctgatacgctttatcccagccattgcaccgatcttgccgcaaaaatccatctgtctcgttatgtgggcctcaaagaaacgggcgtgggactcacgctgactttccccatgtag

SEQ ID NO: 168053 - DNA, 141 bp, Enterobacter cloacae
atgcagtcgctgtacgactgtattcaggtgcagatgaaagtgctgtctcgccccccggatacggagaaggctttcgcgtacctgctgaagccatggaacacactgaacctatatactgcagcaacgacagggcggaaatag

SEQ ID NO: 168054 - DNA, 1101 bp, Enterobacter cloacae
gtgagcgactactggaaacaccagctttctaaggttatcgactacttcacccgacaaaaaaaaccaagctttgtcctgatggcgacaggtcttgcactacttgcaggccagaaagtaatcaattttgctatcacaggtaccttcagctgggggacgcttagcgttggcacggcagaaagtaacgttgttaccgactatataatcccggctctgggtgtaacgctaataatcgtcgggatggtgctgatagccattaatgaagctcttgctttacgtcaaaatacgaagaaacggataatactcatcaccggggatggcctcaggacaacggtgggaacaggtattgagacaaccgcaaaagctatattgaagggtactattcatccctcgggcatcaacattactcagcagatacgtgacggcgtggttattgaacctgaacgagtattcacaaggcagattcaaccagtcaaagaaaacctcagccagctctttgcgaatacaacaccagggacaactcaggttgcttatggcggttttctgccagtccccttcacttttttcctgggaaacgttctggatgataaaggggatgtcaatgtcttcgactgggacagaggaaatgagtgctggaaacacatttctgataacaacccggatgacggcgaaagctttatatccgaaacggttcgcagcagcacatctgaccagactgtactcgtactatcctgctcttatcgggttgatatctctcaggttgaacgcagttttgcggagaccggcattgaacacctcatgctaccaacaaatacatttaataatcactggtcactcgctaaacaacgccgattgtcgatgcaatttgctgaaacaataaaatcactttcatctcaggggatcaaacggatccatctgatactggcagcacagagcagcgtggtcctgaatcttgcgcgtcgatatgatagccggaatatgccagagctcatcgtttaccagtatgaacaatccactgataacccttatccctggggaatatacgcattgtcacatggacatgaagacggtggttttgtgtggcacatgcaaaacggcgtctga

SEQ ID NO: 168055 - DNA, 486 bp, Enterobacter cloacae
atgaatgtatttttgcgcggccgtcgccggacacttgctgagcaatatcacggattgcgctccagattccccggagctcgctgctacctgactggtaataataagaaacttatctgggaaggggtcctttcgccaggacctttcagccgggaatacactgttcgcgtcgaatacagtcccccctcatcaccggactgttacattatctcaccaaaccttaaagaactatcccaaggtaaaaggatccctcacacctatgcaacgccaccttatgacaggagaacacagctttgtctgtttctgccaaagcaaaggcatccggagaaattgtctgaatggcgaccgcaattgctgttgagcgaaacaatccttccctgggcatcgttatggctgttctattttgagcagtggatgttttccggaaaatgggagggcggcggagctcatccaaatcctgatgatggcggaacctattccgacaactag

SEQ ID NO: 168056 - DNA, 1284 bp, Enterobacter cloacae
atgagcaattcacactcagttttagcacttagcaaagaaaaaaaagaatatatcggtgattttctggactttatcgtcgatacgcttgatttatctgaaacacaatacggactgataaaaagagcttatgagtctgtcggtaggtatcttgcagaaggtgatgatccgctcctgtctggggcagtgatttactcgcagggtagcgtcaggttgaatactaccgtaaaaccgaaaggcagcgagcaatacgacgtcgacctgctttgttaccttccaaatgcaagcttagattctggatgggccaatgtactcgaagctgtacgctccagacttgccagccacagtacctacagtgagatgttgagtcccctccccagagggcaccgcatcatgtatgcaggtgaatatcatctggatatcactccaggtattgactggagtaataatcactcagaagaaaaccatcctcttatggttcctgactcccgtctccaggactggaaggaatctaacccggcaggctatgcaacctggtttgatgcgatcactgaaaaatttcccgtattttttaagctagaagttgcgtgtgagagtttcatcaaatcggcagctgtccgaccattgccagatcatacgcaaaaaaagctgttgaatcgtattgtccagattttaaaacgccaccgggatgtttgggctgctgaagggggcaaagaacgcgttgatcacaaacctatatcggccatcatcaccacgctggccgctcacgcttacaatcgtatttgtgacgaacgcagagcctatgatactgattttgatgtgatcctggacgtgcttgcactgatgcctgaatatatcagatgtggctcagggatctattccgttcccaaccccagcatgcctgcagagaactttgctgaaaaatggaatgtcggagaagcaagaaaaggcgaaaagctcaggaataattttgagctctggcatcagacagtcacaaacaatatcatcgagattgcgtcatcggtgggcgaagaccagcttctggataaactgagtaaatactttggtgaaagacccgttaaagccgtccaggaagccatgctcggaggtgttaacactgcccgaaacaacaacacattacgttcttcagcactgacaggggctctaactgccggtgtggccagtacagctgcagcctcaaccagaacggtgccagcaaacaccttttacgggagtgattcgctatcagcaacccccgttcaaaagaatacattttttggagattaa

SEQ ID NO: 168057 - DNA, 501 bp, Enterobacter cloacae
atgtatgacggtgagcgtcagacattcctgagcggggaaacccttgcgggtgaggtaggcgttgccggtggccggtcggattttatccatgagcctgacggccagcgcgaccgccgctttgcggtcggcactggttgcagcctctgcggccgcaatcacttccggggcaaccggcggcaggttgccggtcacggcgttcaccttccgggcggcctcagacggatttacaccgaacaccttttcaacaagcctgagtccgtcacccgaaccgcaccggttgcagtaccacgtgccgcgcccctccaggtcatcaaagcgaaagcgatcgctacaggcatcaccgccacaaatcgggcaggcctgatggcggtttttaatcactttcacacccagcgcagggagaatgttcgaccagtggccgcacgcctgttttaccgtttctgttacgttcattttcatcgttgttttctccctcagtgcagtaccggcgacgtgatatga

SEQ ID NO: 168058 - DNA, 648 bp, Enterobacter cloacae
gtggaatatattacaaaaagccaggttgcgaagcggtacgggtttgatctgaaatctgttactaactggatgaacgaacgcggcgcggactcatgctggtcaacggacaaaagaaaatttcgcgaacctgagattaccgaatgggtgattaaaaatatcattacccctttacgcgaagtagacaacaaagagttaatggatcaggcgaagttacgcaagctcgatgcagaagcgcgaattgtggaaatgaccgcacgggaaaaagcaaattcgttaattcctgttgaattggtggaagcgtcagtttctaaatttagttcaatggtcagaacatcaatgttgcaaatcgctactatccaaacacaacagattcttgaagctgctaccgataccagaacgctaaaaggtgtactcgcggaaattatcaacgaacggttgaacgaagtagggcaggtaatgaaatcgggtaagttcttagatgatgaagaaataacacagtattcagaagacgaggatcacaacgatggacatattacagacgatagcactattgaacattctgtttcagacgataacgattctgttaacggggtatctgatattggatctgatccagatgattctaaccctgatttcttcgaagattaa

SEQ ID NO: 168059 - DNA, 405 bp, Enterobacter cloacae
atggacgcgctgaccaccggtcgcaggatcaagtgcctgacctgcgtggacgacttcacgaaggagtgtctgacaattaccaccgccttcgggatttcaggcgttcaggtcacgcgaattcaggacagcattgcactgtttcgcggctatccggcgacgataataactgaccaggggccggagtttacctgcagagcacttgaccagtgggcttatgagcatggggtggagctgcggcttatccaaccgggcaagccaacacagaacggatttattgaaagttttaacggacgattcagggatgagtgcctcatgagcactggttcagcgatatcgttcacgcgaggaaaacaattaatgactggcggcaggattataacgagtgtcgtccacattcatcgctga

SEQ ID NO: 168060 - DNA, 1431 bp, Enterobacter cloacae
atggacatattgaagtggactcttcgcacatgtagaaaagcagagtcctggctgctcaaattcgaagaacaaaaacctgtagataaacctgccccttatgatactttagcgcctaaaaccattaatgatgaaagtatgcaggagtacttttctgcactgagttatgctttctcgcagagtgatgtaagaaatgttgctgttacagggaattacggcgcaggtaagagtacgatcatatcatcttttatgaaatatcactgcagtcaaaaatatattaatgtatctctggctggatttgaaatgaccgaaaaaaacgatattgtcggccccgcgcatcaggaaatagaacttagcattttacaacaaattctttataaggagaacaggagtgctctgccagattcaagaatagatcgaattcaaaacaaagatcgactacacactctacgtacctatggagctcttctgaagattgctatacctgcagcactattttcaggagttttattttttaaaacaatttctgattttttaaatctccctaatgactggagtgttgctttaactgataattattctttgaaagtgctgttactaacaatttttgcttttacgtctttgtacttcataacagattgtgcaacaaaaattgggatctttgataaaaaaataaaacttagtaaaatcgcctttttaagcggagatgttgaggtcagcgaaaaagaggcttcatctttgctgaataattgtcttgatgaaatcgtatacttcttctcacgactaaattataaagtcgttatttttgaagatcttgacaggctaggcacgcctgacattttcgtaaagcttcgtgaaatcaataagataatcaataacaatattaatgatgataatcctgtcaggtttatttatgctgtaagagatgacgttttttcgggagcggatgcaagaactaaattttttgattttattcttccagtcgtttcgtttatggatagtcggaacgcattcaccttattaaagaaaaaaatgggcttacataatgaaaatgacacacacttaaagaatctctcactatatataaatgacatgcgaagcttgcagaatataataaatgaatatcaaatcttcagaaaggttgtagacaattccgctcatgacattagactgttatcaattgttttctacaaaaatatttttgcgctagattataatttatctgataaaaaaacaggggttttatattcatttatcagagattatcgcacacgaaatttacaccattaccattttaatttagttgaaaataaattatctgcgctaaatgaaaaactagatgcgcatacaaaataccatgatatatctaaagaacaaattaggaagaatattctctccagatttattcctgatttttttgtgggatacatttaa

SEQ ID NO: 168061 - DNA, 336 bp, Enterobacter cloacae
ttgcagttgctgattaagccggtcgatttccttcagcgcggcatccctgtccagcgcatcaccctgcgctttcatctgagcatccgcagcaacaaacagtcctttccctgcccgcagagttccccactcatcggtgcgcagctcagtaccctgaccgcgggtctttccctgagcatccaccaggtggccagtgttaagctgggttttcccgtactccgtggcgagcctgatatgctcctctccccgtttatcctccatccgcagcttgttgttcgcgggtgtgcgcagcacgttgcgggtgtggttgtcgcgggtgacggggtccgggtgctctga

SEQ ID NO: 168062 - DNA, 999 bp, Enterobacter cloacae
ttgcgccggtggccggatggcgtcataaatggctttcccggtggcctcttcacctttctgcataaatgcatcattccagtcaccgaacaccggtggcagggcaacaatgccctcacaggcatctgcggccgcagcggctttgctctggccatcgccgttcaggtcacggtcggcggcgagcacaatctgacaggccggatatttctgacgggcaaggctcgccagagaaaggaggttcacggaggacagcgccaccatgacggtttccccggtcaggtgatgcacggtgagtgcggtcgcataaccctctgcaatccacaggcgttttccggcctgttttttcccttcgatgatatgacatgcccctttgacctgaccgcctttcagggtgcgtttgagaccgtcagcattgataagctgaaggttaaccagtgcgccggtaccgtcatacagcgggacaaccacatcaccggtgcggaacgtcacgcctccggttttatgtatgacggtgagcgtcagacattcctgagcggggaaacccttgcgggtgaggtaggcgttgccggtggccggtcggattttatccatgagcctgacggccagcgcgaccgccgctttgcggtcggcactggttgcagcctctgcggccgcaatcacttccggggcaaccggcggcaggttgccggtcacggcgttcaccttccgggcggcctcagacggatttacaccgaacaccttttcaacaagcctgagtccgtcacccgaaccgcaccggttgcagtaccacgtgccgcgcccctccaggtcatcaaagcgaaagcgatcgctacaggcatcaccgccacaaatcgggcaggcctgatggcggtttttaatcactttcacacccagcgcagggagaatgttcgaccagtggccgcacgcctgttttaccgtttctgttacgttcattttcatcgttgttttctccctcagtgcagtaccggcgacgtgatatga

SEQ ID NO: 168063 - DNA, 717 bp, Enterobacter cloacae
ttgcgccggtggccggatggcgtcataaatggctttccgggtggcctcgtcacctttcagcataaacgcatcattccagtcaccgaacaccggcggcagggcaacaatgccctcacaggctccagcggccgctgtggctttgctctggccgtcgccgttaaggtcacggtcggcggcgaggacaatctgacaggccgggtatttgtgacgggcaaggctcgccagagaaaggaggttcacggaggacagcgccaccatgacggtttcaccggtcaggtgatgcacggtgagcgcggttgcatagccctccgcaatccaaaggcgttttcctgcctgttttttcccttcgatggtgtggcacgccccttttactgccccgcctttcagggtgcgtttgagaccgtcagcattgataagctgaaggttaaccagtgcgccggaatcgtcatacagcgggacaaccacatcaccggcgcggaacgtcacgccgccggttttatgcatcgacgtcagtaccggacattcccggtcggggaagcccttgcgggtcaggtaggcgttgccgctggccggtcgggttttctccatcagcctgacggccagcgcggccgccgccttgcggtctgcttcggtttcagcctctgcggccgcaatcacttcgggggcaaccggtggcaggttgccggtcaaggcatccacctttccggcggcctctga

SEQ ID NO: 168064 - DNA, 144 bp, Enterobacter cloacae
gtggtagcgttttggaacgcggttgaatccgatatcgctgaaatgagcgacggcgaccgtaaagagttcatggccgagctgggtctcgaagagccgggtctgaaccgcgtgatccgcgcgggccaagagatgctcagcctgtaa

SEQ ID NO: 168065 - DNA, 228 bp, Enterobacter cloacae
atgagacacaccaccattaccgcccatgacctcgaatgccttgagcacatgcgcaacgtcggccagctcgtcaacgagctgatgcaggtgcaggactgcgcgaccgttcgtcgtgacccggcgcagcattcacagctcacttccgtgatttacctcatgaccgcccagctcgacggcgtggtagagcgctgcaatcagcgctggctgaccggggagggcaacgtatga

SEQ ID NO: 168066 - DNA, 315 bp, Enterobacter cloacae
atgtgcagggtgaatgccagattatcagcgtgcgtaaaaatcgttaaatcaggtagttgcgaaggtcgtagaagaagacccgaacacaagatttatcgcgtgttacactcctattatcgcaccagttatttcaattacttaccttacattcaagtaaaccacattctcctcttgtgccgtatttgtgacattgcgaccaataatcgcatcaattttgctcgcgtgctcagtaagatgtccggcagacaaatgtgcatatcgttgaaccatttccagcgtctcccatccacccatttccttcagcgccagaagtga

SEQ ID NO: 168067 - DNA, 702 bp, Enterobacter cloacae
atggcaaaaaccctcgcccagattcaggcaaagcacgagcacacatatcaagatgaagacggaaaaactgtaaaatcgcaaaccttcaaaaaggacttcaccttcttcgaagacattgaatacctttattcaaaaaactgccccgatgggataaaaatcgacagttttcacgtcgctttgtattgccgctttttgagttatcaagcgaacggtagtaattgctacgagagccacgctacgttggcgagaaaacataaaacatcatcttcaacggtaaaaagacgtattgaagacctaagaaagttaggactggtgataacagacgaacacccagatcccaatatttcatcgctgctttatactgcattaccacttactgatgctcatgttatcccaccagatcaattaccagcagcacccattatcgtttctaacgaagtgccagcccctgatccagtgaagacagtagaaacccacgaagacataccagcaataacgcctcaaagaatccgtacttcagacgcagtgaaacacctgtttgaaaatttgtcacaacggcgagaggacgagagcttttattcctggtcatcaagagtgcttcaacgaatcggaatagatcattcaatgggaatcgagcaactatttcaggaaacacacccgtatgaatacacccagattgaacaatcaacgataccattttaa

SEQ ID NO: 168068 - DNA, 1425 bp, Enterobacter cloacae
atgtttaaaataatatccattatggaacaaaataaagctataaatctttctgaagataaagataatagccataacacattcactgtcattactggtaagaatgcctgtggaaagagcagtttacttggaaaaatagtaaattcatttatttttcaaggagagtcaaaacgaatgaatctagcagaatcatctgttagccaaccaaaaaaagtcatagccgtatcaacgagtagatttgataaattcccgacaatagaaaacgctaaaaataacattaacttctcagggtcttataattacttagggtttagtggaaaacactcgtcaccatctgatatattatccgatggttttctttctataataaaggggattatgcatgatgataagaacacttctcgaattggtgacgtttttaattatctaggctttaatcaaaatatcagtgtcaactttgatataaaagtaaatattggttacttacatacaaaagagtacaataattatgcaaaaaaatatatagcatcgattgataacaaaatatataaccataatgaaatgagagattatataaatttttcaaaatggttcaaccaaatttttcttgaagattatatagcacgtgacagcgacataaaacatcacttccttaaccaaaaagacacttatcaatccaatatagatcgcttaagttttttaaaatacatcgaaaatacaactaatagttttggtgggaaaaactttaatatcaaattcgatctttacgataaagatagtattgataaagcagattatgaatggcttatatacctaatgtctaaaggtgcagttaaggtaaaaaatataaatcttacgaataagaatgaaaaaacatcttttagctttaatcaagcaagctctggtcaacaatgcatcatgaccatgatgataggcattgctggttcaattgacgataactcactgatttgtattgacgaacctgaaattagcttgcaccctcaatggcaacttgattttataaaattactacaagaaacatttaatcattataacggctgtcatttcataatcgctactcattcgccacaaatagtttcgggcttagagcaaaaaaatggatatatttgctccttggaaaaaaataaattacatgatgcattaactacttcaaaaaaatctgctgattttcaattggctgagatttttaattcccctggatataaaaacgaatatcttttaagggttttattatcttttttaaccaatcctcatgaattctccaacacttctgaaaattctctttcagaaatacaaagaattataaatcaaaaagaaaatataacacctactgatcctgtatataaattaatttgtctagcggaaaatgtattgatggagggaaaaaatgtacttaacctccaatga

SEQ ID NO: 168069 - DNA, 714 bp, Enterobacter cloacae
atgtacttaacctccaatgatttaaaaggaatttgcaaatctgcctacaatgacttcgccgctttgccggaagaggaaaaaaaaggcacatattggaatgacctagagaataaagaattaagtcatttcaaaacatttgtgaaagatttttacatgagaagtcaagactttacatgtccttattgtaaacaacgtatcgttgttgatcatcaaggaatttgggatgctgagcatattatccctaaagatactcacccacactttttgatggaaccgagtaatctttgtgtctcctgtaaggattgcaattccgaaaagggaaataaaaacgtacttaaaaataaaaacagaaaaacacttcctgcaaatggagatgattacataattagccatccgaactatgatacatatactgacaatataaaaataatagaattgtgtgggtattatctaccaattaatgataaaggtagggcaacaatagagatttgcggactcctacgttttacatatgagtatgcaaactatggtaatctttcattgaaaactaaagagttaattaatcacttaagcactgagttaataaaatgctcaactccatatgaagaagcagcattgttaggtttcataagagaattggcaacaaaaggattagcgcagatggctgaggattttcttgcggctcaacagcaaaaacttaatgctatggcttag

SEQ ID NO: 168070 - DNA, 255 bp, Enterobacter cloacae
atggcactggttaaggtgattagcgataaccttttctccggtgccaacctccagaaactggaggttggtgcaaaggtggaggtcagcgaagagactgcgaataagtggaaagtagctggtttggttgaaatcgtctcgggtggcgatcgcaagcttgaagtcgcctcgccgggcgatactcctgcagagcaggcagagcaggcagagcaggcagagcaggcagacacctccgctaaatcgaaaaaggcgaaataa

SEQ ID NO: 168071 - DNA, 171 bp, Enterobacter cloacae
atgacgtacaaatcagttaagcacggactgcctcgctcattcacccgcgtctgggtgatgacagacaccgggcgggagactaccggctacgttaaatcggacggcgagtggcatatcaactgcgcgcgcatccgggcgactggcgcgaaggtactgcgctggaaggagtga

SEQ ID NO: 168072 - DNA, 360 bp, Enterobacter cloacae
gtgtcggcaacagctaactggagttacaccgccactgcgaccatctggcgcaagctggcaggcaatgacgaatacggcgacccgatgggctatgccgagcctgagcaaatcatggtggattacattgcagggttaagcgcgaagattggctcgcttggtacggaaattgtcgttaaaaacactttctttaccgagtatgcgctggcaaacgagggtgattatatatttattggcgaaagcactgtggccgatccggttgaagcgggcgctgacgaaatccgcgctgtcactaggtggggagacacgctcgaaaggctggcggacgactgggctttgatcacaagcgccacaatgtactga

SEQ ID NO: 168073 - DNA, 369 bp, Enterobacter cloacae
atgggcgctaaagttcgcggtatcaggcaggccaaagtcaacctgaaccgaataatccaggatgtgcaagggcgtaaagttgttcgagcactgcagtctgcgctcattatcggctcttctcaggctgcgctttataccccaatcgacacatcgaccttaatcaatagtcagtttcgcgaaataacagcaaatggcactcgggttaccgggagggttggttactccgcgtcatatgccgtatttgtccacgaccccaacgttcaacagagtttccgacgagctactgctcagaaggagtttctgacgaaaggatttgaagacacgagaagccagattgacgttgtcattaagaaggaattgtctctatga

SEQ ID NO: 168074 - DNA, 381 bp, Enterobacter cloacae
atgacatcaccgatgtacgaacgggtccggcagtatttcggtgataccggtctgaccgatggatacatcgtgcaattgctggctttcgaagacaccaaaaaactaacggatgccttcatggtgtttcgcccaaacggtggctcaagcattcgtaatgaccttggcgctgactattacactatcgtcgatgtgatatcagcgaaaggcaaacgaggaccggcatctgaacgtgtacagcagattatcgactacgtgcaggataatccgatcaacgactgcctcggcattattgagaaccttggcaatatcccggctcctgttctgaccgaagagggtcgactcgtattccgtctccagttcgtctgtgttttcggcgaataa

SEQ ID NO: 168075 - DNA, 753 bp, Enterobacter cloacae
atgcagggctgccagaatgataccggtaagctaatcggtaaagtagcagtattacgtatggctatgggctgtgcggacgccgtcccggcactctctgagtggcaacggcttggtgcaatgaccactaaaggcatcgactactcgatgaacaccgtcaattccgaggcagatgatgctaagggcttggtggagaacctggtcaacaacatggacctgaccatttcaggcgaaggtgagttccggaaatcagacaaggccaatgagattggtgcatggcgtttgtcgaaatatatcttcgacgaagtgcaggcgggacgtcagccgacgctatgggtgcggtttgatttcgtgggagaggatgctggcacatacattatgggctacatgaacaccacctcctggtctggtgacttcggcacttctgatatctcgacattctcgggtgagtggaaagtttacgacgccgacactgttgtgtttgaagtggctgatgctattgcggctactggtgtagaagtcacgccagctactgtgtcgctcgcagttggaactagccagcagttgagcggttccgtacttcctgtgaatgcgaccaataaagcgatcgcctgggcatcctctgacgaggcggttgccactgtgactgctgacggattggttaaggccatttcggaaggtgaagcgacaatcacagccactacgtcggatggcggattcactgacacatctgaaattaccgtcaccgtaccgtaa

SEQ ID NO: 168076 - DNA, 690 bp, Enterobacter cloacae
atgacccccatcaaagagataggcgagtgcgttattggcgcgggagaactggaatttttcttccgcccatcgttccgcaatatgacccgcatcggcgagcccgctgagatagtccagacgttttatgacctgtgtaatgacgaagttgagccatttttgcaacgggctgcggccgcgtacattcacggcgaatacgggcaaatgccagattgcgttatgcaatacatcagaagcgggttgctgacgcggaaagccattatggctgcacattcggtgctgacggcctgctgtgatgaagatgttggagatctggttgggtggatgaagcccgcgaaatcacgtaagcgtgtaatggtatggcgtcctggttcgctgccgccggagaacatggtcatcattgcgcagaacctgatgattcacggcattatcggcaaagcaaaggtgcgcaagctacagcgtcacgagagcaacaatgtcaccactgagtttcacgccgctgagtacatcatggcggccaggaatcatttcggtatcagtcgcatggaggctgagaatctgaccatgacggaattcgccatgatgattaatgccaaatatccggatcagaaaggcttcacccgcgaggagttcgatgcagtcatggaagaagatgatcgccgctggcaggcgatgctggaaagccagaaataa

SEQ ID NO: 168077 - DNA, 591 bp, Enterobacter cloacae
atggtttcgccacaagtgaagtttattgtggttggccaccactcgcgacacaaacaagcgttgcgtctggctgaatctctcggtgctgttctactaatcgattgcggtgaccacggcgcgaattggaatcatcgccgcgcgcttgagtgggctgcatgccaaccatgcagagtggtagttctggaggatgatgcacttccagtttctgggtttactgagctggcggtcgactggctggcccgctttcctgacgacatgctgagtttttatctcggtaccgggcgcccaccgcagtatcagatgcaaatcgccgaacggttcatagtggctgacaagatacaggccaaccacattacgctgccgcggctaatacacggcgtgtgctacagcgtgccaccgcagcatatcaatcgtgtactgcatcaatggaacagcagcaagcctgctgattatgcggtaggtgatgcctatggcggcgctgtggtttatccgtgttactcgctggtggatcatgctgacggcgaaccggttgagcgtcaccctgactcagcgccacgaacagaacgccgccgggcgtggaggttagcctga

SEQ ID NO: 168078 - DNA, 1770 bp, Enterobacter cloacae
atgcgcacttgggccgctcctgaaatgcctagacccgggtgtgtgtggactcatgctttgcttataaaaccaactcttctagagtcattttctgatttatcgtttcttcaatctcttgttactaagcctaacgtcttgtttgacaggaagagctatagtgagcctttagaaataaaattatctgatgtttactctcgagaggaaaaagttaatgatgtaatagtacgtaacttacttttatctctttacgaaacggggaacacgacagtccaaataagttcgcctggagagcttgatataccattatttgctgtttggtcgcaacagtggccaagacttaggcgcaatttccgttttcaaactgcggcttcacgcagcataagaaccaatagttccactcgttttgatatcatggcgttattatctccacctgaaaaaaatctatcggatcaggttactgcgaattctaagtggctatctttagcaacgtatgatattcagaaaggtaataagaaccctctacgttcgttcttgtggttttacggacgcgatgttcgtcgtcaacgtggctcatttcgcccgctagttgagatctatgaacttgatttttataaaaatgaaaacactgctcaacagctaattaatatcattttaaatgcgtttcctacattgaaagatgcggagactctaaagcaagatattgtaaatggtattttgaattccgatgcccaaattgatgtggttaaatttattttgttgaatgcacataatgaaatgaatatatttccctcaccaacttccattggtatcgataaactatctagcttttggcctatgcgtgcggatggcattcttcagataattgagttatctgctgatattaagtcagaagtaggggggaggatttttgaaaaattagttaataccgttcaaggtcctgagttttggccattatctggttcatatccttattcgcgaaaacttctcgttaaagctaatcctgatatgttgattagtgagaaggaatatttgaatgatgattctttaatagaacttattccggtaataccgaaaaatacaaggggtataaaagaatttatttctaagttattggtgcgtggtaataattccctcgctaatacagtgtttgaatgtttccctaatgaagccatgcaggctattatttgtaaagtaaatgacagtaacgaagtaattgcaggtgtctgggttaaaagtctaataaaaaatccagacttgctactccaagctaatgtgatgggtttgattgcccgtactagtttactttatgaattagcagattctttaggatgggtttctactaaagtgattgatgcaggtataactccttggcattcagcgattattaattcacaaaatgatctacatgggaataaactggatgctttgggtgttttcctcataattttagcatgcaaaactgggggagaggacgggcttagtatagttgagcttttctatgaatttattcacaaaagaattttgaattctaatctttcaaacaaggcaactgaaatgctttcgccttttttacctgatgtaggctggttttggaattgggatcaaggccaacgttttcgtatggtaatagctaatgcatttattagtaataaatggtcaccacacaactttgcttctcttgcaaaagatacaaaagggcgatctttgcttgctaatacagtatccgatataccaaatggtaaagaatatttcaaagcgatatctgaatga

SEQ ID NO: 168079 - DNA, 312 bp, Enterobacter cloacae
atgaacaagataaacgctgaaatgaaaccttactgcgtcgggcgctatatgctcgacctgccatcctcctttacagcttataatgacgctgcaccgctgaataacaatatctgggcggcggtgatttcacggcctgaggatatatataaaacctacctggcgacaaagaaaatgtaccacccagcttttgtgcagttaatcgcattacgtgaaaaggcgctacaaaacagtaaaaccatagacgcccgggatatgccgtttttaaaaaaaagtctggccgttacccactggtatggatggtgttatttttga

SEQ ID NO: 168080 - DNA, 1260 bp, Enterobacter cloacae
gtgaattttagtgggactaaataccaattggaacatgagataagaatgcacaaagatccctctataatagttaatgtcaatcttcgcgaagccaaacttaaaaagaaggttcgtgagcatttacaatctttgggttttacaagatctgattcaggagcgctccaggccccgggaaatactaaagatgtaatacgggcccttcatagtgctcaacgatctgagcggatctttgcaaaccaaaaattcataacgctaaaagcggcaaagcttatgaaatttttcgcatccggtaatgaggtcattccagatcagatttcacctgtacttgaacgcgtaaagtcaggatcttggcaaggagatctctttaggttagcagcattgacttggtccgtgcctgtttcaagcggatttggaaggcgccttcggtaccttgtatgggatgaaagtaatgggaaactgatagggttgatcgcaattggtgaccctgttttcaaccttgcagtccgagataatttgattgggtgggacacccatgacagaagttcccggcttgttaatgtgatggatgcatacgtcctcggtgctcttcctccttataatgccctgcttggaggaaaactaattgcttgcctgcttcgtagccgcgatctttatgatgactttgcaaaggtctatggtgataccgttggggtaatatctcaaaaaaagaaacaagcacgtcttttggctattacaacaacatcgtctatggggcgctcatcggtatataatcgtttaaagctggatggaattcagtatttaaaatcaattggatatacaggcggttgggggcattttcatatacctgatagcttgttcattgaattacgtgattacttacgtgatatggatcacgcttatgcagatcattatatgtttggaaatgggcctaactggcgtttacgtacaactaaggcagctttaaatgcattaggttttagggataatttgatgaagcatggaattcaacgtgaagttttcatcagtcagctagccgaaaatgcaactagtattctgcaaacaggcaaaggtgaaccggatctaacctctttgctttctgctaaagagattgctgagtgtgcgatggcgcgatggatggttccgcgatcaatacgcaatccagaatatcggctttggaaagcaagagatctatttgattttattagtaatgattcgctaaacttacaccagtttgatgagaaagcgaaaacagttggctaa

SEQ ID NO: 168081 - DNA, 1644 bp, Enterobacter cloacae
gtgaactacgccattgataagttcaccgggacactgatattagcagctcgagcaacgaaatatgctcgatatgtttgcccagtttgtgaaaagggtgttagcctccgtaaggggaaggttgtccccccatattttgctcatttacccggccatggtacgtcagactgtgaaaattttgttcccggacattccttcattgccgaaactattaaaactatttcaaagcgatgtatggagttacgcttattgattcctgtcggaagtaatagtcgagaatggtcattagagctagtgttgccaacctgtaatttatgtagagcaaagataacgttagatgttggaggcagaagccaaacgcttgatatgaggagtatggtaaagagtcgccagattggtgctgaattatctgtgaaatcttaccgtattgtttcatatagtggtgaaccagatccaaaatttgttacagaagttgaaagagaatgccctggtttaccttctgttggggctgcagttttcaccgctttagggcgtgtggcatcgaagggatttccacgagcacgagagttaagatgtactgaaacgtttgcctttctttggaggctccccgttgctccagattttcctgatgaattagaaataaaaagtttagctagcaaactgggatggaatttagctcttgttacaattcctgaaaccctttccgtggagagtatttcatggctaaaatcttttacacaccttcctgttgtccctgctagagcatccattacagcaatttggccattcctaaaccaaaacacaagtattaatcaggtcgaatgtgttcattctgacacaatattgttgtcagcaaatatggtatcaacatcatcacaaaatgttggaccaactatgtacgcacaaggttcctctttattactttcagcggtaggttttgaaaaatcacctgcattcttcattcttaatccaggggaaagtaagttcgtgggtgtttctggctcaattgagcaggacgtaaacttatttttttctttttattcaaaaaaggatgctcccagaaaatacccttcaatagatttggtttttactaaggaaaataaagagaagaccatagtttcactacatcaaagaaaatgtgttgaagttatgatggaagcccgaaggctcggccataaattagaatatatgtctatgccttctggtgttgaaggagtggcgagaattcaagggaaaactgagagtagtgttattaagctggtttctaatgatgacattgcagttcatgatgagagcatgcggttactctctcctgaagcattatctaaattatctgattgcttagcaaactcaaaatatcatgtagaaatagattttttagggctgggtaaaatatttttacctagttcttctacgttgtcattggatgaaggggaatttattgaattatctcctgatcttcgctctcggatattaagttttatacttcaaatgcgtctcataacccctggttttagtttaaataatgattttttattagttaaaaaattcgtggggttgcagccggaaccacacttattaccgcattatagagcattggtaaaagaagttaagaccaatggatttgaatttaatcgcttgagataa

SEQ ID NO: 168082 - DNA, 300 bp, Enterobacter cloacae
atgcacctgacgcagcggcaaggtgccgttgatcaggtcattcaggatgtgggtaatgtcgtggtgcatggtgtggataccagggtattgcccggcgacgctggcgcttgccgggcctacgaaaagcctattgtgggccgggtaagcgtaagcgccacccggcaaaaccgatcaaccggtgttacgcatccccgccgcaacgcccgcaatcgtcaccatcagcgcctgttcaacgcgcggatccggctctttaccttcctcttccgccagacgcgaacggtgcagcagttcagcctgtaa

SEQ ID NO: 168083 - DNA, 153 bp, Enterobacter cloacae
atgaaaaggtgcatcagcccctggagtgatgttgccaaaggtagtgtctatccttttaaagcctgtggttccataaaacaatcttccggttatggctggcattttaaaccgctgacctcattatacgtcgcacaaagccagcggttaacttaa

SEQ ID NO: 168084 - DNA, 627 bp, Enterobacter cloacae
atgtcagaccaaagcaaattttatgattactacatggttgaaggtgatgatgttaagtcgcttatcagctcatacgatgtcattaacaatcaacgcaactcaattctcccagccgcagcagaactggttggcgctatagcatggacaacaactcgtagttggggtggcggtggaggattgctgcaaagcttcgtttgggagaagggttatgagttcccatgcactatgacaataaagcgtgaggacttttgggacgggaagcgagtagtgatcgctcgcgggaaaggaaacacaaaagaaggtcgcgcgtataacaaagagcttgatgctgttatccatgaaaccaacgccaagctaaaggccctacctgagtggaatgactacatcactaatcattacgggattatgcgtacaggaataggcggtcaatctggtcgtggatttggtttcgctatgctttcgacttatggcggcaaagcgccggcgcgtgatgactgtctggtatttgccatccccaacaacatcgaagatcagcatggaaaggtggtaatccccgacaacttccaaaagctcacttacggtcagttttacgacatcgtgaatagcgagcctaacgaagccgcctga

SEQ ID NO: 168085 - DNA, 390 bp, Enterobacter cloacae
atgggacgaaaagagcgaaatccgattaaacggatagaaaaagcagtaagagcaacaaaacgtaaatacagccataagctaaaagattattcaagagaatctattcctggtgagatgataacaacgattatagaacaccctccaacggtgcccgtaggggcagagtatgaactattgcaggatgttttagcatcttcggataaggtttattacaaacctcgaaaaagaaaagaatacataattgacagtagccagcttaaatcctggcaaattatcggatttgaaaattattccgattatgtcgggtattcacaaactaacggcctgagtggtcacactgccgatttggattttttatttaatgacgatagggaaaattataatgactaa

SEQ ID NO: 168086 - DNA, 921 bp, Enterobacter cloacae
ttgattcaagcatacgaagacggttatttttacagagataccctgcaccacgatcaccgcccactttcagatttttccacgcctacccaaatactcgtttctttagataatgttctttacgttgtcatagaggaagacggtgaaattcttcactacgactcgacagagtatttgcttggtggtggcattgttcaggatctgcatttgagctactcgacagcagacaccgctaaatcaaaacaggcccaccgtgaatacgctaataagttgggcgaccttcctgggaatgcagcctataacgggatcaaggaatacgcagacgtattaagtaagccagatttcacaaaagtttttgcattgtgtagcgaagttgacaggcgaaacttagcatttattaaacgtgcggatctatgcgcaatacttaacaccacgccggatcatctcaaccgtgttttatctgctcttgaacgtaagcactacatcaaagttgataaagctgaacaccaaaaaggcgtattaaaactgtgggttaatccttcgtttgtctggaagggtgattcagctaaccgctacttatctggacatttacagggcttcccaatcttggagcgtaaacgccccacaaaacgttctgacgtcctcgacacgctcacggcggctgcaatggttgcttatgatgcctggtacattgaacacggtcataaggctaatcaaccttattctaatgaatggtatgcagagatcacgctctacgataacgcccacggcgaaggggtgaggcttgcagcagaaaatcagacgttgagcaagttattgaaccccgcaacatctgagagtgatttcattcgtgcgttattcacccctgcacaataccaagcttatctgcaaatgtttgcaaaactacaaaggagaatacattga

SEQ ID NO: 168087 - DNA, 387 bp, Enterobacter cloacae
gtgtttgcgggaaaaaaatcggcccagatccgcgaaattttaatcagcgagtcagcttgggaagaaatgacctgcttattcgcaccttccctaatgctacaggaatttcacgaccagcttcacattccgcttcttgatgcgactacggaagcctaccgacagggaacccctgagagcgtttctgaggccgttaaactgcttcatctggcctcagttgttatgcaagggattataagcgtagtggagcagtcagagagtctgaacgaggatcaaggcgtactacgcgaaatgtcgcaggtggctcagtcgcttatttcctgtatgcaggatttagacgggctggcgcatgacttagccgaagaatacgtagtactcgaaagtgaataa

SEQ ID NO: 168088 - DNA, 420 bp, Enterobacter cloacae
atgacaagccaatatgtattcagcgcaactacgctcgctttttatccattagcgctgatggatgactataaaaaagctggcagctggcccgctgatgttgtgcctgtggaagatgaggtttacctcgaattcctgactgcaccgcacgggaaaatacgtggcgtcgacagcaacggatttcctacgtgggtggatatcccaccttcgacatcggaagagctgaccgctgcggcgtcccgtaaacaatccatgttactggctgaggcatctgctgtgattgccccacttaaagatgctagcgacggaggatatattgacgatgacgacaagcccagacttgtggcatggcaaaaataccgctacgcactaacgaaagtggacgcagcaaaaccagagtggcctgaaaagccagcaacatag

SEQ ID NO: 168089 - DNA, 975 bp, Enterobacter cloacae
atggcaaacctacctgaaaccccgcagtgggaagacggcatctatcagatagaggtctctgaccccgttctgggcggccctgacgggatttctaaccgtcaggctaagcaactggccagccggacatcgtacctgaaacaacaggttgagaaaggcggtcagaatttggcagatcatattgccgccctgaacccgcacactcagtatgcgccgaaggaaagtccggccctgaccggttcaccgaccgcgccaacggtgagcaaaacggataacagcaccaaactggccaatacagctcatgtcaaaactgttgtcgccgaatatgctccactggccagtccgggcttaaccggtaaaccgacagcgccgaccgcagcgcaggcatccaatgatacacagctggccaccacggcattcgttaaagcggcgcttgcagcccttgttgcctcttctcctgcagcgcttgatacgcttaatgagctggcggcggctttgggtaacgatccgaactttgccaccactatgacaaacgcgctggcaggtaagcagcctctggacaatacgcttaccgaattgtctggaaagtccgtgtcagcgcttctcaattaccttggtctcaaaacagcggcatcgcgtgatgtcgggacgggagcaaaccagattccggatatgtccagcttcacaaccagtgcgagctcaacaggctggcagaaattgccatccggtatagtcatccagtggggacaggccgcatctgaccccaaaaatctggtggctgtcccgttccccattcctttccctaataatgttttccagataataggctcctgtcttgatgtcaataacgccaacgttgtggccattaactctacagacaagataaatctgaatctcgtggcgtatgttgtgtcgcagaacgtcgtcacagtgacgcgcactcagacgccagtaaaatggattgctataggtaactaa

SEQ ID NO: 168090 - DNA, 600 bp, Enterobacter cloacae
ttggaaaagtattacacgctcgattctgcaaatagtttgtatccattctgtcgcgtatctttagggcactacccgcctgaacagcctgaattagctgatttccttaatcagatgtacccggatggtttgtcaaatcatggtcgaaactatctctataatccggggcctataatggatggtggtggcgagaacggcgaaggtaaagctctattgattgggctagtattcgaactggttcggcgcagccactttcctgagaaaccgtcccgctaccagtctctgtttgcctgtgagcagttgaatgaagtgaagcagttcagagcgctattggccgaagagcgtggtgatgagaacatactaacagcaccaatatatgaggttcttagctgggagccagttcaccgtggtgatatgaatctgcttaatggtaattgcccggtgctggagctttatcaccgggcacacctttactggtctggggagccagcccccgttaagaaaggtaaggaagaggaaaaaccgttctgggaactgctgattccgctacctgtcgtgtttggtcatcgtgtgctggaaccgatggagccgtcaccggcttag

SEQ ID NO: 168091 - DNA, 204 bp, Enterobacter cloacae
atgaaaattaatccggcagcgacgacttgtttacaacgaataaaggccttgaatgctgataaccagcgttcagtcagggtgaatctcggtgtacttaaagcggcccgcagtgaaatcctggcccatgtcaagcttaacgggaaaggtgtaatgacagatatggttctcaatgcgctgaatagcgttattaacgatggcaggtaa

SEQ ID NO: 168092 - DNA, 492 bp, Enterobacter cloacae
atgcagcagaaaagccaattaactaatgagcgccttgcccaggtctatcgaaacctgaaacgctgggctgaccacgataacgctttaaatagctttatcagcggtcaaaagatagaccccatttttcatgattgtgtgcttgcactggctgaactacaggagctccgcaagcctaatcaacgtgaacaggttcgtcgtgagcacgctgaatggtctgatgccacattcggcaatatcggtcccgtcggtccacttaagcacctaagcaaagaagcactggaagccgctgccgatccgtccgatgcgcttgaatgggcagatatgcaatttctgttatgggatgctcagcgccgcatgggaatttctgatgattttatcaccatggcaatggttgaaaaactggcgataaataaggcccgccagtggccagagccgaaagatggagagccgcggctgcatataacagaaccaggtgcaggtaaggaggattaa

SEQ ID NO: 168093 - DNA, 1050 bp, Enterobacter cloacae
atgaacgagtcggttaaacttagtttttatcgagtacatgaatgtggttactactcatggggtaataatactcctgtttttggctcacttcaggagctcctgacagatcttcacctttggtgtacggataagagcatagaaaacacaaaactttatgagccacaagtaggtagtgattatatggcgacttacttgttggatatcaatagattaggcgatgattggttagttactacctggaatgaagttccatcaaccgaagcgggtgttgcttctgtgatgagggattcaaacgttactgcgcctgatgtagttatgaatcatatacaagataactctatccctggctatgccacctacttttggatgttacctaattatgggttatttgccagtttgcggtttaaaaatagaactcagacagggcaacctccattcaggaaatatattgaacaagctctttcattaatatcttcttatgtaaggtatgatgaggatgaagacgatggttccagacgggtgattggctatgcatcgaatggagaggatttaatgagtccaagtccttctccacgttttaagacatctctggcatatgatgttggtaatcgagagtacattagggaaaatgctaatcgagttagtaagattattcgtaaagagacattgaggttaaaccatgctgatgaacgacagtggtggcagtcagctttaagccgccttggcattagtagtggccatgattatcggagaatggatgaggtcaatgttaggtatgagctgcgcccggagttttttggtttacaagatgttgattcaatgatgcgagaatgggatgattctgagtatatgcgttcagaatgggatgattatggattcacgtttaaaggtaataccgctaaggtccattggttgagccatagtacattgacagcatctgctgaactaaatgttgtctgggataacaacgaagtcgtcaatggggaatcgttattatcggttttaactgctggtaaggctgtgctcttacaacaaatacgcgaggagtaa

SEQ ID NO: 168094 - DNA, 546 bp, Enterobacter cloacae
atgtttcggaacatactgaaatcgtttgccatactattactcatcgggctgatcagctcggggttttggtatggacgaaatattccgtttgcccagcagtccccacttttcgaagctcttcgaacaacagcatctatcatatttgctgttgtaggagcatggctggcaatcatttatccagaaagattacgcttcacattcaaaccaaacagtagtgaaaatacttccatgccagtgaatatggggaaattattacatcctgctgtaaactcaacatttattttgtgtatcgttctctttgttggagtcttagccccagtagttaagcaaatcccctatttaatcccctataaagaacctttacgaggtttgtcatttagtctgctcatgatgctcacattttggcaaatatggacggttattttaacgttggttcctgctgacatgatcaaaaacaaagtggatcatgaaaacgctaaagctacaggccgcaagagttttttttcgcaaacgcaaaaagtcattgataaaattaatcgttcctaa

SEQ ID NO: 168095 - DNA, 969 bp, Enterobacter cloacae
atggggcaagcatttgcgaatctgatgtatgacgcctgtcaggttttggggatattcagggaaggaggtaaagggcgggacatccgtgcacgcggaagctattggctgcatcaggagttttttaatcaacgttacaacgagatagcagaagcaattgataaagatcgggttttcagtgaggagaaacgacgcagtttcttctataaatacgaaatgttttataagcagcttatgtcatgtccggtgttcagtactctgagcaaggaccaggtttctgaacggtatctcaagtttgccctgcattcattcgtggctctggatatgtataaaacattcaggcctgataataagcacggattttactaccatcttcaccattttttattgagtgaacaatgctcgattccgggggataacgagagagatattttttctggtgttagagattacttgcgggaccgtattgatgaaattgaaattactcacaaaagaactctccaaccaattcgcgaacgtataataggcatcaaggatagtagcaatcaaaaaaaatcatggatgcttttcgaaatcgatgagtgcattggttattttaagaaaaatttaaaaagtgatgattttgaaaatattaaagcaaaattagacaattttaaagcagcatatgtatcacttactattatgttggcatttgaacgaaaaactggcctggtcaaaaacatttctcgttcttaccgatatctccaactggaggaggggctgactgacaactattatatagcattatgcaactatatttataaatcggagaattttgatgaaatgctgcttggtactcttattgatgaatttcaaaaaaaaaccatagcgcctttctctgtaactattgggaaagaagcctggcaggatgttcacgttatatgggctgtctcttatacacatctgacgctgccgacgaatagagaggtgtag

SEQ ID NO: 168096 - DNA, 222 bp, Enterobacter cloacae
atgtcaatgataagtgaaccaacaaatcagccattgcgcattctgcgtatgccagaactgacgatgatactcgggatttctcgctcaagtatctacgaaaaattgaatccgaaatcaaagtactacgatgctgagttccctaaaccggtccggctaggagctgcatccgtgggctggcagtcagtgtccattgaagcgtggattgcctctcgttctgtttga

SEQ ID NO: 168097 - DNA, 1503 bp, Enterobacter cloacae
atgaagaatgaaattatagaactaaaattagactttataagatttcccattattttacagatgcttataaaatgggttcagatgttaactggagctgccgtagagctgattttgccaacagcattgggagtcatggccttagcctgtcaggacctgtttgatgttaagtccagggacaggcctgcacatccaatatcactctttaccctgattcttgcaggttcgggaaaaggaaaatcaacggtattcagattactgatgcggccagtgtttcacatggaaaccaggctggaggaagaatataagcttcagctgatacagtataaaaaagagcttgccagttggaaaattgaacataaaagtgcagaaaaaaggtacaggcaagtttgcgatctctctcctgagaatcctttacggcttgaggccttggaaatcttgaatgcatgtactggtcgtgagccggaaaagcccttaagaaagcgttttacaatcagtgatgcaacaagcgaagcactgaggaaagaacttggcctcgagtacccgaacctcgtgattgcttctgatgaagcaggggggcaatttgagagtaatttgtatcgccaaacaccgtggattaattccctctggagcggagatagaattgcagctatcagagcatccagtaagggttatgccatcgaggatgcccgattgggtatccttgggatgattcagcccccattgttcggaaattttatgatgcgtcagggtaaaactgcccgactgtcgggatttttgccacgttgccagattatggatttagatcttaatccatatccctgtgatatcagtagctacccggaaccccacagcgctgtgctggatgattttgaagcgatagtcaccgagcatttactggcaggtatcagtcgtcgggaaaaaaaagaacaacgcccatgtattacatttaccccggatgcgcagctggaatgggataaatgtgatagcgcgataaaaaagctgatggagccaggcaatatcctcgaaatctacaatgatgccgctgcaagatttatggaacaggtaacacgaactgcagctgtaatgcagatgttcatcacaccaaactcagccatcattacgagggatacgctgctctcggcgatacatatagcaaactggtatcttgatcatttcattgccaaggtggaccaattcagaacgccaacggatgctgaaaaaatagagcgttttatggaaaaacagcttattaaaaacgagtctttcacttttgttcgtcgtgaaattcgtatcaatgggcctgtcagagattcagaacggctagaatctgcgcttgaggtgctcagctcacaaggaaaggtacagttgcttaaaaaggacaacactaattatgtcagatttattggctcaaagacgagtccgcaacaactgtgtatccggctaaaccttcccacagaattatggggaagcgttgtgctgagtaagttgcctgagcctgaataa

SEQ ID NO: 168098 - DNA, 300 bp, Enterobacter cloacae
atggcgacatacaattcttattcaatcaagcaagacattgaactctatcaagaagagttgcaggaaaaacacccacggctatctgagaaacggttagatgcgatccttgaggtgaaaagtgcaatagcgctacgttttaaagacattgccgacaaggacgaagcagcgaaagagcacattgctgtatgcaacattatccgagccaacaaagaactaagtaaggctgatttctcgaagtttatggactttgcgcaaatgtactggcgacagtatcaaagcgaatgtgctcaagaagcctaa

SEQ ID NO: 168099 - DNA, 549 bp, Enterobacter cloacae
atgaaaactgacgacgaaattgcaatctcgcaggagaaattgaaatgccttcttcagtacgaccagattacgggcgttttcacttggagagagtcaaaaggcaccgcaaagaaagggtctgttgctggaacagtaagcggacagggatatgtgaatatcaaattagatggacatatttataaagcgcataggctagcctggctctgggagtatggcgcaatgccagatggcccactggaccacatcaacggcaagcgtagcgataataaactcagcaatttgcgcctggcgacgctgtcagaaaatcagcacaaccaaggaatgagggctgacaataaatctggaattaagggtgtttcttgggatagcaagaacaaatactggagagcacaaattaagactaatgggaggctctttcatatcggatcattttccgacctcagcgaggccagaatggaaatggaaaaggtccgcgaaagactgcatggcaattatgcaagccacggtgaaagacaagcaactcctaagcacagaaggactaacccatga

SEQ ID NO: 168100 - DNA, 318 bp, Enterobacter cloacae
atgagcaacatcgacaaacgcgcgttaagggaggctgcggaaaaggcgactcctggccgctgggaatactacccgggaaacacgagcattgaatataacgttgactctatggatgaagatcagggttcaatcgtttatgtcgacagcggtgatttcacgcaaaagcagactgacctgaatggagctttcatagcctccgctaacccggctaccgttctggccctgctggatgaactggaagctaaagactccacgatagcagcacaacaacatgagatccgtatgttgttgaatgcgcttgagggtaaatcacgatga

SEQ ID NO: 168101 - DNA, 420 bp, Enterobacter cloacae
atgacggttgaagaaaatataaaaacggggattcgccaatcccgttcgttacaggttcctgaatacctgtatgactatttccctgtgctgaaagaaatgcgcaaacggatggcgggaaatctttccggtggtcagcagcagcagctcgttatggccagagctctcgccggtaaacccaaattacttttgctggatgaaccaacggagggaattcaaccgtcaattattaaagaaatggcaaaaatattacgtaagattcgtgatgcagaagggttgaccatattagtttccgagcaggttttaagctttgtactcgatgtgtcagataaaattgttgttattgagaaaggcaatattgttcatcaacaggcgcgttctggtgctgatgaagaacaaattgcgtcatatctgtcggtttaa

SEQ ID NO: 168102 - DNA, 492 bp, Enterobacter cloacae
atggtgcagcaattagagatatatccaacaaattatgaccatctggcattgatagctacttggaaacaaggccctgctacattccctgatggaggaatgttggccgagttagggccagttattgatactgatacattaaaaatgcgtggtttatctgctattttacccccattgaaacctggttgttttataaaggataaatgggcaaatattgatggactacaacttgaaagtgttgatgattatgtagatgaattaagagaattactggacgaagctggatttgatgggggaagtttgtggaagagaatggtccatattttttatacttcccttataaggattcctaatggaaattatgtttatgatctttattctgtcttgtctttctatactcttacatgggcaaagattaaaggtggacccgttaaaaagatagaggatattgctaatcgtgaattaaaaaatcatagtgcaaaaatatctgcttga

SEQ ID NO: 168103 - DNA, 1044 bp, Enterobacter cloacae
atggaatggaagtcagtatcacgagacaaagcacgggatatgatatcaactgcattaaattgccgattttctgatgaagggttgagaatttcagtagtttcagaatgcttaaggagcgtattacatcaatattctatatccgaaacagaagaagctaggcaaactgtaacctcgcttcggctcactagtgcagtaaggcgaaagttggtgcctttgtggccagacattgcagatattaatgatgctatacatccaggtattatgtctatattggacagtttggccgaattgggtgacatgattaagttagaaggtggtaattggctaactgctcccccacatgcggtacgcactgaccataagatggctatttttcttggtggagagccttcctgttcattttcaacgggcgtggtagctaaatctgctggaagagttcgcttggttgagcaagaagtttgtactggcagcgttgaaatctgggatgcaaatgagtggattggtgctccagcagaaggcaatgaagaatggtcatcaaagctactatccagaacgatttccggctttatcgacgcgcctagcgacatgagtgaaacgactgcgtatgtgcggggaaaatggatccatttgtcagaacttccttttaataataagcaaatctacttatgtaggatgtccattgataatctcttttcctattatttaggagaagttgaggctggacggctatgtagaatgaattcgttagaatcgtctgatgatgtcagaagattacgtttttttcttgatacaaaagataattgcccactaaaggtccgtatcaaaatatctaatgggttagcaagactaagattaacccggagattaccaagacgagaatctaaggtactcttactaggctggagagaaactggttttgaaaatgaacattcaggaataacacgccatgtattccctgaggaaatgttacccatagtgcgtagcgcttttgaggggcttggcattatttggattaacgaatctacacgacggaatggaatatga

SEQ ID NO: 168104 - DNA, 5259 bp, Enterobacter cloacae
  misc_feature (44)..(53): n is a, c, g, or t
atgattaataaaaataaagcaactgaacgttcgggtatacatgnnnnnnnnnnacatgagaccgtgaaaagccttagtgagaatctgagaaaatatattgaggcgcagtatcatatccgagatgaagggttgattgctgagagacgagcgcttttacagcaaaatgaaactattgctcaagctccttatatagaagcaacacctgtttatgaacctggcacgccatacagtgaattgcctattcccgaatcggcaagtaatgtgctaactcaactttcagaacttggaattggcctctatcaacgaccctatgaacaccaatcacaggcgcttgagtcattccttggcgaagacgcttctgatctggtcattgctacaggtacaggttccggtaagactgaaagctttctaatgccgattattggaaatttggcgattgaatctgccgagagacctaaatctgcatcccttccaggttgcagagcaattttattatatccgatgaatgcattagttaacgatcaacttgctcgtatcagacgtctttttggtgattctgaagcctctaaaatactgatggctggaagatccgccccagtacgcttcggtggttatacgggaagaacgccttaccctggtcgtcgtagctctaaacgagacgagctttttatcaaaccccttttcgacgagttttacaataaactcgcaaataatgcccccgtacgtgcggaacttaaccgcatcggtcgctggccaagtaaagatcttgatgctttttatgggcaaggcgcatctcagactaaaacttacgtctcaggcaaaaaaacgggtaagcaatttgttttgaacaattggggggagaggctaattacccagccaggggatcgtgagctaatgacccggcatgaaatgcagaatcgctgtccagaattgctgataacgaactattccatgcttgagtatatgctgatgcgacctatcgagcgtaacatttttgagcagactagggattggctcagagcggatgcgaagaatgagcttatcctagtgcttgatgaggcgcatatgtatagaggggcggggggggcagaggtagcccttttaatacgccgcctctgtgctcggttggatatacctagggaacgcatgcgctgcattcttaccagtgctagcttggggtccattgaggatggagagcgttttgcccaagacttaactggcttatcaccaacctcttcgaggaaatttcgaattattgagggtacaagggaatcgcgtcctggctcgcaaactgttaccagtaaagaagctaacgcattggctgaattcgacctaaattcatttcagtgcgtagctgaggatcttgaatctgcacatgcagcaatagaatctcttgccgaacggatgggctggcaaaagccaataataaaagatcatagtgcattacgtaattggttgtttgataatttgactggttttggtcctattgaaacgcttattgaaatagtttcaggtaaagctgttaagctaaatatcctgagtgaaaacctttttccggactctccacaagaaattgcagagcgtgcgacagatgcattactcgcattgggttgctatgctcagaggacttccgatggcagagtgctaattccaacccgcatgcatctttttcatcgaggattaccaggtctttatgcctgtatagatcccgattgtaatcaacgtttaggcaaccacagcgggccaactatacttggccgcctgtatacgaaaccattggatcaatgtaaatgcgcttcaaaagggcgaatctacgaattacttacccatcgtgactgcggtgcggcttttattcgtggatacgttagttccgaaatggactttgtatggcaccaaccgaacggaccattatcagaggatggggatatcgatcttgttcccattgagatattagtcgagggaacacctcatttacatagtgattaccaggacagatggctacatatagcaacgggactcctttctaaacagtgtcaagacgcgggttctggttatcgcaaagtttttatacctgaccgagttaagtccggatcagaaattacatttgatgaatgccccgtttgtacgcgtaagacaagaagtgatcagaatgaaccttctaaaatcatggatcatgtaacaaaaggggaggccccttttacaacgttagtacgtacacagatgtctcaccagccagctagtcgtcctattgatggcaaacatcccaatggggggaaaaaagtacttattttttctgatggccggcaaaaagcagctaggttagcacgtgatattcctagagatattgagcttgatttgtttcggcagtccattgctctcgcctgttctaaactgaaagatatcaagcgggaacccaaaccaacatcaatactttaccttgctttcttatcagtcctttctgaacacgacttgcttatttttgatggggaagattcccgaaaagttgtaatggcccgtgctgaatttgatcgtgattgtgatagcgatctggctcaagcttttgatgatgatttcagcccccaggagtcaccgtcacgatataaaatggcgttgcttaaacttttatgtagcaactactattctctttctggaacaactgttggttttgttgaaccatcgcagcttaaattaaagaaaatgtgggaagctgtgcaggccaggaagctcaatattaagagcaaggatgttcatgctttagctgttgcttggattgataccttactcactgaatttgcttttgatgaatctattgattcgacactacgaaccaaagcggctggattctataaacccaactggggtagtaaaggacggtttggaaaagctcttagaaaaacactgatacttcatccagctatgggggagctttctgtggaagttttggaggatatttttcgtactcatctgacattaggaaaagatggtgtttactttcttactccaaatgcacttcgcctgaaaatcgatctcttgcatgtctggaagcaatgtaatgactgcacagcactaatgccatttgctttagagcattctacttgccttgcttgtggtagtaacaatgtcaaaactgtcgatccgtcggaaagcagctatattaatgcacgaaaaggattctggcgttcgccggtagaagaggttttggtttcaaattcgcggcttctgaaccttagtgttgaagaacataccgctcaactatcacatagagatagggccagcgttcatgctactacagaactctacgaactgagattccaagatgttcttattaacgataacgacaagcccattgatgtacttagttgtacgacgacgatggaagtgggggttgatattgggtctctggttgctgttgctttaagaaacgtccctccgcaacgagaaaattatcagcaacgtgctgggcgagcaggccgccgtggtgcatctgtttcaacggtggttacatattctcaaaatggccctcacgatagttattatttccttaatcctgaacacattgttgcaggttctcctcgtacaccggaagtgaaggtaaataatccaaaaatagccagaaggcacgttcattcttttttagttcagacttttttccacgagttaatggaacaagggatttataatcccgcagagaaaacgtccatgcttgagaaggcacttggtactacacgagagttttttcatggggcgaaagatactggcctaaatctcgatggttttgataattgggttaaaaaccgtattctatctaccaatggtgatttgagaacaagtgttgcagcatggcttccttctgttcttgaaactggaggactttctgctagcgactggtttgctaaggtagcagaggagtttttaaatacactccatgggctggctgaaattgttccacaacctctcgttctggttgatgaggaaaatgaagatgatgatcagacctctagtggaatgaaatttgaacaagaagaattgctcgaattcttgttttaccatggtttattaccaagttatgcatttcctacaagcctctgtagtttcttggtcgaaaaaatagcaaagaatactagaggttcttttgagatacgaacagtacaacagcctcagcagtcaatttctcaggctctgagtgaatatgccccagggcgtttgattgttattgataggaaaacctatcgctcaggcggtgttttttctaatgcattgaaaggagaattaaaccgggcacgaaaacttttcaataatcctaaaaagtttattcattgcgataagtgctcttttgtccgcgatcctcataataataagaatagtgaaaatatttgtccgatctgtggtggcattttaaaagaagaaataatgattcagcccgaagtctttggacctgaaaaggctagggaacttaatgaggacgacagagaacaagaaatcacctatgcaacagcggcacaatatccacaacctgttgatcctgaggattttaagttcaataaaggtggtgctcatattgtttttactcacgcaatagatcagaaactggtgacggtgaaccgaggaaagaatgaaggtgaatccagcggtttttcagtatgttgcgaatgtggtgcagcctccgtttatgattcctactcaccggcaaggggggcacatgaaagaccgtataaatatatatctactaaggaaacgccgcgcttatgctcgggcgaatataaacgcgtttttctcggacatgatttccgtacagatttgctcttattacgaataactgttgggtcgccgcttgtaactgacacttcaaatgctatcgttctacgaatgtatgaagatgcattatattcaatagcggaagcacttaggcttgcagctagtcgccataaacaactagatcttgatcctgctgagtttggctctggtttcaggattttacccactataggggaagatactcagacattagatctcttcctatatgatactttgtccggcggtgcgggttacgcggaagtagctgcagcgaatctggatgacattcttactgcaacactcgcattattagaaggttgtgagtgcgacacatcctgtacagattgtctcaatcatttccacaaccagcatatacaaagccgtctcgataggaaactaggtgcatctttacttcgttatgctctgtacggaatgattcctcattgtgcttcacctgatatttga

SEQ ID NO: 168105 - DNA, 156 bp, Enterobacter cloacae
atgttaaatgatgtaaaggaaaaattaattgataataatttttttaatattgatagaattaatatggttttcaatgatgaacagtataatgaattggtctctaatttagagatgcttgctaacctcttgaaaaataatcaattcatagataaataa

SEQ ID NO: 168106 - DNA, 258 bp, Enterobacter cloacae
atgcagccaggccagcttttgctcgccgggcagcgtcaggccggtcaggttgctcagggcatcccattcgtagcccaccgcgccgttaatgccggactcgctcagcacgcgtccggcggcgtcgtggcggtaagcgatctcatcgctttcgatacccagggcaacgccttcggcggttggcgtgcggcggatgcgggggcggatgcgggtaatctggccgctcgggtcgcggaaatggcgatttgcatgaaacaataa

SEQ ID NO: 168107 - DNA, 138 bp, Enterobacter cloacae
atggtcttgtataaatgcagaaacatatcctttaccgaagtcaaaaatgtttttttattgattaaagttctccaaagaaaagtgttcattctatttgagatggggtgtattaattttaataagaatagcttcgcttga

SEQ ID NO: 168108 - DNA, 2568 bp, Enterobacter cloacae
gtgatcgcccttgccgatgccgccgccgagcatctcgcgcgccagcgcagtttccagctcgctgcggatcaggcgcttgagttcacgcgcaccgaactcgggcttgtagccttcttccgcgaaatggtcgatcagcgtctgatcgaaagtgagcgtcacgccctggctggcggcgctgcgcgccacgcgatcgagctgcaggccgacgatgtggcggatctcctccttgcccagcgcatggaagacgattatctcgtcgatgcggttgaggaactcgggccggaagtggccgcgcagcacgtccatgacctcggccttggtcttttcgtactcctcgccagccgcctcacgcgccttcagccgtcgctggatgatgtccgaacccaggttggacgtggcgatgatgatggtgttggtgaaatccaccacccggcccttgccgtcggtgaggcgaccgtcgtcgaacacttgcagcaggatgttgtagacgtcagggtgtgccttctcgatctcgtcgagcagcagcacgctgtagggcttgcgccgcaccttctcggtgagctgaccgccttcgtcgtaaccgacatagcccggaggcgcgcccaccagccgcgccacggtatggcgttcgccatattccgacatgtcgatgcgcaacagggcgtgctcatcgccgtagatagattcggccaatgccttggcgagctcggtcttgcccaccccggtcgggcccagaaacaggaaggtagccaccggtttgctgccttcgcgcaggccggcgcgggacagccgcacggcatcggccacggcacggaccgcctcgtcttgtcccaccaggcgctcgtgcagccgttgttccaagtgcagcagcttttcgcgctcttccaccgtcaactcgttgaccgggatgccggtcaggcgcgagacgatctgcgccacgtgttccgccttgacctcggcactgccggaggcccgctcccgctcccagtcctcgacgagcttcttgagctcggcctccttggcttcgatgcgcttgccgagctcggcggcctggtcgtactgcttgcgcgcggccacgtaatcctgttcacgccgcagctggtgcagttcggactccagctcctgcacggccaccggccgggccgtggccgacagcttcacgcgcgcggccgcctggtcgagcaggtcgatcgccttgtccggcaggaagcgcgccgtgatgtagcggtcggacaactcggccgccgcgatgatcgcgtcctcggagatgctgaccttgtggtgcgcctcgaaggtgtcgcgcaggccgcgcagaatcatgatggtctgggccaccgtcggctcgggcaccgtcaccggctggaagcgccgctccagtgcggcatccttctcgatgtatttctggtactcgttcagcgtcgtggcgccgatcaggttgagttcaccgcgcgccatcatcggtttgaacacgttggccacgtccagcccgccttcgccaccgccctggccggcaccgacgatggtgtgcacctcgtcgatgaacaaaatcagctcgccctggtgctcggtcacctccttcagcaccttctgcacgcgctcctcgaactcgccgcgatatttggcgccggccaccatggcgttgatgttgagttccaccaggcgcttgtcgcgcaaggtctcgggcacttcacccgccaccatgcgctgcgccagcccttcgacgatggcggtcttacccacacccggctcgccgatcagcaccgggttgttcttcttgcgccgggccagcacctcgatggtggtttcgatctcctgcgcgcggccgatcaccgggtcgagcttgccgtcgcgcgccatcttggtcaggtcgcgcgagtacttgtcgagttctggcgtgttggtcggcgtctcagcgcgtccatcctcggcgcccttgccgaccaccttgctgacctgttggcgcagcgcctgcggcgtcaggccgtagcggcgcagcaggttggcggccagcccttcgccttcctcagccagaccgatcaggaaatgctctggaccgacataagaatggccgagttcattggaggccacgaaggcgcggctgagcgcatccttcacgcgcggcgacacgccgatctcgccctcgaagggcttgtccccgcgcttggcctcagactcaatctgccgcttgaggtcatcgaccttgatcttgaactgacccaggatggtcttgaccacgtcgctgtcggccagcgccagcagcagatgttcggtatccacctcggagcggccaaattcggcagcgtgtttggcggcctcctgcaacaaggcttccgactgttcgctgatgcggctggccagcccactgccgcgacggcgcggcgcacccgaacctgcggcggcgggctcgccaaacgaggcatcgaccacgtcatcggtatcggcggcaactggcgtcgcgtcgtcgccgatgcggaagaagtcactgccgaggaagtcctcgaacaggccactgcgcgaaccgaacaaggcttccagcggcgaaacggtgcgcttttgctggcgcactaa

SEQ ID NO: 168109 - DNA, 234 bp, Enterobacter cloacae
atgccggatgcgggcgtaaaacgccccggactccgctgccgggttgcggtcatacgcgctgcccggcgtcaggtagttatccgcccagtggtaggcatcaccgtacgtggtgacatccccgccggtcgcgtcaacccgggcgttcatgtcctgcgtggcctgacggtagttgtagtcccgggtgctgacctgcttctgcaccacattgtgatggcattccattccccagactga

SEQ ID NO: 168110 - DNA, 282 bp, Enterobacter cloacae
atgcccccgtggtgggtatataaaatcacggggagcgtagcgaccttcgtcaagctctttccttgtgtgtctcaccctgcaaaaggtttgattttgtgggctcagtgttcgacgttcgtaatcacactgttccgcttgctgctgcctcagatgctcttttatcaggtgccagttatcgtactgcgagacggggtagagcctaactctttcgcggttaagttacgtatccaccaattgcctgtttatcctgccggagtccggggcgtagacctgagcgtctga

SEQ ID NO: 168111 - DNA, 384 bp, Enterobacter cloacae
atgagttacgtgcacgtaattgtaagtatgaagaagtctccatctaaagcgaaagaaaaaacaaagcactacatgcaacttgattgcacaaaagacgaagcgctggaagatatcttggttccttacgcaagtaattccaaccgaattctagttgaaggtgcttttatctctgctgctgacattgaaaaaatcgcggtttttgaaagttcagatgacagtaaaaccctttatgaaaaagagtcggctgaaagcgaagcccgatctgcgcgaatggcttcacagggagtgatcggtttctttggcacaacaatgtatgcagctatccataatcaggctactgacatcacttcccaaatcctgcgggaggccatgaaaaggcaatag

SEQ ID NO: 168112 - DNA, 192 bp, Enterobacter cloacae
atgaacaaagcctctccagttgatctgaggaagagcctcgaaattgccaaccaactggcgcacatcggcattcgctttgcgccgatcccggtggcgaccgaggaagagttccagacgctggccgctgagctatcgagacggcttgagcagatggcggtcgaagccgagaagaatgaaggcggtgccgcatga

SEQ ID NO: 168113 - DNA, 369 bp, Enterobacter cloacae
atgttaaaactggcgcttaaaataaaatcaaaagggaaaaatataaaaaatggagaactaaccgcagatgtaaacatcatgttatcctgccagagtgtttttaccgatggggttatgaggcatactgagtcggagcgtccgaagttcttactgacagaatatgaaaataacctacaaattatgcatgtgataaaacaatataacgatgtggtacgcaggataagtttttataacgaatttgatttttatgccgtacacccccaatctatatctggagttctcgatgaggttgaacatgcattggggaagattaataaaaggcttgatatttctaaagaagaggcggtagtgagatgctggcagaaataa

SEQ ID NO: 168114 - DNA, 795 bp, Enterobacter cloacae
atgttcatgcacccgcaaggccttgtcgctggcgctcatggcggtaaattccgcctcgctcatggtgtcgaacggactttgcgccggtggccggatggcgtcataaatggctttcccggtggcctcttcacctttctgcataaatgcatcattccagtcaccgaacaccggtggcagggcaacaatgccctcacaggcatctgcggccgcagcggctttgctctggccatcgccgttcaggtcacggtcggcggcgagcacaatctgacaggccggatatttctgacgggcaaggctcgccagagaaaggaggttcacggaggacagcgccaccatgacggtttccccggtcaggtgatgcacggtgagtgcggtcgcataaccctctgcaatccacaggcgttttccggcctgttttttcccttcgatgatatgacatgcccctttgacctgaccgcctttcagggtgcgtttgagaccgtcagcattgataagctgaaggttaaccagtgcgccggtaccgtcatacagcgggacaaccacatcaccggtgcggaacgtcacgcctccggttttatgcatcgacgtcagtaccggacattcccggtcggggaagcccttgcgggtcaggtaggcgttgccgctggccggtcgggttttctccatcagcctgacggccagcgcggccgccgccttgcggtctgcttcggtttcagcctctgcggccgcaatcacttcgggggcaaccggtggcaggttgccggtcaaggcatccacctttccggcggcctctga

SEQ ID NO: 168115 - DNA, 546 bp, Enterobacter cloacae
atgacaaacgtaagcgcagtagaaaaaatggctgaattaatgcagcagatggaagagaactcgccgcgagtagccgctctccagtatttcctgaaacaggttgcggaaaaagtggaagaagcagaaaagcgcaatgcggagcttgaagccagatgcacggcgctggctgcggagaatgcggggctgaagtcaaacctgatgttctgggattcagaagacccagaggcgccatacgacaatcctggtgaaattgctgaagcatgctcacttaactacaacgaggaattcgtggttcaggtggccgctaagatgccgaaccgagtatatcgcgtatgcgaaagctgggagcatgagtgcaaggtcgaactggttgacggtggtgagtttgaaaccccagccaccgacgctttcctggctgaagtgcgggcaagtggtgtggagatggctatggagcatatgcagtctagcggttcgttaacgttcggagattgctacatatcgctcaacgacttcgccgaccagcttcgcaaaggagtgcagtcatga

SEQ ID NO: 168116 - DNA, 474 bp, Enterobacter cloacae
atgataaatacaacaaagcttgatccgatcgaaaccgcgtccatggatgagttgcaggcgttgcagaccgcgcgcctgaaatggacgctgaaccacgcctaccacaacgttccgatgtacaaacgcaagtttgatgctgcgggcgttcaccctgacgattttaacgagctggcggacctgcaaaaattcccgtgcaccaccaaacaggatctgcgggacaactacccgttcgatacctttgcggtgccgatggagcaggtggtgcgtatccacgcctcgtcgggcaccaccggaaagccgaccgtggtggggtatacccagaatgatatcgacaactgggccaatatcgtcgcccgttccctgcgcccgccgggggcagcgcgaaggataaaattcacgtcgcctacggttacgggttgttcaccggcgggctgggggcgcactacggtgctgagcgtctgggggcgacggtga

SEQ ID NO: 168117 - DNA, 10563 bp, Enterobacter cloacae
atgagtaacgcaaaagttgttgatgtcatcattcgcaaaacggcagagaagacgaaattaaccggtgaagggaatctctcggtctctatttcatcgccgagcgtgattgaaattcagggttcagctcaggacgtggtgcgttatgtccgccaggggaatgacctcctcatttatatgaaagatggcagcgtgatccgctgcaataattattttgtcgaagacgcggaaacccataatcattccgaactggtatttaacgataaccaggcgttgacgcatatttcatttgccgatgccggggaagcatcaggcgttgctgccaccgaattaaccgcccaggctgcacccattagcagcattgaacctttcctggagcagggaagcgtcttaagcgatgcgccgtggggctggattgccggtgcggcgttagggggcggtgcgatcggcgctctgctggctcatggcggcgatggcgaaacaaaaaccagggttattgataatacaaaagaagtcgaaagcgccacgccgacatttttgctgacggacaacgcgggtgacaagcagggcgtgctgagtgcaaaagcggtcacggatgataacacccccaccttcagcggtaccgggcagccgggcgcgaccatacaggttaaagacggcagcggcagcaccatcgccagcaccatggtcgcgaaggacggcacctggacggtaacactcccgacccaggccgacggggaacatacctggtccgtcgtgcagatcgacggcagtaaaacgacctctgcgggcagtatcaccgtaaccgtttctacagcggatgccagcgtgacgctcgccaccacggcgggcgataacgtgatcaacgccagcgagcagtccgctggctttacgctgtccggcaccagcaaaaacctggcgcagggaacggcgcttaccgtcacgctcaacggtaaaacctataccgcagaagtgggggcaaacggcgcatggagcgtgaaggtccctgctgccgacgcacaggcgctgggcgatggtacctggacggtcaacgtcagcggaaaagacacggcgggcaacatcgtgtccggcagccagacgattggcgtcgataccgctgcaccagcgatttctgtcgacacgatcgcccaggacaacatcatcaatgcggctgaacatggtcagcccctgacgctgacgggtaaaactgatgcagaagcgggccagattgtgacggtcacgctgaacggcaaaaatcacacggcgactgtgggcagcgacggcacctggtccgttacgcttccggccagtgaagtacaggcgctggctaacggcgagcacaccctgacggtaaacgtcagtgataaagcggggaacggttcatccgctacggctgttttcaccgtcgataccgcagcgccggtggtcaccatcaacaccgtcgcgggcgacgacattctgaacaccagcgagcaggggcaggcgcagattatttccggccaggcgaacggcgcggcggcgggcgacgttgtcaccgtgaccgttggcggcaagacctttaccggtgtcgtccaggcggatggcagctggagcgttggcgtgcctgcctccgtcactggcgcgctgggggaaggtagccacagcatttcggtctccgtgaccgatgcggcgggcaacaccggcagcgcgacgcacggcattacgctcagcggcaacccgccggaatttacccttgaccccatcagccaggataacgtcctgaatgcgcaggaggccatgcagcccctgagcctgagcgggaccagtaatctgccgaacggcagcgccgtcaccgtgacgctgaacaacgttaactatcagaccaccgttgagaacggtagctggtccgttcaggtgccggtttccgacgtgctggatctggcgaataccctctacaccgtcagcgtcagcggcaccgacagcgtgggtaacagcggctccgccgaggcgaatctgctggtcgataccgcgctgccgcaggtgatcgtcaacacctttgccggtgataacctggtcaataacgctgaagcggcggttgaccaaaccctcagcggacgcgtcaccggcgcggcggcgggcgataccgtctctgtcaccgtgggcggcaagagctacaccgcgacggttggcggcgacctgaaatggagcgtgacgatcccctcagccgacctccaggcgtttggcgacggggatttaaccttcagcgcctctgtcaccaatgcgcacggcaatacgggcaccggcgagcgtgatatcaatatcaacgccgaactgccgggcctgcgcgtgaacacaatctctggcgatgacgtgattaacgccatcgagcagcagcaggatctggccgtcaccggcgccagcacgcatctggccgaaggtacacggattaccgtcaccatcaataatgtcgaatacgtcaccacggttaacgccagcggcaaatggcagattggcgtgcccgcggcagaccttcaggcatggacggcggggggcatgaccgtcagcgtcagcgcggaagatgcctggggcaacaccgtagcggctgaacacccgatcgagcttgacctgaacgcggtggccgtcaccatcgataccgtaaccactgacgacatgctgaacgcggcggaaaaaggcgcggatgtcacgctttctggtcagacgcagggcgtggaggcagggcagaccgtggtggtgaaattcgcggatcaaacctttaccgcacaggtgcagcaggacggctcctggcacctgaccgttccggcgagtgcgatggaaacgctgatcgacgggcgtgcgcaggtgaacgtcagcgtgactaacggcaacggcaacagcgcggacgcctcacgcgtggtgatcgtcgatacgcagccgccagccattacgcttgataacctgaccgacgacaacatcattaatgcggcagaagcgcagcaggatctggtgctcagcggcagcacaaccgttgaaacgggtcagacggtcaccgtgacgctgaacggtaaatcttaccagaccacggtccaggcggacggtcgctggctgctgaacgtgcctgccgccgatgtcggcgcgctgaccgatggcaatgtcaccgtgacggccaccgtcagcgacgtggcgggcaacagcagcagcgcggaccgcgttgggctggtggatgccactgtgccgcaggtgatcatcaacgatttcgtcaccgacaccaacaccgttaaccagctggcccatgctcaggcgcagatcctgagcggctccgtcaccggcgcggcggcgggtgatttggtcatcatcaccatcaataacgtggactacaccaccgtggtggatgcggcaggcaactggagcctcggcctgcctgcgtccgtcgttcaggggctgacggacggcacctggaccattaacgtttccgtgaccgatcggtccggcaacaccggcagcagttcagtggatgtagtggtcaatacggtgacgcccgttatcggtattaacacgctggcagcggatgacgtgatcaatgcggcagagaagggcgaagatctgctgctttccggtaccagcaatcagccggaaggaaccaccatcaccgttgctctgaacggtatcaactacaccgccaccaccgacgccagcggcaactggagtgttaccgtacccgcctctgcggtgagcgcgctgggtgaagcgaattacaccgtaacggcgagcgtcaccgataatgtgggcaacagcgccgctgtcatgcacgatgtgctggtggacagctcgctgccggttgttaccttcaacaacttcgcgggcgacaatatcgtcaacgcggcggaagtggccgcagggcaaaccctgaccggaaaggtttctaacgcggcatcgggcgataccgtcacgattatcctcggcgggcagacatacacggctaccgtacaggacgatctcacctggagtctgccgttaacccagagtcagttaaccgcgctcggcaacggcgacctgaccgtatcggccagcgtgacgaacgcgcacggcaataccggatcgtcttccctcgatgtcaccattgacgcccagctgcccggcctgcgcattgataccgtcgccggtgacgacgtcattaacgttattgaacacgcgcagaatctggttatctccggcaccagtaccgacctggcggcgggtagcaccgtcaccgtgaccatcaacggcaagagttattccgcctcggtactggcggatggcacctggcaggctgcggttccggccgccgacgtctcccggtgggcggacgggtcgctcaccatcagcgccagcgcgcaggatacctccggcaacccggtgaacatcggtaccgttgtggatgtcgatctcgccccggtggcgataagcatcaacagcgtgacggacgacaacgtgctgaatgcggcagaaaaaggccaggatctggtgctgtccggctcctcctcgaacgttgaagcgggccagaccgttaccattatctttgcgggtaaaacctggaccacgacggtcgatgccagcggcgactggacctgcaccgtaccggctgccgatctgggcggcctgaaggacggcgacgccagcgtgcaggtcagcgtgaccaacgtgagcggcaacgcggcctcttcctctcaggcattcagcatcgataccgccgcgccagcggtcacgatcaacaccatcagcggtgacaacatgctgaatgcggcagaggtggcgcaggatctgaccctgagcgggacgtctactgccgaagcaggccagacggtcaccgtgaccttcaacggcaatcagtacaccgcccaggtgcaggcgaacggcagctggacgctggacgtaccggcggcggatctggcggggatcgccgacggcagcgcggcggtcacggcgaccgtgtccgataaagcgggcaacccggccagcacgggagcgtccgtgctggtcgacacgaccgtgccgcagattaccttcaacattgtggcgggcgacgacattgttaatattgccgagcacggccaggcgctgattgtctccggcaaggtgacgggcgcgcaggcgggggatgtgattaccctgaccctgaacggcaaagactacaccgcaatgctggacggtgccggtaactggagcgtgggcgttccggcgcaggacgtgggcgcgctggctaacggcgatcagacgatctccgccacgctcaccgataaagcgggcaacagcaccagcgccacgcacgcgattgacgtctccctgaccgcgccggtgattgccatcaacaccctggcggttgacgacgtgatcaacgcgaccgaaaaaggccaggatctgctgatctccggcaccagcaaccagccggacgggacccacatcaccgtaaccctgaacggtatcagttacgccgccaccaccgatgccagcggtaactggagcgtcaccgttcgggcggcaaacctctcggcactgggcgaagcgagctatagcgtgacggccagcgtgaccgataccgcgggtaatagcgcgaacaccagccatagcgtgctggtcgacagcgcgctgccgcaggtcaccattaatgcggttgccaccgacgacgtgattaacgcggcggaagtggcttccggacaaaccctgagcgggaaagtgagcggcgcggcgagcagtgacactgtcacgatcggtatcgggggcaacacctatacggcgacggttcaggatgacctgagctggtcggttaacgtggcgtctgacgtcttaaccgctatcggtaacggcgatctcaccgtaacagcgagcgtgaccaacggccacggcaacaccggcaccggcgaacgcgacatcacgattgatgccagcctgccgggcctgcgcgtggataccgtggcaggcgacgatgtgatcaacagcatcgagcatggtcaaaacctgattatcaccggctccagcgacgggctggcgagcggatcggcgctgacggtcaccgtcaacggcaaaacctacgcggcaaccgtgctggcggacggcacctggacggcggctattccggcggcggacgtcggcgcgctgagcgcaggcacgatcaccgtgaccgtggaaggccagagcgcggcgggtaacccggtttccatcagccacgacgtgaaagtagagctggcggccgtcgccatcagcattaacccgattgcctcggacgacgtaatcaacgcggctgagaaaggcgcggacctggtgctttctggctcgaccaccaacgtggaagaaaaccagaccgttaccatcaccttcggcggcaagtcgtacaccgcgacggtggatgccagcggcaactggacggcgaccgtaccgtctgccgatttgggcggactgaaagacggcgacgccagcgtgcaggtgagcgtgaccaacgtgaacggcaacagcgcctcggcgggccgtgaatacagcgtggacgccaccgcgccgacggtttccattgaaatcgtcagcgacgacaacatcatcaatgccgccgaagcgcagcaggatctggtcatcaacggcgtcactaatgctgaagccggacagaccgtgaccgtcacgctgaacggcaaggactacaccactaccgtgcagtctggcggtggctggaacgtgaccgttccttctgcggatataagcgggattaccgacggcaactacaccatcacggcagccgtatccgataaagcgggcaacccggcctcggcggatcgcgatgtgctggtggataccacggtgccccaactgaccatcaacaccgtttctgacgacgacgtgataaacagcagcgagaaaacgcaggatctggccatcacaggtacggcttccgggctggcagcgggcgcggtggtcaccgtgatgctcaacggcaaagcgtacagcgccacggtggatacccatggccaatggaccacaaccgttccggcgagcgaggtggggcaactgggtgaagcgctttacaccgtgtcggcctccgcaacagacagcgtcggcaacagcaccagcacctcgcacaccgtgaacgttgaatccgttctgccgggcgtcatcatcaacaccgtggcgggtgacgacgtgatcaacgcggcagagctggtaaccggccagaccattagcggcaccgtggtgaatgccgaagcgggcaacaccgtgactgtgtctgtgggcggccacagctacaccgcaacggtacaggacaatctcacctggtccgtcgacgtaccgggaactgtgctcaccgcgctgggcaatggcgatctgaccgtgaccgccagcgtcacgaacggcgtgggcaacagcggcagcggcgagcgcgatatcactatcgacgcgaatctgccgggcctgcgcgtggacaccgtagcgggcgatgacgtgattaacagcatcgaacacgggcaaaatctgattatcacgggttcaagcgacggcctgacggcgggcacagcgctgaccgtcaccgtaaacggtaaaacctatccggccaccgtgctggcagacggcacctggcgcgcggcgatcccttcagcggacgtaagtgcccttgccgcaggcacggtcaccgtgaacgttgaaggccagagcagcgcgggcaatccggtgactatcaaccatgatgtgaaggtggatctggcaaacgtcgccatcagcattgacgccatcgccaccgatgatgtgattaacgcggcggagaagggcgcggatctggtgttctccggcaccactgcgaacgtggaggaaaatcaaaccgtcaccatcaccttcggcggcaagaactacaccgccacggtggacgctgaggggaaatgggccgccacggtgccgtctgcggacctgaccggtctgaaagacggtgatgccagcgtgcaggtcagcgtcaccaacgtgaacggcaacagcgcctcggcgggccgcgagtacagcgtggatgctacctcgccgtccgtgaccatcaacacgattgccacagacgatatcctgaacgcctcagaagcgcagtctgacctggcaatctccggcaccagcaccgctgaagcaggccagacggtgaccgtgtcgctgaacggcaaagattacaccacaaccgtcagcgcgaacggcagctggacgctgaacgttccggcagcggacctggcaggtttaaccgacggcagcgtgacggtcactgcctccgtcagcgacaaggcgggcaacccggcatcggtggaccacaacctgacggtggacgtcaccgttccgactgtgaccatccacaccgtggcaggcgacgacgtgattaacgtggctgaacacaatcaggcgcagattatcagcggctccgccaccggcgcggcggcgggcgataccgtcaccgtcacgatcggcggccagacttataccaccgtactggacgcggcgggtaactggagcgtgggcgtcccggccagcgtcatttccggcctcagcgacggtacggtgaatatcactgcatcagtcaccgacgcggcgggcaacaccggcagcggcacgcataatgtgaccgttgacaccggtctgccatcggtcagcttcaacgccatcagcggcgataacgtcctgaacgcggtagaaaaaggccaggatctgagcgtcagcggcaccagcgccaacctggcggaaggcaccgtggtcaccgtgaccctgaacggcaaaaactacacggcgacaactgcggcggacggcacctggagcctgacggttccggctgcggatctggccggtctcggtcaggccagttacaccctgaatgcgacagccaccaacggcgtgggcaacagcgtgagcagttctgcgaacctgcttgtcgacaccgcgctgcctggcgtcaccatcaacaccgtggcgggcgacaacgtcatcaacgcggcggaagtggcggcaggtcagaccctgagcggcaccgtgacgaatgccgaagcgggcaacaccgtgaccgtgactatcggcggccacagctacaccgcaacggtgcagaacaatctgtcctggtccgtgaatgtgccgtctgacgtgctgaccgcactcggcaacggcagcctgagcgtgacggcgaccgtcaccaacgggcacggcaacaccggcaccggcgaacgcgagatcgctatcgacgctaacctgccggggctgcgtgtggataccgtggcgggtgacgatgtggtcaacaccattgagcacgcgcagaacctgattgtttcaggctccagcgacgggctggcgccgggcacggcgctgacggttaccgtcaacggtaaagattacgcggcaacggtgctggcagacggcacctggcgcgcggcgataccgtccaccgacgtgagcgcgtggccggaaggcaccgtgaaaatcagtgtaaccggtgacagcgcggcgggtaatccgatcaccatcagccacgatgtgaccgtggatctggctaccgttgccatcagcatcaatgcgcttgccaccgacgacgtgattaacgcggcggagaagggcgcggatctggtgctgtcgggtgcgaccaccaacgtggaagccgggcagaccgtgaccatcagtctgaacggcaggatctacaccaccaccgtggacgacagcggcaactggacttacaccgtgccgtcagcggatctggctggcctcaaggatggcgacgccagcgtgcaggtcagcgtcaccaacgtgaacggcaacagtgcctcggcgggccgcgagtacagcgtggatgctaccgcgccgtccgtgaccatcaacacgattgccaccgacgatatcctgaacgcctcagaagcgcagtctgacctggcaatctccggcaccagcaccgccgaagcgggccagacggtgaccgtgtcgctgaacggcaaagattacaccacaaccgtcagcgcgaacggcagctggacgctgaacgttccggcggcggatctggcaggattaaccgacggcagcgtgacggtcaccgcctccgtcagcgataaggcgggcaacccggcgtcggtggaccacaccctgatggtggacgtcaccgttccggcagtgaccatccacaccgtggcaggcgacgacgtgattaacgtggccgagcacaatcaggcgcagatcatcagcggctccgccaccggcgcggcggcgggcgataaggtcaccgtcacgatcggcggccagacttataccaccgtactggacgcggcgggtaactggagcgtgggcgttccggcaaatgtgatttcaggcctcagcgacggcagcgtgatcgtcactgcgtcagtcaccgacgcggcgggcaacaccggcagcggcacgcataacgtgatcgtcgataccggtctgccgtcggtcagcttcaacgccatcagcggcgataacgtcctgaacgcggtagaaaaagggcaggatctgaccgtcagcggcaccagcgccaacctggcggaaggcaccgtggtgaccgtgatcctgaacggtaaaaactacaaggcgacgactggctcagacggcacctag

SEQ ID NO: 168118 - DNA, 369 bp, Enterobacter cloacae; identical to SEQ ID NO: 131013

SEQ ID NO: 168119 - DNA, 468 bp, Enterobacter cloacae
atgaggaaagtaaaattagacaatgatgatttaattcagtatctgaacaccatcaaagcattaaaaaaatatccaacgatgtctgaatacagagatgaatatcgcagattaagaaccaatggctcccccttgattgaagcaaaagaatttaaatctgcgcacactaatctccttagattagaccgaaagaaaaaatcactgcttgaaaaatttattgaagaacttaatcctattagccatgcatcggctcttgcatccaagagccttgagaaggttcaggaatccatgctctacagaaaaactttattagaaaaaacacctgatgaactcttcgctctcgtcataaagctgcgcacagaagcggctcttgagttccagcgttctgttgagcaaagtcttgagcaactttcagatatatcttctgattttaatgcatcagcaacaaagcgccgaaaattttctatctag

SEQ ID NO: 168120 - DNA, 147 bp, Enterobacter cloacae
atgaatacagcgtttgaattgtgggttcgccagcggtacggaagccgctacgacctggcgcgggatattcaggggctttattgccgggaagtggttaagcggatgtttgaagtgtggtgccactaccgtggcctggatgtagtgtga

SEQ ID NO: 168121 - DNA, 225 bp, Enterobacter cloacae
atgaaaatccaataccaggactacgggtcagtggcgaatatcgtcatcaccagcacggtgtttgagttccggaagcatagccgggtagtcgataccactctgtttctggtgccagccgtagtgagttcaaagcatggaaccttcatcctgaaaaccgttatttcaggtaaaagccgcgatgcattacgcgcttacagaactgcaatcagggaggcggcacgatga

SEQ ID NO: 168122 - DNA, 423 bp, Enterobacter cloacae
gtgaaaaataacgaagtctggtttccggctggctctgttgagctggcccaccagcaggcgctggaatgggtatgcgatgcgtatctgttctatctggtcagcatgcaccgccggccggtatatcgccaccagtacggcgatatttcgctaaaccagccggcggtaaggggatttatcgactcgtacctgaaagacaagggatgggatctggaaaaacgccgcgcccattacatcaacattctggaccttatcaaatatatgcatcgcagcaattcggacttcatcgactggggcacggttccaacactaaccccaaggggcatccgctggatgaattcctgcttttcccgtctgggtgaaatggttaacagctatggcgggtgggaaaactacgcaaaagaagccgcgggagaatcaatctga

SEQ ID NO: 168123 - DNA, 141 bp, Enterobacter cloacae
atgcgcattgccacaagttattttcgcatcttcttcattaccaagaccaacgtgtttactttttgtctcaacaacaaagtaaatatggtcttcaccattgtcttcaataaccaaagcccagtcaggattgtaagttcctag

SEQ ID NO: 168124 - DNA, 765 bp, Enterobacter cloacae
atgacgcttttgcaaacgccgtctttcaccctgcacggcaaacgcgcgctggtgaccggcgggtcaaaaggaattggctttgctgccgccgtcgccctcgcacaggcgggcgcagaggtatggattgccgcccggcaccgtgacgcgctggacggcgcggtggcgctggctgcggcgcaccagctctctctccatccggtggtactggatattaccctcaccgatgatgtggagcgtgtgctggccaccttgccggaattcgacattctggttaacagcgccgggctggcccgccaccagcctttccttgaggtcagtgaggaaaattttgatgcggtgatggcgctcaatctgcgcgccaccttttttatcagccagcgcgtggcgcgcaacatgcgcgcgggcggtaaggagggatcgattattcacatctcatcgcaaatgggacacgttggtggccccgagcgtagcgtgtactgtgcctccaaattcgcgcttgaagggttaacccgaacgatggcgctggagctgggcgacgcggggatccgcgtcaatacgctgtgcccgaccttcattgaaaccgacctgacgcgcgcgtcgcttgccgacccggcatttcgccgctacgtgctggacaacatcaaactgcgccggccaggcacgctggaggacattatggggccggtggtgttcctcgcctcggatgccgccgggctgatcaccggcagcgccctgatggttgacggcggctggacggcaacgtga

SEQ ID NO: 168125 - DNA, 1404 bp, Enterobacter cloacae
atgagatttttgtcaatagtcaccccaacccccgaacagcgtgcattagcgggacagaatcgaccgggagtagaagtcatttatggttcagcagggagcggtaaaactactaccgccctattgagattaaaatctttatgctacatgatccagacaaagcatcgtcgagaaaacaatatagaaccaatcaatatcttagtattaacgtttaaccgaactttatctggatatattaaaaacttagtttatagtcaacttgaccccagcataaaaataaatattgaaataagtacatttagtcggtgggctatcaacaagttacatagccgccccaatatattcgataaaatcgatgaaaccatttatacattagccagaaacacaaatatattatccccaaaatacgtaataaaagaggtggaatacttactaggtagatatccacctgaaagcattaatgattatatacatacggaaagaacaggacgaggaaatacgccaagagtcgatagagaattaaggcagcgaattttaaatgagatagttaatccctataaaaaaacactatcgaattataggagtattgattggaatgaccttgcagtgatgatgggtagaaatatcccatcattaggttatgaaattatcattgttgatgaaacacaggatttttctgcaaatcagcttcgtgcaatcaagcaccatctcgcagattaccacacgattacttttgttacagatacaatccaacgtatatatgcaagaggatttacatggtctgaggctggttttgacgtccgcccagaaagaacacacagactaaaaattaattatagaaataccaaacaaatagcaaaattcgcagcatcctttttacgaggaataaatgttgaagacgatggctcaattccaaacttacatgaagccattactgatggtattttaccagaagtcatttgtggtatatatagaaatcaaattagctacgcgatagattttataaaaataaatattgatttaaatgtcgaaactgttgcattcttacatccgctaggaggcggctgtttttcatttttaaggactaaacttcattctaacaacttaagttttagagatataacacgagactcagattggtgcgatatggatgctagtatagccttatcaacatttcactcagttaaaggattagaatttgattacgtattcattttagggcttagtgatcagacgactgcttactctgaagaaaacattgatgaccaatttttggttttaagaaaattattagctatggcaatagctaggtcccggaaaggtgtttttttaggctataaaaaaggagaagagtctgacctcttgcaattccttgaggaagggacatacaaagaggtaaacctataa

SEQ ID NO: 168126 - DNA, 276 bp, Enterobacter cloacae
gtgggtatcgaaacgataatcggtctggcagcaatggtaatttccgctatcgccggtgcctttggcctgggccatattcgcggcgccagcaaagcggaagcgaaagccgaccagctgcgcaccgaagataacgcagctgcaacggtcgcagcagcagaacgccgggtagaagcaacgaaagaggccagcgatgtacagcagagtgttaaccacatgcctgatgacgatgttgatcgcgagctgcgcgaaaacttcacccgccccggtggtggttga

SEQ ID NO: 168127 - DNA, 468 bp, Enterobacter cloacae
atgagaaacgtaaaaacagataacaatgatttaatacaatatttaaagacagtcgaagaactaaaaaatcacatttctattgaagaatacaaaaaagaatatcgcaaacttcgtgctgatagtattcctttcattaaagcgcaaaaattcaaatcagcacataccgaactacgtcgtttgaacagaaaaaaggaatctcttcttgataaatttcttgatgagcttaaccctgttaaccaagcctccgcttttgcttctaaaaacattgataagctcgaaacgtatagtctctacaggagaaatctccttgagaaaagcgatgaagaaataattgccttagtcataaagcagcgtacagaagccgctatggaattccaacgctccgttgaacaaagtcttcagcaactctctcaaatctcgtcagagttcgattcatcaagccaaaaacgtagaaaaatgtctctttaa

SEQ ID NO: 168128 - DNA, 1095 bp, Enterobacter cloacae
atggaaggtaaattaattttttgttccgatgcaatactgcggtttcagtccgattacgatgaaacctcggcggttccattgctatccatccagaacacgatagccaataccgatcccttttttcttcttcgcttcttccaccatacgactctgattgaagaaggaacaacgctggcaagtatcttcatggctatagagccatggaaggcgttgttagcagcttatctggacagagatgttggtgcttatatagatgaggtaagaaaaccgtccgggccaacgacatgggatattgaatggatcggaattgaccgtcgaagctcggtttaccgtgcttacaagcgtcaggaaatggaagaaggggaagatttttcggtctattttaatcgcgatcggttcccgactgatgagtttgacatagaaagtagctgcgatgcttcaggtttcattaagggtgataaagaacgctggagtatcagcggtgatattcacgaaattaaaaacctgcctgtaatcctctatagcaaacagacgttgatgacttctgcgaaagacggattgttgaagaagagcatatcaggggtaaagagttccaagcatagctgctttgtctatggtgatacctcgttttctttcagtggggttatggaggctatcttcattagtgggctgttcttctatgcgccgagagatgctgccggtagccttgatgagctgaaagcgagtttggccggactggaagaagaactggccgaggtgcctgaaacagaatcggctgataatgaaacagataaagaaactaccatagtcgtagccgaaggtgcttttgattcgctcacagctcacatggaaacagaagctgaggagtggcaatccattaagaagctgtgccagcgagaaggtgagcttcccatacgcatcggtagtattaagatggctgagcctgctgagctacgcttgtgcgggaaaattatacgtggattgaacagcagtgagcatgacgcctgccggggcttatgcttgcttactatttttgcgttatctcttgatcaacctcatatttactatggtaaaattcgcaacttaactctgtga

SEQ ID NO: 168129 - DNA, 918 bp, Enterobacter cloacae
ttgaacattaaagtaacaccagtattaatctcacttgtctacgaagctcttttaagatccttttggcgtaaaccggcactgaagaaatttttattgtcttcacatatttccgaaaactttatttcaacgtggagagaggatgagtcaaagagggctttcttagatcgtttattccctaaactgcaaagtaatgcaaaaggtaataatgttatttgtctgatggcaattaatctttctgagcagacttcttttccagatttaagaggctgggaggattccttacaaatgatccagtcagcaacaagtgctgtaagagatttgaaatcgtatattaaaaaacaaaatgaagaacatcagaatgaaaaagagaaaaaagaattcagggcgcgagcagaaaaagagagggctgaaattaaacgctccgtaacagatttaattaagttaaaatctgagtttgagtgtttgcataataaaattggaacacaaaatggtggctatgaattcgaaaaatggtttttcaagctcatagactattgcgaaatcgtttgtaaaaagccatataaaactaatggtaggcaagtagatggagccataaccattgatggtacaacgtatcttgttgaattaaaatttcaaaaaacacagtctgatgctacagatatagattcattaaaagctaaagtaagcaaaatggcagataatacaatggctgtaatgatttctgtatctggttattcctctgttgccataagtgaatcatcgggcagtcgaacacctctaatattactagactatagccatttatatttatttttatctggtggcatgaagtttgatgagatagttacacgtataagacgtcattcatctcagactggggaggcgtatctacctgtaaactcttttggtggattttaa

SEQ ID NO: 168130 - DNA, 225 bp, Enterobacter cloacae
atgaattttatatttatcagtgataactattacctttgccatggtgtttcaagcgccctgacatccacctgtttgattcgcgatgacgcggatattcacgatctcaacaggctcgatccagcaatggattttatcattgcgattgaacaggataagttacgcaataaaaccattcagcaggtcaaaaaagtcaaacgtgattacatcgtcctgatgcatgtgtga

SEQ ID NO: 168131 - DNA, 1167 bp, Enterobacter cloacae
atgattgccgatatcgctttccatgatcttgatagtgataatcctcatgctcacgttatgttgaccttaaaagccataggcccggaaggttttggtaaaaaagaaagaagctggaacgacagaaaaatgtctattttttggcgtgaatcatgggcatctatggctaacagctaccttgctgctgctggttcatcagagcgtattgaccatcgttctctccaatcccagcatgaggaagcattagagaaagcagcggttgctctggataatgaagaaaaagcgctatggcttgccaaggccgctgaaacaaaccgccctgcaatgaagcgtattcacagtgccaaatggcgtagtaaagcagctcaacaacagcgtgctgctgaacaggctgttcgtgatgctgccaagcaagaagccgttgaagtctacaaaacattcagcgaacttgatcttgaaattgttgttgatgtcagaagcttcaccgtggctgttcttgctgaaccagaagagattttattaccaaaaacacgttccgattcttctaccaaagaaacgcaaagacctgtactggtagccccggcacctcatactcgtatgcgtggcgttaaatcctatcgtgataaaacaaaagtcagtaaggttactgctggtcataaatcatcagccggtatttctgatattgagatgaatactatgttgaaaacatcctcctctcaaaacccaaacagggcatccagaagcgcccctgaacgtgttaagaggacacagactattccatgtcaggataatatctttaaacgctttactgctcttttggttgattttatcagagataaattcatatgggctaaaacagacaaaactaaagttgatattatcagtgaagaacatgataaacgtattgctgaaaactacatctttgatgaggtattaggtcgtcatgtgtcacgtaatgaatatgaacaacgtgataaattcaataatgatgaaaaacaacatcaaactgagacctgtgtccttaaaccaacgggaaaagaaattagtcgtttcccaagtcgtgtgaaaaaatctgaacaacacaacaacgaaccggagtacagacctacactctcatctggtaagcgcagcgggcctaaattaagaccgccgggctttccgctaaaatga

SEQ ID NO: 168132 - DNA, 213 bp, Enterobacter cloacae; identical to SEQ ID NO: 84052

SEQ ID NO: 168133 - DNA, 531 bp, Enterobacter cloacae
atgaaaaaaatcttaataatggcgggggctgtgttggttctggcgggatgtggtgaaaaaggcgactttgagaaaacgatcaacgcgaagattggtcaatcgaaaacctgtttctcactgcgaaacaacgacgtcgcattccctgtccagctatccaaaccgcgatttgatgaaacagggactggaacagggtctgtaatcctcgacggcctcgtagaacagggattaatggcctttgtcaaaggctgggataacaatacgcttgggataacagatgaaggtaaacaagccaaaatctgggatgccaaggaaggtgtttgtattggtcgccgggttgttgatgaggtgaaggaatggactgagccgggaaacggtaatcagaaagttgttcgcgtctcctacacatggaaattaactgatattccatcgtgggtggacaaaagcgcattctctggtgtgaaagggatgaacggacctgctgatggtgccatgaatcttgttaaaaccagcaatggctggaaagcgatctaa

SEQ ID NO: 168134 - DNA, 396 bp, Enterobacter cloacae
atgaagtattggatcgcggttcgtttcaatagctttagccagccagatcgctttctcttcattggtagcggcaacagtagcctgttcaagggcttcttcatactgaactctgatagaacggtgatcaacgcgttcatcatgaccatacagctcaaggaacccattacagatgttctgccagcctttacgccagatatcaagggtttcaggcttatcccactcacggatctttttaccaaagccggtagagagaacctcacgggttgttcccatgatatggatatgcgggttatgaccattaatatcgtggataacaacatcggctatgatgccttgcttggtaaagtgctcaagaacaaaagctgcggtgagttcaatgttctgttctggtgctag

SEQ ID NO: 168135 - DNA, 264 bp, Enterobacter cloacae
atggattacttccttaagcgacatgacaacgtatctttcccagcttattataaattttgcgtttctctggatgcttacctgtattcactcatgtatctcgaagaaaacacctcaatgacgaacttaatcggcttctttcccggcaagctgttctggcataccgttgataatgggaatgatgatgttttttatatacttcttacattttatatgaatgaatggaaaaaaaaggaagcgtccttaagagcaaggaaaaatctttga

SEQ ID NO: 168136 - DNA, 438 bp, Enterobacter cloacae
atggctgaggcggtcatctatttggtagagctcggctccccgggtctgcgcggtgtgccgaaagagccattcaaccggagccgctcccacccgctggcgagcctgggtgacagcgctgcgggccagcaggttcatacctgcttcaccatcagcactcaggttaaggcgacggaccacattgcatcgctcattacggaaaaaggccatagccacgaacatccagataaccatatcaccgggcagacggcgacgccggacagtggcgagctcagagagcgtcaggtagtgttgtatccactcagcagggagatgctctgcaaacatctgtgcagaaggcggcggcataagtggatggtctctgaaatcgagcagatcattaagaagtggcataagaaaacgtctccctgtagtggaagccgttatagtgccgtagtttaa

SEQ ID NO: 168137 - DNA, 429 bp, Enterobacter cloacae
atgaaacgcacaccattttaccgcaggccagggcgaaccgggcaattctccggcctccgtgagcgcgttatctggatgattcagacgcgcggccgcccggtcaccggcagcgaaattgctgagaagttcggcgtaacgctcatcgagtttaaccgggtcgccaacggcatcacccgcggctccggacagatagctcagatcgttgagtcggaaaaatggattaacgaggacggcatctgcgaccggaaatttagcctggccagcaagccaaaggtcgtaacgccgcaaggcaaatcacgcctgttcacccggcgcgccattgagcaatcgcaggaaggcaggcggcaggagtgcattgaacgtgcagaacgacggagccgcctgattgctcagggactctacatcgacgaaatggagtcagtgctatga

SEQ ID NO: 168138 - DNA, 522 bp, Enterobacter cloacae
atgcataactggagcgatatattttccattgttgatggaaatcttgtgtgggccataaagccagctaacagggtaaaaattggtgacgttgcaggatgtcttagcgatggctacagaaggtttgaatactctggctgtcaatacctggcgcataggattgtatgggaaatgataaacggcccaattccggaaggaatggaggttgaccacataaatcacgtccgcgcagacaatcggattgaaaaccttaggctgataagccagtcggataatacccgtaacaaatcgctacccagcaccaatacgtcaggtgagattggtatccattggaataaaaaactaagcaagtggcatgtccagatcaacgccgacggaaaaagaaagttcgtgggtgtttacgagagcatggaagaagcaaagcaagctcgcgacaaggcaaaggctgagcatggttaccatgcaaatcacggactgcccaatagtcattgctaccagcagcggcgcgataaacaggaggcctga

SEQ ID NO: 168139 - DNA, 186 bp, Enterobacter cloacae
atgaaatgctgggttgatttgtctggaggtgcgaactttcgtatttataaatccaaagagtgcaggcttatggaaactccggaaaaaaacttatctctggctttcatgacagtggagcaatcacttaaccggcgcaggtggccactcaccccctttctggataactttctcttttatttcgtttaa

SEQ ID NO: 168140 - DNA, 213 bp, Enterobacter cloacae
atgttgattactatttttttagatataaatcaacctttattaaataggatgggcaacagtctaattaaacttttagtagagttcaacaagaccgtcgccatcgactgttacgaaaaaggtctagacaacggtaatggtgatcattccttagataataacttattgattgtgtttctgaacttcgccccttccttcaggttacgcaggccatag

SEQ ID NO: 168141 - DNA, 1023 bp, Enterobacter cloacae
atgatgaacccaaccatttttaatttaaacgaaaatatattgagcgtgcaagtaacgaattttaatttcgacgctgaagttcaatattcagcagttgtttatggtatcgatgaaaattttttaatgcactgcgggatctcattgttatcaattgtgaaaaaaacttcggaattaccattgcattttttcattattacagataaaaacaatgaagttgaattttccagattgcattctgttatcaagaatactcaacatgcacttacaattattattgtatcttctgacgctctggatgtttttcctaaaacttcaactttcccagtctcaatatactttcgcctccttgctccgtatttaattaaagaatatcgttattttttatatattgatgccgatattgtggcgctaaatagcatttataatttattagaaaactataagccgataaataatatttgttgtgctgtcagggagccggagcatcagattgccctttcaaattctattaatatccctggttgcgattattttaattctggagttctttatgtcaatgccagaacgtggaatgaaaataaaatatcgcaaaaagtttttgagtgtttattggagcgcggcgctgattttaagtattttgaccaagatgcccttaacgtggtcctgaacaaaaaagtaatgtttatagatggtaagtataattgccaaataaaggcagggcacaaaaggggggatttcatgcgtgaaccacctaaggaaacaatttttttacattatgttggtagcgataaaccatggcagttatggaatcaacagcaaataagcacccactatcgtaaatataaaaaaatgtcaccctggcgtgatgttgaagatgttagaccacgttgtgcgaaagaactaaagaaatgctataaaacgcttaataataagaaacattttgttgaagctttctatatgtttgttcgttatcatttggctcgtttcttggaaaaaaggaaaactaaaaatgttaagtcgtga

SEQ ID NO: 168142 - DNA, 1563 bp, Enterobacter cloacae
atgaagcctgaagatttccgcgctgatgccaaacgtccgttaaccggtgaagagtatttaaaaagcctgcaagatggccgtgagatttatatctacggcgaacgcgtgaaggacgtcactacccacccggcatttcgcaatgcggcggcgtccatcgcccagatgtacgacgccctgcacaagccagacatgcaggataccctctgctggggcactgacaccggcagcggcggctacacccataaattcttccgcgtggcgaaaagcgccgacgacctgcgccagcagcgtgacgccatcgccgagtggtcgcgcctgagctacggctggatggggcgtacgccggactacaaagcggcgttcggctgcgcgctgggggcgaaccctgccttctacggtcagttcgagcagaacgcccgcaactggtacacccgtattcaggaaaccggcctctactttaaccatgccatcgtcaacccgccgatcgaccgccacaaaccggcggacgaggtgaaagacgtttacatcaagctggagaaagagaccgacgccgggatcatcgtcagcggcgcgaaagtggtggcgaccaactcggcgttgacccactacaacatgatcggttttggctcggcgcaggtgatgggtgaaaacccggacttcgcgctgatgttcgtcgcgccgatggatgccgaaggggtgaagctgatctcccgcgcctcttacgagatggtggcaggggcgaccggctctccgtacgactatccgctctccagccgcttcgacgagaacgacgccattctggtgatggatcatgtgctgatcccgtgggaaaacgtgctcatctatcgcgatttcgaccgctgccgtcgctggacgatggaagggggcttcgcccgcatgtacccgcttcaggcctgcgtgcgtctggcggtgaagctcgactttatcaccgccctgctgaagaaatcgctggagtgcaccggcacccttgagttccgtggcgtacaggcagatctcggcgaagtggtggcgtggcgcaacatgttctgggcgctgagcgactccatgtgctccgaagccacgccgtgggtgaacggcgcgtacctgcctgaccacgcggggttgcagacctaccgcgtgatggcgccaatggcctatgcgaagatcaagaacatcatcgaacgtaacgtcacctccgggctgatctacctgccgtccagcgcccgtgacctgaacaacccgcagatcgaccagtatctggcgaagtacgtgcgcggctccaacggaatggatcatgtcgaacgcatcaagattctgaaactgatgtgggatgccatcggcagcgagtttggcggacgtcacgagctgtacgaaatcaactactccggtagccaggatgagatccgcctgcaatgcctgcgtcaggcgcaaagctccggtaacatggacaagatgatggcgatggttgaccgctgcatgtccgagtacgaccagcacggctggaccgtaccgcacctgcacaacaacactgatatcaacatgctggataagctgctgaaataa

SEQ ID NO: 168143 - DNA, 1116 bp, Enterobacter cloacae
atgcgctggcttatgcctgtggccgcactgtttgtttctcaaacctgggccgccagcctgaacaacccggctgataacagcttagatatgagcgattatcttcaaaataacgcttatggatttttacccatccccgtgctgattaccgagccggcagtgggttacggtggagggttattcggtctgttccttcacggcaaaggcaaacaagtcgataaccgttttatcccgcccgccatgagtgccctgggcggtgggggaacgcaaaatgggacatggtttgtcggcggagggcaccggcatacctggcagaatgaccgtgtgcgctatctggtgggagccggttacgcgaatattaatctcgacatttattcaggtgatatcgcgggctttaataatcaccgttcggttgaggcagaaacgcgcggatatggcggtatgcagaagcttctctttcgcgtgggagaaagccccgtctatataggtgcatcgcagttctgggcacaaatagatatttcggcccctgataatccgcttattgacagaatctggaagcaggtattgggtgaaaccagcatctcgtccggcctgggcattgtggctgaatatgactcgacggataattttttctggcccggtcgcggcgtctctcttagcggtgaataccagttctttggccactatttcggcggggactatcgctatgacttgctgacactcgatgcgaaatattacgttccactgacgccccgctggacgctctccctcgccggaaattaccagatgatggcgcatcaacagacgcatctgccgccgatggcgcgtccttacattcaactgagggggatttctcgctaccgctatcagggtgaggatgtcagcacggtacaaacgcagcttgcctggcaggcgacgccgcgctggatagtgcaggggtttgtgggggcagggagtgcggcagacaacgcaggcgatctctataccaaaacggaagtggcctggggaagcggttttcgttatctgattgcccgagaatatggccttcatacaggtattgatgtggcctttagcgaccatgagcaggcggtctatttcaatgtgggaactgggatatag

SEQ ID NO: 168144 - DNA, 1137 bp, Enterobacter cloacae
atgaagaacaatataaagcgatcaatgcatttttcctttgctatattgacaggatttttttgccatagtctcccgagctatgccgatataaattgttcaaattcagcagtatatcccaaaagaactattgctccgaatgtgaatatcacagcgacatatgctgggaatgatattcccattggcggtacaatttataaaggtagatttcaaattagtggttacattggcataacatgcgacagttcgccatggtcattatggagcacgctgactgttgacaatgaacctatgggggctgcacatatcatgtctacccaggcgtatggttcaggtcctgtttatccaaccaatgtaagcggtgtgggcattatgatgggcgctggccctagcccgttttcatccacttcgccacttacacaagtaggtccttttgacagtgacgctcctaacagagggtattatacagatttcgctttgataaaaaccggaccagtggcctccggggccgtcgtcaatgcaagttcatttccccatgtatcatggattgttccaactcagagtggttacaccggtcttcctttgcagttgttaaataccagtttcaccggaacgatacagtttataaccgaaacatgcacaacccccgatgtgaatgtccagatggggaaatatgatattgttgatgctttcactaaagcaggcgacacgacaaactgggttgatgcgtctgttttaatgcagaactgccctagattttctggttattataatgaagataatccccagtcttctagtgactcgggcactatggcgggttcgatgcgaacagggaatatcctatcgatatctttaactccgatgaatccagtcaacagtactgtcataggtattgatcaggatacggggtccgcaacgggggtgggcgttcagttaggctatactccagacaacattgaggcttccgcattatcacctgctaaaatatggagtcagggagtcacatgggatataaagccgccatcggatggaagaacttcatttaagatcccgttagcagcacgctattatcaaatcagcgatacagtaacccccggtaaggctaacactaaagtcacctttaatatcgactacaagtaa

SEQ ID NO: 168145 - DNA, 210 bp, Enterobacter cloacae
atgtctcactataaacttccaaagctgccagaaggttaccgctacggagccgaccactttgcaaacttgccagaggatggagcgttttacgcaccagctgggtgtgtgattaaatcagttgacacggacaaaaaaaacattatttatgttccgattcagtattacattgctgaaaaagatacttgggttactgtagacctcacagtttga

SEQ ID NO: 168146 - DNA, 279 bp, Enterobacter cloacae
atgatgaatgtttacgttgcctctgggacaattgcagccataaaagaattgtattcaggcgacagtaacgaaaaagatatgcccgacgcggatatgtttatcaaagcgcaggactggaataatgactggaatcagataaccgtcttacattcagattttgacgtcgtttgcacaaacgtctatatcgcgtttggtaagaagcaagatcatgttgttgaagattgcctcattgaagagcaaggaaaatggaaagtgcaatcggcaacgctaattaaataa

SEQ ID NO: 168147 - DNA, 204 bp, Enterobacter cloacae
atggatatcttggaggcatcagcaaagctggagcgaatcgaattactggcaaaaattgctcatgttgatcaagttaccttgactgaaaaaacggtggctttagagtggattggcgaacttgttggggagcttagtgtagaaattaaggatggaataatttcttcccgtttcgagaaatcaataattgaaatatgtaatttataa

SEQ ID NO: 168148 - DNA, 1038 bp, Enterobacter cloacae
atgttcggttcaaagcttgtgataaaaatgtgggaaacaaccacagagaaaggtattggtaccttattaaagccatggcaaatccgcagggaaggtatagccaacatagaaatagaaagaaaaaaaatgttaatcaatgcacagacagagagagacataaacgaaataaaggaaggaaaagctatagtttctttggatgacatagctaatcctaaattcattcatttaaaagagtcaacggacaatgatgcctacagcaatagggaaccgtatataaacatagaaaatttatcaaacattgtgacaactcaagtcgttgcaaaagaagtacaaaaagaaataaatattgcgaaatcacttttaatcacagaagaaatattgtcgtcagatcaatctgaaccaacggacgaaaatatcgaagatgattggttattcagatggcgagatagcgcggcgactacctcatcagaaaaacttcaaaacttatggggaagagtacttgcgggggaaatgaaatcacctggtagttattccttaagaacattggattttattagaaaccttagtcaaagggaagcaagtgatatacaagagttattttcattcgaaatactaaactccataataaaatatgaagcatcaaaagagaattatgaaaataaataccttgacgacttcctcaatgtagaatacctcatcagaatgcaagcattaggtattatctctggggcagactcctttggttgtactatgacactggcaagcagagacgaaaactcatacgttaacttcatcgaatatgatgataaaataatgaaaatcactcatgatgattttaaccataacattaaattcaaagtcatcttatttacaccattaggactagaattgcgatcactttgctcaattagcattaataatgaatatttgaattttataatcaacctgttaaaaaataaaggattcacagtcacaattggagatatccttacaaatccggatgggtcacgctcaatgataaatcaagtagttgtttaa

SEQ ID NO: 168149 - DNA, 249 bp, Enterobacter cloacae
atgagagtcctgaagattgaatgcccggaatgcggctctaaggctgtgattcgcaaaactaaccggaagcaccgccagattgcagatatttactgcgcctgtgctgatgtggagtgcgggcacacttttgttatgaatttggctttttccacactctcagccccagcgctaaaacgggtgatgctctggtacaaacattgctcaaaaatctgtcgcccaatcagaaacaaatggctctggatttattga

SEQ ID NO: 168150 - DNA, 1407 bp, Enterobacter cloacae
atgagaatgatgtattctggattttatagcaccgcagagcaaactgtcgctgagatatggagttctgattcaactctttttatattcgatactaattgtcttcttaatttatatagatgcgaagatcatacacgagaggaaattctcaatgtaatgcgagctattgaaaggcgaatatggattccatttcaagttggatatgaatatcaaagaaataggcatactgtcatacaagaaagtataacaagtcttactaaaatccaagatggcctgcaacgtatttatagtgaaaacttattatcacccggcggtgtaaaaaaacatctttatagcgcattgagcgacgaaacttccgatttacaacttaaactcaaagaaacaattgaagagttcattaataataaaatcacaccacgtatcacgagtaagaaagagatatcaaatcatgactcaattcgagatgaaatcgatgctatcattaataataatgttggcgaacttcccacacaggaacgaattgacagtataaatacagagggaaatattagatatgataataaaatcccacctggatttaaagacgcagcaaaaaaaaccacatcatattattcagggttgacacttcaggataaatttggtgatttatacatctggaaagagattatagaaagatctaagcaagaagaagtcaaaaatgtaatatttgtttgcgacgacacaaaagaagattggtggtttgagcacgcaggtcgtactcatggcccactggaatcattaaagactgagatatgcaaagaagcaaatatcgaaaactttagattagtgagccaatctacatttttgcatgatgcaacaaaatatttaagaaatgttgatgttagtgcagcatccttgaaagaagttgaggggttatcacagaacaccagagaagatgatattagaattcattactccccaacaacaaacttctttaagttcggccgcagcaagtataaatatttagacaatgatcagctatcactattaaatgatgaagaaataaaaaatcattatcattactcacttgacttccatagcccgaaaaccccttcacaatcattatttaatgtttatgaatcggcaagcaatgaagcagagagaatactagccgaacttaaagataattgtaatcgtctgtttgaaattgttagtcctgaatcgtatgaaagtacagtaaagcgtttaactatgtctttacgcaaagcttcttattcagcagaaagacttcaaagttatttagatctcatggatggagatgaggatgaggataaatatatacaaaaagaatacaagccatttatcatagctattattgagttgaatatgaacattgaaaaagcgaagaaattattatctaggctttcttaa

SEQ ID NO: 168151 - DNA, 1311 bp, Enterobacter cloacae
atgaaggaaggagatttagtctcatttctttcaacttatattgccggacgacggcaaacaaagctggaagcatttgataaagaggccgcaaagcgcagcgatacagatagcgcaacacttgcggcagaacgccgggagctggagcatcgctatgaaccgaaagcatggctgacggatgccgcgaagcgggccggacaaattaacctcgtgacccatgcggcgaaatttacccacggggattcaaaaagtagcagtatttacagcgaggcagtggcgcaggaagggtatctcagcaccgctgcgttgtcaggtctggaaccggatgcggtgggcaacgccgcggcgctggatgtcgcgaagctgctgcaaacgcgggttgacggtggcgactcccttctggcaagcctgaaacggggcgatcacgcggcgctggccgcttttgccgatgacgagaatcaactgagggagtggattgcggggttttcccgtgcgttaacgcccggagaaccggcgtcgcacaagctggcgaaacaggggtattttcctgtaggggaaggttatcacctgttaagcccgttattcgccacttcgcttgttcatgccatgcatcagaaaatgattgccttccgttttggcgatgaagttaaagccatctggaaagcacgtcgcgaaaaaacatggcatcccactccgctgacgttattcccggatgcggcggaagtacacttcggtggtactaaaccgcaaaacatttcctatctcaacagcgtgcgcggcggacgcacattgctactttcctgccagccgccgcagtggaaaagagcagaaaagccccccacggctttacgttcccttttttcgtcaggcagtcagttcgatcgccgcgcaaagggcacagtccaactacttgcttcattactggcaaaaaccggcgattacaacaacttccgtattcgagacgcgcgtgaaggctatatcaatgcgcttatcgacctgttatttgacgtggcggcacagttccaacaggaagtctggcaaaactggacgcaaaaatgccctgagctggaaaaccatcaaaaactttggctcgatccctggcgtacaaaaacagacgaagctttccgacttgagagagacaacgaggactggcaaacccgcgtggtaacagactttgccgtctggctgaacgtgcgtctgcataaacaggtgaaggagttagggaaagtggaacaacatgagtgggaaactcaggagcgttttcgcactaatctgcgcgagatggagaaaatcctccagggggcgctgaaatga

SEQ ID NO: 168152 - DNA, 174 bp, Enterobacter cloacae
atgtcgtctaaatatgtactggtatcacgcttcccattaaaaaacactttttctgaaaaagaatttacttccttaaaaagcgatgaaaacgttcgctactataactgtgaagaaaacggcgtaaatgaattgctggaattacgcgcattcaacgatattaaagaaattgcatag

SEQ ID NO: 168153 - DNA, 1794 bp, Enterobacter cloacae
atggcatttgatcttgatgtctgcattgcggcggcgaaccgggcatcccaggcctgtgaatatgagctgggaaactgctcgcgaacactgcatatcgggttcttttttgacggagtggggcgcaatatcgaacaagatgcgcctgataaccgtttgagtaatgttgctcgtctttatagggcttttcccacacctgtgaacaacaccccgtcatcagtataccaggcgcattacatttccggcttaggaacccccttccttgaaatggaaggcgaagcgctccagcaatttatggacggaacgggtaacgccgtaaaggactcgctaaaagatcagccgaccgatgcgctaaaagatatttttaaagcgaaagcgggtggtgccagcaatcagaacgtgcgcaatgaattacggcaaaaactgctcacgccgaaaggccagctcaggcaactgagagatgccaccctgaaaggggcgattcgggcagatatcgaagccacgccctggctgagggataacgagttcattgcatacagcaccgtaagcggtgccgacacccggctgaacagcaccagaatacgttttgagcgcacggttgaagatgcgctgaagcagggagaagtgcctctcaggctgatttctgtatcggtgtttggttttgatatgggcgggacgcaggcacggcagtttatcgacctgctgttaaatgacctgtgtgttcaacgcgaggacggaaagcctgctttcaagggaataccggttgatatcgtgtttgccgggctgtttgactgctcgcgggatacaccgatgagcagtgacaacgggctggattatgccggtagcgtcctggagtgggcaccggtaaaacatgcggaaacagcagggcaaatcatcagcatgtttggtcggaaatacctcgaccaccagtcgcccttgccggaggcggtcaaacattcgctgcacctggtagccgcacatgagcgccgacgctggcgctgcgtgtaccgtaccgggcggaaaggctttcagcatcaggaagtattgatgccgggatgcagcgacgatattggcggcggattaaaacccgatgtgcaaaagccgagtgccgagttgagtcgcgttccgctgcgaaaaatttatcaggaggctatgaaggctggtgttcccttccttggtttaaacgcgctttataatactgaccgtattgtctggtcatatctaaatttacgtgacagcgtcaaatcccagtctgttgatcaatgggtcgaaacataccaaagtgcgattaatgctcaaacgctcagctatcaggccctgaaccgacatctcgatgattattttgagtggctgagcaggcagttttacgaatacaagagtgaactgcgccgtctggaggggatccgcaacgggataatgacgtccacgtcctcggcatcaggtctgctgggactatcttctcaggcgcgccaggagatggatagcgtaacggaagatatcgccaccctgaaaaaacactggggctggctgtctgatgtggcgagtgcggccagtcttctactgacccagaagttttattatcccccgaagatttatctggacaacattcttgagccagcgttattgcgtgccaggagatatctggactgtggtacagcagggcatgatggtaaagcaccaccggtaaaatggtgtatgggggcttcagtgctgtatgcgtggtttatacatgatgtgcaacgcgcggaaggtatcaatgatggttatttttcggtgcgctggttagagccaaggtag

SEQ ID NO: 168154 - DNA, 546 bp, Enterobacter cloacae
atgggcttttttacgcgccttgaaacagtggatggtgcagtcacgcgtttttacgtcaggcgaaaagtatggctgtggagcgccgttgccctgccggtggtggtcgtgctgggctggatggtgtgggtgatgctctgggcacccccgatgggtggcgtaacgctaattattcatacccgaattgaccgtccgattctgggtttcagtgtaaatggtgtggcgggcggtaattcgtgggcatttgatcccagtaataaatacgccggggaaaatggaaaatcaacctgttgcggtgcgatcaaaggaaagaccgcaaaggttatctggacgctcagtgtcaccggtccgcagtatgaaagggggatgagaccagagcaacgacgtgtggtgatgccgttaccggagcgtaagcggggtgaaaacgatctgcatgtgtactttttaccaggagataaggtgttgctggggtggagtaataatgccttttcaccctacgacccgcgtagcccgaactatacgccgtcaccgcttcttgaggataaataa

SEQ ID NO: 168155 - DNA, 546 bp, Enterobacter cloacae
gtgaattttattacgcggcttgaaaaagtggatggtgcagtcacgcgtttttacgtcaggcgaaaagtatggctgtggagcgccgttgccctgccggtggtgttcgtgctgggctggatggtatgggtaatgctctgggcacccccgatgggtggcgtaacgctaattattcatacccgaattgaccgtccgattctgggtttcagtgtaaatggtgtggcgggcggtaattcgtgggcatttgatcccagtaataaatacgccggggaaaatggaaaatcaacctgttgtggttcgatcaaaggaaagaccgcagaggttatctggacgctcagtgtcaccggtccgcagtatgaaagggggatgagaccagagcaacgacgtgtggtgatgccgttaccggagcgtaagcggggtgaaaacgatctgcatgtctactttttaccaggtgataaggtgttgcttggatggagtgataatgccttttcaccctacgacacgcgcagcccgaactataagccagtactagagctgatggaaaattaa

SEQ ID NO: 168156 - DNA, 819 bp, Enterobacter cloacae
atggataccacagagttactggcagcattgcccgtcaggacagaagaggcgatttgcatcttgtttgaagctggcgcgcagccggaatcaagtttcttggcctttaagggcagacatgaagacaggctgcattcgctatatatccacccacagttaacggaacttcagaactacggcccctggctgctggctgtagatgataaagaacagctacggggatatctggaaatattacccggttgtgttgccgtgattatctcaacccgttatccctccttattggctgtgcagttatcccgtggatgcactatcgtgccacccgagggtgccgcagtgctggtacgtttctataccggccatgttattggtgccctggctgccggtgcacagtacgactggcacgcttatctgtttaatggcattacgcagtggtggttacccggcgatgtccagtggcagcgtctcagcatattaccctcagcaaacaaaacgcccacaagccatgttatccgtctggatcaaaacgcctggcagcagatttcggataggccggaagtgtctcgtgtgctaaaggaatggcaacaaatgtcgaccagtctgggagtgtcgccatgcgctcagcgattgatggtgctgaaggcattgaataaagctgaaagcgtcggtctggagcatcctgcagaccagatgctgtatgcgctttgctatctcaatggcgggaagcagatgctggaatctgaagacttttataccgcattgcccaaggttgttaatggtcagatacgtttaagccaggcgattactggcgtctcattctga

SEQ ID NO: 168157 - DNA, 435 bp, Enterobacter cloacae
atgaaactcaagaaaatagctttcctcatgcttaccctggcggtatccgggcaggtctgcgcgacccgcgtcgcccccgctgcctctgcgtacacccgtgaaaacaacgcggcgatgtatcagaagcttaatttcaacgacaagcgcgacatcgacgatgcaaaacgtggatttatcgccaccatcgatcctttaataataaaaaaagacaacggcaaaccggttgttaaccttgaaaactggtcatttttaaaaggtgaagcacccgataccgttaacccttcgctctggcgccatgcgcagttaaataatattaacggtctctttaaagtgaccgaccgcgtatatcaaatacgcggcatcgatatttcaaatatgaccatcatagaaggcgatagcggattaattgtcatcgacccactggttattccctaa

SEQ ID NO: 168158 - DNA, 828 bp, Enterobacter cloacae
atgaaaaaactcacgcccctgagcctgctaattcatgcgctgatgtttattctggcgttaagctggctctatccgttcgtctggatggtggtgtcatccctgaagcccacggcgcagatttacaccacggatctcttttcgggcacgctgacgctcgaaaattacaccttccttttcgataacagcaaccgggcagataaaccctttctgcgcacgctgtttaactcgcttttcgtctccgtgaccgtgaccgcgagcgtgactgtcacctccatgctggtgggctatgcgctggcaaaaacggaattcagaggcaaaaacgctttccgtaatctgttgattgtgcagatggttttcccggtgtttatgttcatcattccgcagtttgtgctgatgcgtgagctagggctgatcaaccgctacagtgccatgatcctgccttatgcgatgagcgcctgggggatctttatggtatcccagagctttaagggcacgcccaacgattacctgtacgccgcgcgtctggatcatgccagcctgtgggccattctgcgccacgtcatgatgccgctgaacaagtccattctggcgatcgtggcgttatttaccttctcaagctcgtgggacaacttcctctggccgctgattgtcatgcgcgatgccgacaaaatgccgttttcggtactgctggctaccttcagcaaatcctacggcgtttatctggggcctgtgatggcgggggccgtggtgcaaatgctaccggtcatcctgttgtttatcctgttccggaaatatttccttcagggcatgtcgttatcactgaaataa

SEQ ID NO: 168159 - DNA, 405 bp, Enterobacter cloacae
atgctgaccgagaagggcattgaacacccgtatacgttcggcgacagtaaaggtctggtgatcttcagttccagcaagcggaaggcgcaggcctggcaatttatgaagtgggtctttagcaacccggagcatgaccgtctgtggcttgagttgacggggatgccgcccgcgcgcgcggatctcatgagtaatccgatctttgtcagttacttcaaacaaaatccgcttgagaaacagattgcctcctgggtggacgtcgcccttccgcctgcggcaacaaaccagacgacagaagtccagcgcagcatgacgcagatgcttgagcgcgtgatattcaaaaccagtacacctgccgacgcgctgaaacaatctcagcaggaaatcaacgcgctcgcgggccagtag

SEQ ID NO: 168160 - DNA, 162 bp, Enterobacter cloacae
atgacgccccttttgaagcgggatgagaaccagattaatattacgatcttcgcagcgggtcgcgacgccgcgcatcaggctgacgtcatgcggatcgataaagacataactcatggcatcgttaaagataacgccgatcacgccggattttccggtgcgtaa

SEQ ID NO: 168161 - DNA, 288 bp, Enterobacter cloacae
atggatgccaaaaaaacctgcgccgctctggcgctgttcgccgtttctgcctcattttgccacgccgggcatacgggtaaaatccgctttatcggcgctgttgttgaggcgggctgctggaacaggacgggaacgcaggagattacctgcgaacgtaatcacatcacgacccactaccagacagccagcgcccgcaccctgtcactgacggcaaataacgccacggtgaccacgcgttatctcgacagcgacagcctgctggaacagatacagatcgattacgactga

SEQ ID NO: 168162 - DNA, 663 bp, Enterobacter cloacae
gtgatcggcggaacacgctttatttacaacagcaaggatgccagcattacttttcaggtgaaaaatacctcgcaaaacccttatctggtgcagagtaaaatcatcagcgaggatggcaaaaataccctcggcaccaccgggttgacgccgccgactgatgtgccttttatcgccacgccgccgctctttccgctgaaagcgggccgggagaacgtggtgcgtattatgtacacggcggggaatttaccgaaggacagggaaagtgtgttctggctgtcggtgaccgggataccgggcacgaaagaaaaagctcgcgacaatacgctgcaaattgccgtacgcaaccggattaaattgttttatcgccctgaagggctaccgggtcgctccgcagatgcctaccggcagctgagctggtcgcacaccggccgtaacgtgaccgttaaaaatcccacgccttattatgtcactctctataacttaacggtaaacggcacacggcgacccgataccgggatggtcgcccccttctcttcgcgtacccagccctggtgcccggccagcggtgagtgcgccctgcaatggcagaccattgatgactacggggctgtgatgccgccgctgcacgttaatgtgaacgctacgttgcagaaagggcaatag

SEQ ID NO: 168163 - DNA, 516 bp, Enterobacter cloacae
atgaaatcattaatgatgctttttctctacgcaagtggaatgaccgtagcctgtgcggcgggtggcaccgtcaatattggcggtctcattgagaactccagctgtacggtggcacctgattccgtcgatcagcaggttgcgctaggcgacatttcggcacgccagtttacgcaggtgggccaggtttcgcttcccgtcgcctttgggattaatttgcaaaaatgcggttccgcgacaacgggcgtgacggtgaatttttccggcaccacggataaaaccgacagcgctctgctcgccgtggacagcgctgccgccgcggcgtcgggcattgccatcgccattcaggacgataaacacaccgcgctgccgctcaatagcgccagccgcgtctatgcgcttaatccggcgcaggaaaataatcacctgactttctatgcccagtatcaatcgacgcagccgcagattactgcgggtgcagcgaatgcgacggcgacgtttacgttgacttatcagtga

SEQ ID NO: 168164 - DNA, 540 bp, Enterobacter cloacae
atgaagtgttatgttttcactctgcccttgctggggctaatgctggcggcatcgcctggccgcgccgagacgcagattggcacctggacaatgaacatcagcggcacggtgttgccttcgacctgtgatatcgataccaccagccaaaacccggatgtttatattggtgagttcgccagtaacgcttttgctaacgtaggtgcaacctctgccaccgcgccgctggatattaaattaacggggtgttccgaaaatatcatcggcgcgaaagtgacatttaccggtacggcagaccgcgataataaccagttgctggcgctctccgataccggcggcgcagggggaatggccagcggtgtcggcatagaaattctcactaaagataacgtcactattcccattaatacgcagagtaaccagctgccgttaaacgccggggataatacgctcaatttcctgctgcgttataaagcgaccaaaattcgggttacggcaggcaatgcctcatccatcatgtatttcgatgtggattatcaataa

SEQ ID NO: 168165 - DNA, 1005 bp, Enterobacter cloacae
atgaataatatcgttaaatacgctctgcttgtctgctgcgcgctatttttctggggcaaaaccgacaaggcgatggcgacctgtagcctgacctcgtcgcaggcgagcgtgtcggtaaatcaaaactatacgtttagcagtaacagcagtggtacctactctaatgaaacacccaaatcggtcacattctggagtggaaatgcggaggaaacttacagctgccccgcacccacaaattatttagcaatatgtggaaccgatgcccaatatattggtggcagtacatcagccgttctggcgccaggaataaccggcggtgcatacgcctctgatggaaatctcaccaccctcgattacggcggctgttttgctattggcaatacgggtggtaagtggccagccaagggaacaatggaaggcgccttgcaaccgtggaagtacgccggggcgcagctgaaaatatccgattccgcccaggccagaaatatcaccttaaataacgttctggttggcacgatatttattactaccgcgaattataacggcaaaaaaattggcggcgcaccgctaaccaaagtctatctgtccggtacggtaagcattcccgcctcctgccagctggcctcaagctcggtggtggttttaccgaatacctacgctggcgaatacagcaaagcgggtactggcggcaaggtaggtaccggcaccacacagccgatgaccattaaatgcctgggcggtagccaatctgccaccatcgatctgcatgtcaccaccaataaagtttccggggatgacatcgttaccactaacccggatgtcggggtgcgaattctggacggcaggggcaataccgtgtccgccaacagcggcaaagtcttagcgattttacataatggtcaggtcgatgtgccctttacctatgtgccaacggcaataaccggtaaaccaccgaagccgggggaatataccgccatcgaaactatcgccgttaccattccctga

SEQ ID NO: 168166 - DNA, 2634 bp, Enterobacter cloacae
atgacgatgataaaaaaagagattgcctgcgcagttgtgcaggctttattaacccggtacagaatgtatcgcgttattttgcccgcgacactttctatgctgccgctggcggctcaggccgataactattttaacccggcatttttatccgatgatcccaatgcggtggccgatctgtcgcattttgaaaaaggcgaccaccaggctccgggtaaatatcatgtggatatttatctgaataaccagtttgtcgatgccgaagacgttaactttagcgccgccgctggcgagatgaaagatgataccggcctggttccctgcttcactaccgcgcgtcttgaagatatgggcatgaacaccaaagccttcccggatctggcaaaactgaccccggcacagtgcgtgcctttcgccgccataccggacgcctctaccgagtttgactttgaacgccagcggctggatatcagcataccgcaggcggcgatgaagcagagcgccaggggttatattccgccagaccagtgggatgaaggaatcaatgccctgctggtgaactatgacttttccggcagcaacagcagcggcgataacgccgaagacacctacttcctgaacttgcagagtgggctgaatctcggtgcatggcgtctgcgcgactactccacctggaactacaccagcagcgacgaggatacggagaataagtgggaacatatcagcacctacgtcgagcgcacgattgtgccgctgaaagcggagctgacagtgggggaaagctataccccgggggacatcttcgacagcctgagcttccgcggagcgcagattgcctccgacgacaatatgctgccggacagcctgaagggctttgccccaacggtgcgcggcattgccaaaagcaacgcgaaggtcaccatcaagcagaacggctacgtcatctatcagacttacgtctcgccaggcgccttcgcgattaacgatctctacccgacctcctccagcggtgatttacaggtaacggtaaaagagagcgacggcagcgaaaacagctttaccgttccctactctgccgtaccgatgcttcagcgcgagggacggcttaagtatgccgttaccgccggtaagtaccgcagcagtaacgatgagcagaacgaggataatttcgcccaggcaaccgccatctacggtatggctcatggcatcacactgtatggcggaacacaggtcagcaatgactatcacgcctttgcgttcggcaccgggtttaacctcggggcggcgggtgcggtctcggtggacgtcactcaggcaaacagtaccctggcggacggcagcgagcatgacgggcagtcggtgcggttcctctacgccaaagcgctgaacgaactggggacgaacttccagcttctgggttatcgctactccaccgaggggttctataccctcgatgaaaccacctataagcatatgagcggctacaccggggatgactcatggaaagatgaggatcacgacggcaagcaggataagccggactggaccgatttttacaatctctactacaccaaaaagggcaagatccagctcaacgtctcacagcagattggcgccatgggatcggtgtttgtcaccgcccaggagcaaagctactggcatacggatgagaaagatcacctgctccaggtgggctataacggcagctggcgcgatatctcctacagcctgacgtacaactacaacaagtcgccggatgaagatgagtcggatcaaatatacgcctttactctctcgctaccgattggcaagtggctgtccacccataatggggaggaaatcaatcgctctccgaacactaccaacgccagctacaacatgaataccgacagacacggcaaaaccactcagagcgccgggcttaacggtacgctgctgtccgataacaacctcagctacaacgtgcaggagagctatggcaaccacggcacaggcgacagcggcaacgccagcctgaactaccagggcacctacggcaacctgaaagccgggtataactacagcgatggctatcaccaggtgaactacggtgccagcggcggcatgctggtacaccgcaacggcatcacgctgagccagccgctgggcgacaccaatattctggtgaaagcccccggtgcggcgggcgtggaactggaaaacgccaccggggtgaaaaccgactggcgtggctacgcggtgatcccttacgccacgacctaccgtcaaaaccgcgtggcgcttgacactaacagtatggggcaaaacgtcgatatcgacgatgcggtcaccaatgtggtgccaactcagggggcgatagtgcgtgcagaatttaacgcccacgtggggatccgcgccctgctgacgcttatgcacggcgacaagccggtgccgttcggcgcggtggtcagccagaaagcaggcaacagcacgatcgtcggtgatgacggccaggtttatctctccgggctgccgctggctggtttgctggacgtgcagtggggcgacggcgccgatcagcactgccaggtgaaatatcaattaccggaaagcgcaatgcagcaaccggtaaataaaatcagtgaaaggtgtctgtaa

SEQ ID NO: 168167 - DNA, 714 bp, Enterobacter cloacae
atgtctgttattaaatttattcgtacatctctggccgtgctgacgctggccagtgccgggctactctcgctaaacgccgaggcggcaaataatggcggcgtttcattaggtgcgacccgcgttatttatccgcagggaaacacccaggtatcgctggccgtcaataatagcgactcaaaagccgtttttttaattcagtcatggatacaaaacgcacaggaagcaaagagcagtgattttgttatcacgccaccgctttttgtgatgaagccgaaaaaagaaaatacgctgcgtattatgtatgtcggcgcggataacttgcctaaagatcgtgaaagcctgttttgggtaaacgtgaaggcgatcccttcagcaagcaaagacacgcagaacaaaaataccttacagattgcggtactgagccggatcaagctgtttgtccgtccgaagaatctgcctatagccgctgtcgatgcgccagcaaatctgcggttccatgtcagcggcaacacgttaacggtgaagaatccaacgccttattacattacgctggtgcaattccattccggtaacgccaccctgccaaataccatggtcgccccactgtcgcaggtggacattaaacttccggccaatgcccagggcagcatcactttccagaccgttaatgactacggtgcaaatactcctacccagaaagcgataatggaataa

SEQ ID NO: 168168 - DNA, 552 bp, Enterobacter cloacae
atgcgtatgaatacgaattggctcgccgtgttatcggtattggtgtttgccccctcgctggcgctggcgggcaatcgtcatgccgtcacggtaaaaggcggcgacgttgaatttcatggcgctgtggtcaataccgcctgtgctgttgatgccgggagcctgaatctcacagtgcaaatggggcaagtgcgttccgacgaatttcatggcctgggaagctggaccgacccgcaggcatttagcatcacgctaaaagagtgcgacaccacggtaagtcagcaggtgggtatagcatttcgcggtcagaccgataaaaaagatcccggcgtgctggccattaccgagggagcgcaaagtgcacagggcgttggactgggaattttcgacagtcagggcaatctgattatcccgaacgtgcaacccttgaattttaccacgctacaggaaaacacgacggtactccgttttgtcgctaaatatcgcgcaacgtcaaataacgttatcgccgggaatgcaaatacacaaacctggttcaccctgacttatttgtaa

SEQ ID NO: 168169 - DNA, 492 bp, Enterobacter cloacae
atggcagcagaaatcggtgaaacaagcaccgtacagggcggcaccgttgagtttaagggttctgttgtcgatgcagcctgtgccgttaccgctgacagcacaaaccaggttgtcacgatggatcaggtccgtatgcaagcgtttaccggtaaagattccgtcgccaaccagaaaaaaccgttttccatcaaactggctgactgcgacacctctctctcttctcaggcaacggttacgtttgacggcaactcagccgtcggcgagccgggcgtactggacaacatctctggcgttggctcagcgtcaggcgtaggtatccagatttatgacaaaaacggttctaagctcgatctcggcaccgcctctcaggcagtaacgctgatcgacggcgacaacaccctgaacttctctgcggactactaccagacagcagaagccgtcaccgcaggtaatgttgatgctaccgcaaccttcaatgtgacttatcagtaa

SEQ ID NO: 168170 - DNA, 699 bp, Enterobacter cloacae
atgatcaatcctaacgtcaatgatgtttacggcgacgtattacatgcattttcttttggacagaatacgaagcccatgctggccatcgagacattattttcagcgctctctccggccgggaagcctttcgagcttgaaatgggggcggtttttcaccttagccccagcagagaagaagcaggaataatactccttgagaatggaatatgttccatatgccactcgcggaataatctgctcattaccagcgccttttcgccatcaattttaggcttgatagatggttacagcacatattatgaagtgccagctcgcccacagcactatctttatggcgagacgcactgtcgcggaaagtttgtcgcacttgatgattttgtcagtattgctgatgagcagaatttatggcacgacgttgcgcgtattcttgcccatcgaatgatggtcatgagcgcaagggaagaggaaatggtcggcgtcgactcttatctaaaagtgcgaaccatgttaattgaactcggcagttacccggaagaataccgtctgcaaatacaggtgcttagctttatccagcggcgtacaaatatctcccgcagccgcgtcatggccatattatctgaactgcgtaaaggtcagtatattaccatcgataacggtaaactcacggcaattcatcaaaaactaccggccgcattctga

SEQ ID NO: 168171 - DNA, 252 bp, Enterobacter cloacae
atggatattaatgaaaaaattagattattgggtgaagggctgaaagatcggttagatccttcaatggttgactttgctcttgattatattggattctcagagaatatattagcatttgaaactttgtgcgatcatatcggtgatcatgatgttgtgatcagtaaatgtgaatatgctcaaattattgagatagctaattatttaaatcttgaaataaatagtaggtatacatatataaatccggagaaatga

SEQ ID NO: 168172 - DNA, 483 bp, Enterobacter cloacae
atggcgtggccgttattgcccgaagcaatggcgatatccagccttgttggcgcaagtgcgaatgccggaattagttatacaattaatggtgagataaacccgaacgatgtgattctggcatactggacgggggcattaactgcgaatactggtttttgggaaaccgtggctgttaatacagacaatggagctgcatccagctatctgaaaggtgatgatccgtggaaaggcggtgcaattagtggtgcggcttcagggctgggttatggtattggaaaagttgctcagggatcactcgataaagttcttaatccaaactggaaaaattgggaatggacaaaactagatatgggaatacccatgcctacgccacaaagcccgttgcctgggatagctggaaacgcaatgagtagcgctactacagaaatgcttaatgatcaagcaggtaaagcgatggcacataaaatagggggagaagaataa

SEQ ID NO: 168173 - DNA, 246 bp, Enterobacter cloacae
atggctggtaaatattggttacgtgttcttctttgtttatttattgtttgcatacctatgttcgttatcatgtttttagttttatatattctgattaggatatatgtatctttttcctatgggattccatttgagctatcttggactgatacattcaaatataccaaagctgcttgtttcaccggtgtaatagttgccgtcggatgttggtatctctactacaggcattataaacgctaccgatag

SEQ ID NO: 168174 - DNA, 204 bp, Enterobacter cloacae
atgccggtaaaaatcagggtgatgccggactgcatcgttattaccacccagaacacccgcgagctgtggggctgcgccgagggtttaagcgtcgcccacttcaacaagaagaagatgaaccagtggatcaaagagtttccgggggcgctgaacgacaccggcgatctgccggtgtacaaacggggtaacgggaatttttcctga

SEQ ID NO: 168175 - DNA, 420 bp, Enterobacter cloacae
atgttatttcgccgctcattactttgtcttgccatctgcacggccctacagactacagcttatgccgctgaagccccggctgcgccatcttcagagagcgaagaggtcgaattcaacgatcagtttttgttcaataccggaacaagcattgatgttagccgcttttcccggggcaacccggtggtgcccggcacgtttaaaacgcaggtcacccttaacggacagaaaaagctgctgaccgatttcacctttaaagataatggtacgccgcgcgctaccccgtgttttacggcgaaactgttgctacaggcaggcgtaaaagaagcgcgtctgaaagaggtgacaagcgaggagagtttcgacgatcgcgcacaggagagctgccttacgctcgacaaggctctgccggggtcgtcctag

SEQ ID NO: 168176 - DNA, 1386 bp, Enterobacter cloacae
atggaaaacagtaatgagagttttgatttaaaaataatgggcgcacgtactcagacgggtatgtcatgggctaataacgagcataaattagttgcactggataaaaatacgctcgaaccagtggtcgtcgcctggagctatgaagatgcgccagaagaaaaaaccattactagtatatttaccgacaccaaaccatctaaaagacttttggccaactccgaactctacgttcgcggtagcctggttaatatcagtaatgtgggtggggcgggagcttcatttgcagccattcaggataatgaaaaagttgtcgcctggggtttagcaggccaggggggtgccacgccaacgagcgaccgtaatcatgatgtcaaagtggtttatggctccgaagacacgtcaataggtatcaataacaataagcaaatttttgtctggggcagaacgtctgacgaccccattcccgagaatatcgcggcgttaaatgatgtcagcgttgtaaaagctttcacaagctgggacacaccgtcatatcgcgttttcctcgcattaagagaaaataaacaggttgcgcagtggggtgacgagggatggccctggccgatgcctgaacatgtcgctgagatgaaagatatcatcgctatcgaagcaacagacggagcttttgccgtgataagagagaatggacatgtcgttgcgtggggcgatccggcttatggcggatcaatgccggaaacgttgaacgatatttctgatgcaataaaaattgttgccaacaattccgttttcattgtccagcatgaaagtggcaaaatttctgcgtggggagatgaagaagatggagcaaacattcctgaagatatcgcgaacctgacagacatccagttaattcgcccctgctaccgtggtttcatggccctgcgcaaaaatggaatggtggtgagctggcatagtgactccgaaatgcttgttcctgaacaattcgctaccagaactgatttcattgatatccaggtgggaactgaataccccattgccgtgctttcaaaagatggacgcgttgacggttgggggctttcaacaaacagtgacgttatacagatgccatccggtctcaatgaggttgtagcgcttacttctggtaatgcaacgattgctgcgctcaaaagagacggcagcgtcgtcgcctggggtcatccggatcaggggggggatacatcgcctgtggcgaatgaactttacgacatccgcgctatttactcttccacctacggattctgcgcgctccgtaacgacggaaaagtcattgtttggggggaatacggtggcgatatgagcaacgtgccaccggagcttcagaacaacatcacttacgcatgggagtga

SEQ ID NO: 168177 - DNA, 900 bp, Enterobacter cloacae
atgccgcgcactgtaacacataaaccggatagccccaataatgacgatgttttagccgcgtctgaaaagttggacgcctgtaaacctccctataccagcgcacacatgaaaatctgtgttgctgccgccaaaattatcctcgccgcttccggcgtggctcgccgttccaaatacgaaaaggagaactatctccgtatcgatttcagcaaagccggtaaggttacattttacgccgagtttccaaaaaagatggggctcaaaggcaaaaagctcggcgagtggccggagcttgccatccagctggcgcgcgaaaaagcgttaggtatggctgaaggcggcttgcgagctgagtccgtacatgcagcgctggaagtgtacctggatgacctcaaagccaacgttgcccggcagaagttaagcccggatagtttcaccacctacggggtgcgtattgaccggattaaagcaacgttcggcccgtgggaagtattcagcgatgtaacgtacattcggctggtagaactgctggacgagtggagcgccacccgttcgaataataacgcccttgagttgtttgccgagctccgtcggttctggaagttctgcgcacctacgttttgcaatggccgcaatgttgccgccagcctgcccgacgattatgtatcttctcgcgttcagaaacctacccccacacggctttttaccgatattgaatcaatcgcccgcctctggctcaatgtggccgcctgcacctctgtacaccagaagaatgctgttcgcttcatggtcatcaccggcgttcgtcctattaatgtccataacctgcgctgggactacgtgcacgaggaagctgggaaattgtttatccggaaggggctatcggtatgcgcgggtctatga

SEQ ID NO: 168178 - DNA, 513 bp, Enterobacter cloacae
atgcgcgggtctatgaaaacacaaaaggtgttctgcttgccgataacgccagagatccggcgaattatcgacgagcagaaagcttggcgtaattcagttcctgagtgcaataacgattttgtattcccgcagccgcgcgacccaatgcagccattttcaaaacgatcgctggataaactggtgaaaacctacagccctgaaggtgcggttaaaggtatgaagcatgacgggactattaaagggagagagggggcatttaatacgatgtgccgcaaattccttacgagcaatgttattgccctgatgaaggaaagaggctattcccgatcagaccgaagggaaatcagcctcctgtgcgttcaccactccagcaagtcagatgacccgatggcagaacattacgacttttcagatgagattttgcaggaagagattgcatttaagcgcgaagtcttcgaggctcacgaacggagcattcttgcgcaggctgcgctgttacggcgacggggttaa

SEQ ID NO: 168179 - DNA, 207 bp, Enterobacter cloacae
atgaaacctgttttcgatactaatggactggctacagaaccaggtgaaatacgctgttattactacgacgcagtggcttctgaatatatgggctggtctgacgaatacatcaatgttggtgtcagcatgcttggacattctacggatattgaacccggtgatggcgtcgctggaaaggtggcagtgtttaccggtactaactggtga

SEQ ID NO: 168180 - DNA, 159 bp, Enterobacter cloacae
atggcagaagcaactgccataataaccccgttgcaggacgcgaaagatggcggatacatcgacgatgaagacattccggtgcttgccgcctggcagaagtatcgttatgcactgacgaaggttgacttatcgatccctgagtggcctcagaggccataa

SEQ ID NO: 168181 - DNA, 1923 bp, Enterobacter cloacae
atgctagaattcaaaactccgtattcacatccaaaatatcgaccagacattgatggtttgagggcagtcgctattttatctgtagtcatatttcatgcttttccggagcttttagctggcggttttgtaggcgtagatatattctttgttatctccggttatttgattacatcaatactattaacaaataaagatagatttagttttattgatttttatgcacgccgtataaaaaggattttcccctcgcttttaactgtattgcttgttactttcatagccgggtgggtgttgttactaaaatcagagtttttgcaacttaacacgcacattactgcagggagccttttttactcaaatttccaactacttaatgagtttgattattttgatgccaaatctgaaacaaagcctcttttgcatttgtggagccttgctattgaagagcagttttatatattttggcctttaataatttgggcgtcattcaaaagcaaactgaaccctatctttgttatcgttataatatctgcttggtcattctatacaaatattacacttacctatacagacaaaatgtctgcgttttacttaccacaaagtcgcgtttgggagcttctcgctggaggtgcgctggctttggtggccttgtatctgaaggataggaaagaaaaatacttaaaacctggcaggctggtttctttaatctcagcaaacatattttctgtttgtggatttggtctgctgacctactctattttcaacatcaccaaagaatcagcgttccctggttatcttgctgtaatgcctgtatctggagtcgttttagttattgcggcaggacagagagctattcttaacagagccattctgtccaataaattagcgatctggtttgggcttattagtttcccgctttacttgtggcactggcctatactgtcgttcatcagcatactgaccgacaacggggcaagcgatacagtcaaagtagtggccgttgtggcctcagtgataatttcatggatgacatttaagttcattgagttgcctattcgcaggaagcgtggctttacagcattcatacctgcattagcgatatgcatgatagctatgtcttcatttagctattttatatcccctaatctctacaatcactattgggagaactcaagcaagataaagttagaaacgactgcatcttttagccccaaaaggaaaaagtgtcaccttcctccctatgaaggctttgagaaaatacctacatgcgaatactttggcgacacgattaagaaagttgctgttttcggcaatagccacgctaccgaactggcctacgcgttagctactgacctgcaagggaaggggattggcgtaaaacatttcacaatgagtggctgcaagatacctaaaattactgatggccgatacgataagagcgtatgcaatgagtggcagtttttttctgcagaaaaaatatcccacgatccggatataaaatacattgtagtttcttatagagtggaaagttacttgtttgagcctggttacaaggaaggtttcaggatgctaatcgacaatctctccatcagcggaaagaaagtcttcttagtaatgcaagcaccaaaaatagagcattacataaactactacattcgctactcattggctggcaaggatgtaaaaagcgggagtatttctaaatggaagagactaaataaagatgaatactcattcatcagggatttgcccaagacggtatcagttatagatcctgtcgatgagttctgcgattctaaggattgttacgcaatcaaagacaataccagtttgtacttcgatgataatcacatgtctgtagccggggcattgttagtggcgaataagatcgcatcagaaattaatttagtttcagtgaaataa

SEQ ID NO: 168182 - DNA, 129 bp, Enterobacter cloacae
atgtcgaagcatcgcaggttaaacaaaattctgctggtgctggtgctggtgctggtgctggtgctggtgctggtgctggtgctggtgctggtgctggtgctggtgctggtgatcatcacaatgcaatga

SEQ ID NO: 168183 - DNA, 1044 bp, Enterobacter cloacae
atggcgattgagcaggcggtttttactttttatagaataaataaatcagggtactattcccacggaagccagcagccagcttttggtagcactgccgagatgcttactgatttacaaggatgggccagaacaaaaacgcttaaacagacgaaaacttttgaagcgaacgaggagcgctatccctgctatcttgtcgatgcaaaaagtagtggaaatgactgggggttgttgatttggaacgaaatccctactaacggtcagcaagtcccatccataagtgaaactatgagatttggcgcagatcctcaggtgattctgaacgctgttcagggcgggagtataccgggctatgctacatacttttggtttatccctgatatggatttgtttgcaacagtaaggcttcataataaattaacctcgcaatcatcccttcagtattatttgaattgcttcttaaagcaatcttcacggcatgttgatgctgaacgaatcaggaatgatgatggaagtgtggaagttcgtataaaaggttataaaaacaaccctgcagatataaatgaagaagagaaacactatatcccaaaattcagttcgattttagttcgtaatggtggtaagcatgaaattattagacaaaatgctgctcacgtaaaaaagatcgaacgtattgtagagttagatcttactaaaagacaagatctcgagttatggcaaaaaatgttacaggttgtacgtcttgctccccagcaaaggccgaatgttacgactaaagttagatatacattatcgcctgacgtcactctacaagacgtgaatgcaatgattgatgactgggaagccgatccgagtgaagtaaatgattatggcttttactttgaagggcaatcaaataagccttattggcttagtaagtctttagcaagaatggagcatcaacttgatcttgagagagaaaatattgagttagttcacctcgattccttgatgcgggagttgattaggcataaaaatgttatattaaatggtgcagggttgttatga

SEQ ID NO: 168184 - DNA, 543 bp, Enterobacter cloacae
atgagcaaattagaggctgcgggtattggaattggcattttactttgtgccactgtgggtatggctggatatctgggtagaaacgttgcttttatcctccagtggcctctttttgaagcgctcagaactactgcatcaataatatttgccgttgtaggagcatggtttgcaataatttatccagaaagattaaagaaatctttccgtggtggagtgtcagaaagcaatggccaagggattcatcgtcttttcactccgattgttcattcatcggcaatattagcgactgtattgcttgtaggaattgttgtacctttactaaaacaatttgactggattttggctcataaggaactgttcagaggtatatcctatgggctacttgtttttctcactttgtggcaattggtaacggtactttttagcttaattggaccggatatggttaaacgtaatgttgcacgccaagaagaagccgaggaggctgctgctgcagtattaccgcaaggttttgaaaaagataaaagtgataacaacccttga

SEQ ID NO: 168185 - DNA, 927 bp, Enterobacter cloacae
atgggagcaatatggttcgataggtatgatttgtctaatcatcttcatgaaataataggccataaatctggtattgcagcttcaattgaacaaatttgcgacctactttctggtacgggatttgatgatgatatagtttcttctgaaaagcatgctttccgtattaggtctgaagaatatgataggctttactatacgctattatataaaatcggagctacagaaagacctcttgatggtgtatttgaagttttcaaaatcactcgggaaatggaacgtaaatatgggcaaaaatttacttctgaaataaatgaaatatattgccgaaatataaatgttgaaacacaaaaagccttaaagtctggtgagaaattgttaaatcccacgggtatgattaaagaggctgctcaaaaatttgggcgaaaaggtttggaggcaataatgcttctgattgaaacctacgatagtgcattaaaacacagcccgaatactgctatgaaattccatcaatataaaaatattattagtctttcagatttatttgagcagtataagccaattgcatcaggaggtgcatttttagatcaaaggtttatcgattttctatctaataatgttgataagttaggggatattcattggagaaaatttgaggagttaacggccgagtgttttcagaggtttggctataatattgaattgggccccggaagtaatgatgatggagtagatattagagcttggtgtaatgaaatccttcacgaaggatgtgaattaggttttcttgtgacatcttctgaatttagtgtaggtgctcgtaacacagtagaggcacgaagctaccctatagaagaaattaataagtacaaccttaatagctggctaagagagctcagaactcccggtactggtattgttcgtgtctag

SEQ ID NO: 168186 - DNA, 411 bp, Enterobacter cloacae
atggcaggagtaatggcaagcacggcggcagctatagggattcttgataaagcggtaagcatcactcagaagctggcaaataacagtgatgaactggacaaggctacgctcaaacttgagttagctaatctaatggtcgaacttgctaacgccaagattgaagcgataacaacacaaacgctgcttttcgacgctgaacagaaaaataagcagcttgaagatcagctgaaagacaaatcgacatttatcttcaaggataatgtttattggaaagccggagatgaagttccattttgccctcattgttatgaaacaaacaacaccaagagacatttgcagcgagttgcggcgatgaaggggcgatattcttggatttgcagtgtttgcaaaataaccgttcgctgtgtttga

SEQ ID NO: 168187 - DNA, 270 bp, Enterobacter cloacae
atgattttcattagctttatattttggaaacttgatcatagagtctcgatgttaataaaaaattctgaaactgcactgcaattatttgaaagcaatttccaaaacccacacttcagaattttaacaaaagataaaaatgataaaaatttgaattcgtccgcattctcaaactggtcatatggtaagtgttttaggatagcatttatattcgtaggaaatatagggctggtgtttattttcataccgatcattatttctttaacaaaataa

SEQ ID NO: 168188 - DNA, 849 bp, Enterobacter cloacae
gtgaagtacgcctttattcgtgaaaatgctgttaattggcctgttcgcgtccaggcccgactgctcggcatacatcccagtggctattatgcctggctgaagcagcccgacattgctccagcaccgggagagcacaggctatatgtacaggtccgtcagctatggctcgattcggggaaagagtatggctaccggcgaatctacgaggacctgcgtgattcaggggagaaatgcaccttaggccgtgttcgcgtggtgctgaagagcatcaaaagcaatgtgcaatcaggtggctacaaaaccactcgcccggcaaataaacctcagacactcgatgccgcccacccacctctaccaaatttacgctgggttgtaggaacatcagccctcacaactcaagaaggaataattaatctgacgatactcgtcgatctgttctctggtcgaataatccgctgggccttgtatgacggcgatgccagagaatctcagctgcagatagtaccttcattcttgctgggtaagcaggtgctgcaaaaactggtggttcatttcgacaatggcgcaaattatacccaccaggaatggcgacgggcgttgagacttactgacccgaagagacggatcagaaggagggggccttatcaggaacagcgccatacgggatgcttttttcagtggcttcttgctgaaaagatcaacgatgttgtattcgcaacaaacagagaactccagctcaagctgttcgacttcattgaagaattcaacagtcggcagagaccagatagtttgcttaatccgcttcagtactgtatccctgatattctttatggcggaattacactctga

SEQ ID NO: 168189 - DNA, 732 bp, Enterobacter cloacae
atggaaagccatgttgcaattaatttcgaagaagattttcagagtttttgccggaagtttgaacagagattaaaacagaccaacgaacgagatggcttgaccgcggttcagattcattctgcggttgcggcaggggaaaagtgggcttctgaattcttccagaagtatggagagaacgaaatcgagagccattatgatgccgctcttactcatgagttcgagcaactgtgtctgcaggccgacggtgacagaacgatgacggacagtactgatattgccaccggcctgcatactctcgggcaggctttctgggaaatgggcagagtaagggaagcctgcagattccttgctatcgcttgtggttatctggaactgaataaagatatctcgatcttctataacctttcgttagttactgctgaaaacaaaaaaagagatcaacgtaagatcaaagcgaggaaaggtggggtctctaaagcccataaacttgagcccgttcgtcgaaaagtgatggagcttcttgaaacgaccgataggcctcctaatgggtgggcgacgaaggagctagcgttcaaagcgattgatgagccattgcggcaattcattgagacacatgatatcaagcttgatgtcagcgaacttcgagtacgagtcttacgctggtctcgagagcacgatggtattagaggttccttcgaaaaagtaatcattagagaaaaaaatgaaaaatag

SEQ ID NO: 168190 - DNA, 324 bp, Enterobacter cloacae
  misc_feature (303)..(312): n is a, c, g, or t
atgcgtatattgattgttgaagatgaatcgagaaaatttgaacaactcagtcatgtaataaagtctgtgtttcccttagctaatatcattagcagcgagtctcttctttcagctattttcaatatagctgataatgatatctacgatttggctatattagatatgagcatgccaaactacgacatatctgatgaagaacctacaggaggggattctgagagttttgctgggagagaactaatgtttcaaatgaagcttagagaaaaactttgtcctattattgtagttactcaataccaatcnnnnnnnnnnaaaaaggattga

SEQ ID NO: 168191 - DNA, 606 bp, Enterobacter cloacae
ttgtccggttctggcaaacagccccagtttttcccccgccagcgccgtcatgttgcccatgacgccggtactgatatcccctccggcgttaacggcgacgttttttgtggccgtcatctgcatgtgctccccgctggtcagcgcaaccccttccggggcggagaacagcagggtttcgttaaggggcttcagccgctgctcaaacatccgtatctggctgtccacgtcagctttcagcgcctgcgcctgctccgccgcgatttccagctgttgcagttgctgattaagccggtcgatttccttcagcgcggcctccatatccagcgcatcaccctgcgctttcatctgagcatccgcagcaacaaacagtcctttccctgcccgcagggttccccactcatcggtgcgcagctccgttccctgaccgcgacgttgcccctggctgtccaccagatgcccgctgttgagctgggttttgccgtactccgtcgcgagcctgatgtgctcctcaccgcgcttatcttccatccgcagcttgttgttcgcgggtgtgcgcagcacgttgcgcgtgtggttgtcgcgggtgacggggtccgggtgctctga

SEQ ID NO: 168192 - DNA, 180 bp, Enterobacter cloacae
gtggccgaatcgttcttcagttcgctgaaaaaagagcggatcagaaaacgcatctataaaacccgggatctggcccgggccgatatcttcgattacattgaagtgttctacaaccgggcccggcgccacagtcacctcggcggcctcagtccggaggccttcgaacaggcctcatcgtga

SEQ ID NO: 168193 - DNA, 174 bp, Enterobacter cloacae; identical to SEQ ID NO: 168152

SEQ ID NO: 168194 - DNA, 495 bp, Enterobacter cloacae
atgaagagcgggacagatgagctgatccaatgcgatgaattccctgggattacctacaacaagcacactgggcagttttttggaaccaaaacgactaatccagttggcaggatgcataacaaaggatattggcggatcacacatgccaataaatgctatctcgcccatcggcttgcctggttcttctgttatggggtttggccaaaagagattgaccatatcgacaataacaagctcaacaattccatcggcaacctacgtgaagtcacccaccaacttaatcaactaaatatgccactgcgcagtaataacacgagcggcgtgaaaggggttaattgggataagcagcgtaagcggtggcgcgccagggtgattattaacggcaagtatttcactgccggacacttcaaggaaattgcagatgctgaggtggcaatcagggctcttcgcgagcaagtccacggagaatttaccaatcacggagttaagcaatga

SEQ ID NO: 168195 - DNA, 135 bp, Enterobacter cloacae
atgccgaacagcagcattatggcgttagcgctcgcgctgtgcaacgtagaacgaggtcaagcggttaaagtgccagctatgacaggaaaccagctacatttgcttatgatgtggctacgggccttacaggaatga

SEQ ID NO: 168196 - DNA, 1275 bp, Enterobacter cloacae
atgaacgcaaaatcatcacctgaacgcggcagggtaaatcgcgaaatagcccagaaaagcgggttcactgaaatcaaactgatcgcgcgctcagatcaggatatccaggagattgagaatatgcggtacgaacagcttcaacgattcatccaacaacagccagaaaatgcacaacttgcccccccggtacgcagggccgtacaggaagctctggcgttaaaaggctcctcccagtatgtcaccacacatggtgccatgagccgcatcatcaccaccatgatggaccatggcatgacggcgcaggtggtaccggcagtccggatctacagcgcctgcttcccgaccagcctcagctatgtgcttaaatcctttccgggcaaggtgcataactacctgtgccggcatgcaaacgcctcttcagtggtggcctggaccgagcgtcacccgaactggggcgatcgcatcattaccagcgtccttgacggtaccttcgatggcgttctgtaccagatgcgcactgccgtcggggccatgacgctgaatcagccagtcctgaccatgctacgccgtctgaaagacgatgcccgcgggattaatgccggtgcgcaggaacaggcacagcagatcctcgacaaagctccggagacgcttatccagtcaccccgccagtgggatgccgactgcaacgccctgcgcgcgtttattctgtatttcctgctcgctgatcttgaaaaacgctatggcgatatggcgtgtggtgaacgcacctttcaaatcccgttctacgagtggcaacgtgaactcgctgaaatgccggcgaccggtatagtgtcgtttaaggatgactccgaactggccaaagagtatgactacgggctgtgcattggctggcgatacgatcagtgggagcagtttttctaccaggttgcactcggggcagtttatctgctgaatccccgcatcgcccccgtgggtacgctgaaaatctcggctcttgagccgggtatggccatccgttacgcagaggaaatgctggggaaatacctgccgtataccggacgtgctttagtggacagcccggtcggaacgggcaatatgtttgatcgtgcctaccgtgctgcacgcaaacttccggataaccttctgcgccagatccgcgaagagtttggcagcttcggttccatcactgatccggtgcggtttgcagacatgacatctgacttcctcactccggatgaggcccgcctgctcagcagtgattttcgctacagttaa

SEQ ID NO: 168197 - DNA, 186 bp, Enterobacter cloacae
atgaaccacaaacgtcaggcagcacagactcgctggctggacacccggcagccggcgcagcacaccggcaatgaagggctgctcttctcggatgaatgctgggctggcggtttgcgtctggccgccagtccgtccgttcactatgaacttgtcatggccgccattcgccggacgctgattaactga

SEQ ID NO: 168198 - DNA, 351 bp, Enterobacter cloacae
atggaatcagacattatggacgtggtggcacaagcccaccctatttatagcattggcagcatcatttacgacatcgtttacgggcgtactagcggattactgaagaaagcctacacctatggtcaggctgataactaccagcaaatgatgttctgcgccgtactcgccgcaatcaacatcgcgtttgcggtagcgatgttgattgcaataggaccgttggtcaaagcaataatactggcgaagttagcagcttcaccttttattgcgatggtcggaaccagtgtcgtaacaaacgctgttagcttgggtttcggctggatagttgacgctatcagccaaaagtttctctga

SEQ ID NO: 168199 - DNA, 1503 bp, Enterobacter cloacae
atgaacgcagatgagtcaggtgagagctgggtttgcactggttgtatcggagaagcatttttacgcagctgtattgagaaggaaggaacccgacagacctgtcattactgcgctgaggcccacccctgcttctccctagaggccgtaagcgacctgaccgaaaaagcgatagaagcacatttttaccggacgccccctgagccgaacgagatggattatgcccggcttcgccatactgattatgactggtatcgcgacggggaggagatcgtgcagcttattgaagatttgctccagactcgccgtaaaattgcagacgatattcagcaacttctcgaatacagacattctgattttgattctgatgtgatgggacaggagaccgagtttgcgcgggagtcctgttatgctgaacgtaagcaggtaagcaccggccgtctcgattccatgtggacaaattttgtgacctccctgaaaacagagtcccgcttcatcaacaacgccgtgaacttcaccctggacgggatattccagggggtggagacaatgcgcgccagcgggaaggagccggtgatcatggtggccggtcccggtacagcaattccgtccctataccgtgcccgctggagtcgtaatcctgctgaactggaccgaatgttggttacgccggacaaagagttaggtccgccacctcctcagttcagtggttccaaccgtatgaacgccagaggcatttcggttttctatggcgccagctcagtggatacggccatttcagaaatacgccctccggttggctgtaatgtggtctgtgcgaagttcagccttattcgcccgctccggctgctgaacctgccagcgcttgaaagtgttctggagagcggaagcctgctcgacccggagtatataaaaaggcgtgaacaggctgcgttcctctccacgcttacccgccggattgtcgacccggttctgcctggcgaagaagacttcagctatatcccgacccaggttatagcagagtacctggcggaccctgcacggttcgatcttgacggtatcctctatccctccgtgcagctaccgggggccggacaggaggcgcggtacaacgttgtgctgttccataaggcctcgcgggtccgctatatgacactgccggcagagaaagactgtatgatcagatatgtccagcagtatgacgaagacgaatgggagccggatatatgtgtcacggaggtgatatcttctcaggatacccgcgtcccggaagctgacggggatgaaattaaggacctttctctcccggacgatcgccggatgccatcccttgagatagatctcgattcggtcagcgttcacgttatccgggccgcccgctttgaatattccacagacagcgtcaggcggagcacataccactatactccacggatatcagaacctgccggttccggggctccttcctgggactttgactcgggtcaggacgattttccgttctag

SEQ ID NO: 168200 - DNA, 291 bp, Enterobacter cloacae
atgaatgcggataacgaaaggtatttcagcgatcttatcgaggccaaaaaatttaatggatatacgctggtcagtggagaacactggcagaagcccacagtcgaagaaatccagctggtccggggacttattctcctgaccgacagccagctggccaatcgactggacgtggacgaacgcaccatccgcaagtggaaatccggcgagaccagtatggtgttcaccacctggtgctgtctgtgctggctggccggactgggtatgccgctcgataacattatcagttgctga

SEQ ID NO: 168201 - DNA, 252 bp, Enterobacter cloacae
atgacgggtttcacatctggcgagtggataacgaccaaggcgcgggtaaatatgcttgcggagttgtgcccttaccagctcctcatcgctacgctttctcctggcgtaattcaccaaccagtattcgagagcatcctctactgtcactggcttaagcgtttcttctgtgctcagttcaagctctgtttttggatcaagaccaccagccagccattgacggcacttttcccgcttttctctcgcagcttttag

SEQ ID NO: 168202 - DNA, 1203 bp, Enterobacter cloacae
atgtcaaacagagatactcaaccttttcagttcgcctgccctcaatgtgaacaacgtataacgtttaccattggctgtgaaaaaggtgatttggagggtgctacagacattttagattttgaatggccatttaaaggagcaaacccttttgtggatcttcatctcgatttccctgtgtatttcggaaaatatgttaaaggaatgacaacttttttcagggttatgggtgaaattgggcaagatgctttcagccatttatcttatcgattagaagtattaaacaggctgcatcctttaaagagagagctggaaagtgttataacacagtataaaaaaggcgatataaaaaatttcgctaaggtctgcaaaaaaatacctggtgttaaccttaaaactcagaaaaggcaggatgtttttgcagcactttacacggcaacatcaattatgtcttcaccttttacgatccatgagcagaacgaagaattagcaaatggtttcccccagctatatattttcttgcatgagatgcaccatgataaaaccatttgctttattaatgaaataatcaaaagtcgttttctaactaatttacatcatgattgtcttactctctacccgaaaatagttcagatggacttgccattacgccctgcctttttctatgattatgtcgatgaaggaaaatacatggctgtacccgctcgtgtatcaactgaccactttgactcttgtaacaattattacaaagatctagcagaggttttttcccgacagctaacacttcttgcaggtttaaataatatttttaagcgcggagatcataacgaatttgagccctcattaaagataacaagaaaaaacgaggttcggaaggagctctcgtctcttaacaagtttgctgatatcgatttaggaagtaagattcaattcattgatgactgcttttattctattgatatgaaagccatcgataatcgcctaagaaatggtattgctcactacaaatatgaatataacgaatcaactcaagtaatcacctattatcccactaaggaaggcatggatcgagaaaagggggaaaatatttcatttatggagtttctgcgcaagaccctattactttttcgtgagatccataatctcaatcatcttattaaagctactctttactatagtgttttaatcctcaaaaaagatgtataa

SEQ ID NO: 168203 - DNA, 261 bp, Enterobacter cloacae
ttgatttttgaacttccggatttaacttccttggagaagataaactataaaggctatgttggttttagaatcaaaacaatcggacggccttactctggtttcatttttagagaggaaaataatgagatttatttatccggtctcttggcaggcgataaaattattgaggctactaccgaaaatgacatgcgagaggtagctcgtatttttttgagctatacaggttatgttattgacaataataactcaaaaaatttatga

SEQ ID NO: 168204 - DNA, 468 bp, Enterobacter cloacae
  misc_feature (453)..(462): n is a, c, g, or t
atggtaaatatcataaataaaaaatatttattccttctatcaatgatggcttgcagtacaagttatgcagcttcttttgattgtaataaagcaacttcagatgcggaaaaaatgatttgctccgatcataagttaagtcgcttggatgactatctatctcaaaactataaaatagctatgagtccagatatgcctgaaggatccaagtctaagattagagaatcgcaaatagattggcttaacaagagaaatacttgtactgatgttcaatgcattgagaaaatgtattctaagcagatggattatctttggaatgaatgcttcgatcatattcatggaaaaattgaatacgtcaaatactctgaagcaatagataaaattaaaagagatcttaattctcaagagtataataaaactcataagaaacctgaggaagttatcagagaattatcnnnnnnnnnncactaa

SEQ ID NO: 168205 - DNA, 585 bp, Enterobacter cloacae
atgaaagcacaaaaaatacttattattgaatcacgcagcgatctggatatttatgatgaaagatgcgagggaaatacgctaaggaaggttttggagttacaaggagtagctgcaaaatgtactgaagtagttaataagggaatgctagtaaaagcattgaagatagcgcaacgagagcacataaaatatgtacatatcagtgctcacggctcatgtgatggttttattttaacagatgagggttttattacatggagagattttgatcgtatagcatggcctatattaagaggtaaatgtatttgcttttctagctgttcagtcggcaggggcgcggaacaattatttgattttcataagtctttttgtaacgcaatcgttggacccacaagagatattacttggggggaggggcttgtcgcatattctgcattttatcaccgagcacaatcgtatgagaaatcatccttacaggatgttcgggtaatgaatcatattgttggtgcaggtacgttcaggttcatagaatcaccatatatatcatccacctatacaattgatggttctctaaaatatgtttattag

SEQ ID NO: 168206 - DNA, 378 bp, Enterobacter cloacae
atggctcagttatcttcagatagtgcagacaagctggtaggtcagcgtatccagatgcgccgcaaggaactgcaaatgactgcccagcacctggcagagcttgttgatatctctcatcagcaactttcccgctatgaacgcggaactaacaagattaatgtggcacatcttgtgaacatagcgactaagctaaatacgccaattagttggttttttattgattgtttctcaacgctagatagcgagtcgaagaatgaacaacattttgtgcccgtaaaagatgctgatctgaaaggtcgtttagaacaaatatggccgagattaacccatgagcaaagacgtgtactgattatgctcttagatgaatatacgaaatga

SEQ ID NO: 168207 - DNA, 624 bp, Enterobacter cloacae
atggcgttaaaacatagagaattgaacgagcttgatgggtttgagcttttgatagctaaggcggttgaggaagcagcagaggttgacgaatcagaagtgtttgacgaatcagaagagattgatgattctgaaggtcttgatgaagacctaaaagcgcgacgtaaggccaatattcagtatcagaatgcacgcaaagaaaaattgaaaaaattaggtgagcaccagattcaaattaggctcgatgatgaaaattttcaaagattgtgtgacttgtgcgaagtgctggggtacaggaaaccgaagaaaggaatgtacaatcttgtagaaacatattcagcaatttttaaatatctcttaagaacaagtgaggaaaattttgaatacattccgagcacccaacgatcaatcaagatattgagtatatataagtatgttgatcatctcagaaatgaacaacaattgactaaagatatcatcatttcagaacttcggaaaaagaatgctaaaattccagttagaaaatctggtaatggaacgataatatttgggaaaggggaattccttgaacggtattttgacaaagttgaagttattagagcgcttaaaatagctgataaaaagtaa

SEQ ID NO: 168208 - DNA, 1044 bp, Enterobacter cloacae
atgaaacttaacagacgaaacatagatttttgttgttcgcttgatattggcatgaatagcagagatcaaaagttaaaaatgcgagttgataaactctgtgttgtaagtcaatttgatgagagtatcgaaaggaagattacatatgctaaactgaaaaagatgggctacaaggaattcaaacaatatcgcgttcaatatatccgaaacaaagaaggaaaaccttaccgaaaagcattattgattagggggaaggaggaaaactcaccagttctgttacgtatcgattactcgccaataaatcgtaataccggagaaatacgtttagattttcgcccccagcatatgaagtccaaaaaaatagaccatttgttatcgtggataaatcgtcgattaggaggaatattttaccagctgctggcgcaggcatgggttacgcaaattgatatcgcccttgacgtctacaaatgcaagttagatgattatatatggggcttacaacgttcaggaaaaacagcatactttgagaaggaaaatggtttaccgggactaaggataggaagttgccgctcgcttttacacatcctgtgctacggaaaagtagatgctaacagcggtagaaaactggtgtttcgggaaagagccaaattcattaacattaattttgatgagtatcagaaattcttgcgtattgaggctcggtacaggccaaacactaaacccacaagcaagaaaggtaacgttttgatgctggcccacctttcagagatgataaatcccttcgagcgactccgggtctactcgaaagatttgggggatgacctattggaaagagggtttctttgtacgttgccagacgctcccagcatcgctgaaatgaagcgctacatgctggcaactatgcaatgcccacgcttgcctcgcaaagtcgatagactcattgcagagtacgagacagagttgttcgataaacactcggtctggacgcaatggtcacgctgcgtcgctcaattaagcggcattttcagtatagcgtctgttttctga

SEQ ID NO: 168209 - DNA, 3246 bp, Enterobacter cloacae
atgacgcttctgcaggaacatttaacgcaggttgatcagcattgggctgtgcaatccattagtgaagatctccgtgctcaggcaatggaaatggctgagctacgtttagtcgatgttgctttagacaagctgctagacaatcttcaggtcaactttgatacggatttgctagagcgggtagcaacagcttacgaactggctgctatcgaaggtattggtgcattgttgtatccagttgcaaatcaagaaaataagaatctccgtgatgttgcccaagcaggagcttacagggcttttggtttctatcgcatattgccaataccaggtgataatgaagcgagattattccatgtattgcatatcgcgggattggcttactgtggtgaccgctggacagatttacgacgctggtttgaagaacaacatgctgcattagtcgttcctagtgtagccggtgtgtcatgggataagcgccttctatatcgtatttttgattgctggcttcgtttgttacgtaagaatcgttgggacgatcttgatcaaatttctgagattgtggttgggcttcgtagtgaccaagccgactatgagaaagtcttactagaacaagctcaaggggttgaagcccagtccatcgtaatgcgtttggttgcgctctatcactgggcgaaagcgacggaaatattggctaagtatatgctgcagggagagcctgtagctataaatgcccaattggatcaacactttgaggcggcacaaaaagcagctcaagcatcaaaggatctgcaacttgagatgattttgcgttggttgcatgccactagtaagaaaatggcggcaggatctttatggtgggtggctcatacagtcaattcccgtgtgacgcgctttgtttctcatgtaactaagcacaaaagctttttcgagttgttgccgccacaaagggctgcgcttcaagaacaaggtttattagatcaggcaagcagagcagtgattgttgatctgccaacatcgggtggaaagacggcgcttgctcagtttcgaatgttacaagcactcaatcagtttgatcaggatgacggttgggtagcctatgttgcgccaactcgtgcgcttgtctctcaaatcactcggcgtcttcgtgaggacttcggtcctcttggaatacaggttgaacctctaaccggtgccgttgaagttgatgcttttgaagaagagttgttaggtgaggcccgtgcattccagatattggtggcaacacctgaaaaacttcagttggtcatgagaaacaaaaaagttgttcgcccgctagcactggttgtgatggatgaagcgcacaatatcgaagacgaatcacgtggtttgagaatagaactgttgttggccactattaagcaagaatcagctcgggccaatttcttattgttaatgccttttgtacctaacgctgatgaccttgctcagtggttggccgctgatcgcgggcgaagcattagtttggggacttcagcatggcagccgaacgagagaattgtggggcttttcgacattcataaaggtcaaaagcgaggggattggcatttaagctttgaagcactcactacgactcaacgtacaattcatctaaaaggaacgcatcgtgttgatggcaatcgaccgttgcaaaagctgacgtactcaagtgctaaaggattggcagcacaagctgtagcaatggccaaagtcttctctaagcgtggtacgagtatcgctgtcgcccagacaattccagatgcatggggtatcgcacgaaaggtagcagcagaactcgatccttatgtgcaaataccagatgatattcagttagtacagcgttttctggcgacagagatcagtgagggttttgagttgattgagatgctctctaagggcgtcgtagttcatcacgcaggtctgcctacagaagcacttactttaattgaatggcttaccgaagcaggacatattcgcgtcatgtgcgctacaacaactattgcgcagggacttaatttccctgtttcttcggtatttttagcaacccgaaaatatccttatggcaatgagatgtcacatcgtgcattttggaatttagcagggcgagctggacgcattggccatgacagcgttggtgttattggtattgctgcgggtgacaaacctaacgagatccgtcaatacgtaagtgatgctacagagtctcttgtatctcggctcgaagggatgcttgatgagctccaagcgactggtaatttgataaatttatcaatagttattcaggaagaacaatgggcagattttaggagttatattgcccacctttggaacgagaagcgcaatcttgacgcagtaattggggaagctgagcaactgctgcgtaatacttacggatttggctcacttcgtgcaaaagcagatctggcgtcacaggaaaaagcagatgcactgttagaagcaactaaaggatatgtgcgtaaactcgcggagcatccggaaaacgcttcccttgctgatgtaacaggcttttctcccgagggggttcgttcgacattgctggatttgaataatcttgagaacaaactgactcacgtagattgggaaccgaccagcttgtttggtgacaaggcgcaatcggtcttgcctagcttgatgggcatcatgatgcgtgtgccgcagttgcaggacggattgagggatataagtaaaggggaaggcaatagtcataggaaactggcagatatcactcatgcatgggtaagcgggagctccattgaatccatcgctaaagcctattttaaaggcgaaactcttacggatcagatctctaaagcttgtagggctgtttatagagatcttgccaataatggcgcatggggcctttcggctttaagcaaaatgcccacgtcaggactcgattttgagaatatgacggatgaagaaaaacgtagattaaataatctaccagcgatgttatatcatggtgtaaaaacggaagaagcagtcttgatgcgcatgaatagcgtacctagaagtattgccgaacgtgcaggcgaagatttcaaggcaagaaacgtggaaggtggcgtagatttgaaactctcgccccgtaaagcaaatgagtacctacaatctctcaaatcagaagattgggctcgcttgagacctaagaattcagttttatctggcgaggattatctgaaagtctggaaacgactttctggtgaatcgtag

SEQ ID NO: 168210 - DNA, 798 bp, Enterobacter cloacae
atgccgatgcctgcaccgcagcttgtctatgatacttgtacatcacctattgttgctcatggtttatcttatgacgacgggcaaatgcgcgaaattttggctgggccagtaaaagctattttgcaagatactgcgggcaatgatgagctattagaattattggggagtgttgtaagcactgagtttgagcaagaagggcttcgtgagcttcttactgataagacagttcccaataactggcgtgtgggcgaggctatagcagaagcctttgtgactgataaaggaagttgtgtttttccttggcctactgggcgcgatcttaagaatcctaatgctagcccagctggttgtgatttaacaggctttcagcccgtgaatgatgtggatctcccctaccgcttcgcttttggagaagttaagacatccgaacataaccagtcaccaccgagtgtgatgaccagtttgggaacccagctccatgggttgcgtgataatcgcaaagtgaaagatgcgctatgccgatatttggggcatcatgctgcacgcgcagattgggaaccaatgtttaaaagtgcagctaagcgctatctaagctctaatactacagatgtcgcggtatatggcattttgattcgtgatattcagccaaatcctttggatatttctgctcgggtaaatgcactggctataaattgtccggtgttaactaatattgaaatgtacgctttgtatctcccccttaacgcaatcagcaccctctctgagcttgcccaaatcttgatgcaggaggcgtcatga

SEQ ID NO: 168211 - DNA, 915 bp, Enterobacter cloacae
atgcttattcagaaaaagcgtattcgaaatattgataattacatacctaactttgatggccgtgatatctacattgcacattctttgccagatgcggggaaaacggactctattggtttctcaagtcaaagagctttaggtgaagaagtcctccccaaaattttagggccaataaccagattcaatgctaatggcaaatcagtacctgacaaaacagcacctaaagaaactgcatacagacaaatttcatggactagaaagcaatggatcggagggggcgcaactcaagaagttactgacactcgtgaaattgagtataagcgctacaagagaatcctcacccctccaccaagcatagagttaaagattgtagagaatctgcaaggggagaagttgatcatctctccaaagctaagtttgacagctaacaacaaagagttagtggctcactgcattaatctttttttagagctttttgggttgtgcgaaactgttgacgaccaacttaataccatcgttaaaagtaaatctataaaactaaactggagcctcctgcctcagggtcaacagccttggagtactatcggttcaaaaatcctttcagctattaagatcaggggaaagggcaatactgctgttgttgaaggcagacttgaacttatcaatagtaaaaaaccagatttcgtagcggttgggcaagctgggttccaaggctacgtgatatttgggttcacaggccaaaacatttacgtgctagaaagctcacaatgtaataacgcaacttatatacttaacaataattggcagcagttatcccagctaactaaagccgaaatactagacggaaacttgcaccatgcccgtgtcatccaccgtgtaaactgggcagcagaaatacttaaatacttaccataa

SEQ ID NO: 168212 - DNA, 2544 bp, Enterobacter cloacae
atgacaacggcatttaatacaatgcagcctgcgcccctggcaatttttattgccttcgcgcttgctggtgtctctcccgcactgtatgccactgagacctttaatacagaactggtagagctggataaccccggaatgggaaaagcggatttatctgcctttgaatccggctcgcaggcacccgggacataccacgttgatattattcttgacgatcggctactggaaacacgtgatattcgtttcatggcagtgaaagatgctaacggcggggaaacgttgcggccgtgcctgagtatcgggcagttaaacgcgtggggcgtgaaaacggcgcttttcccacagctcgccgctgagcaaggtgaatgcgcagatctcaaggcgattccacaggccagcgcagacttccagtttggcgcccagcgtctggcgatcagcattccacaggcggccattgacctgcctgccagaggttacgttccaccggacatgtgggatgaaggcatcactgcggccatgctcaactacagccttagcggcgcgaacagccgggcgagaagcggggctggctcccgcagcgacagccagtatgcaaacctgcggccggggatcaacgtcggcccctggcggctacgcaactacaccacctggtcccgcgatgcgtccggccaggataagtgggataacgtctacacctggatgcagcgcgccattattcccctgcaagcccagctcaccctcggggacagttccgcgcctgccgatgtctttgacagcatgccgtttcgcggcgtccagctggcctccgacgacgatatgctgccggattccctgaaagggtatgcgccggtggtccgcggtattgcgcgtactaatgcgcaggtcgtggtacgtcagaatagctatcaaatctaccaaagctatgtggcgccgggcgcgtttgagatcgcggatatgtaccccaccggcggtgcgggcgatctggatgtgacgatcgtcgaagccgatggcagcgaacaacattttaccctgccgtacgcttcgttgccggtcctgcaacgggaggggcgtctgaaatacgcccttaccgccgggcagtatcgcgcctataaccgcagcgtggagaaaactcccttcgggcaattgaccggaatttacggcttccgccacggcatcacgctctatggcggcgtccagggggcagataaataccagtcggcggccctggggatgggcaaaaacatgggcgatctcggggcgatatccgctgacgtcactcagggctggtcaacgccggagcatgccgcgaaaacaagcggtcagtcgtggcgggccagatacagcaaaaattttatcaataccgggacaaacttttcgattgccgggtatcgctactcgacccgcggctattacgggatgcaggacgtactcgattcgtacggcgacagcagcgcgcttcaggacaggcggcgtaaccgtgccgagctgacgatgagccagacgctggggggcaacctgggcgcgctcaccctcagtgcggcgcgggaagattactggaatgacggtaagtcgatggcttcgtggagcgtcggctatagcaactactggcacaacatcagctatggcctgacatggacctacagcaaaaatgtccgctcggggtcagagatgcgcgacagccaaaaaaacgcagaccacgaccaactgctggcgctcaacgtcagcattccgctggataaatttttgccgcagacatgggctaactatggcatgaacgccagcagaaataacgggacgacgcataacgtcggcctcaacggggtggcgcttgagaaccgtgccctgaactggaacgtgcagcagggttacggcacagagggtgtgggctataccggcaacgttaacgcggactacagaggcacctatggcgaattcacggcgggatatggctatgacaaaaacagtgaacgcctgaattatggcctgcaaggcggcattctcgcccatgctgatggcatcacgctctctcagccgctgggggagaccaacgtcttaatcaaagcgccgggcgcccacggcgtggatatccgcaatcagcccggtgttcggacagattttcgcggttatacggtcgtgagcaacctttctgtctaccgcaaaaacgatctcaccctcgacccggaaaatatgccggacgatgtcgagctggagatcaacacccgcacggtaacgccgacgcggggggcggtggtgagagccgattatcttccgaagtcaggacgccgggtgctgatgaccttaactgacaacgaccgcgccgttccgtttggggcggtggtcacccttgtgggtgatgacagcggcagttttattgtcggcgatcgcggtcaggtctatttaaccggtatgcgcgagcagggaacgttagtcgcgacatgggggagtcaatccagccagcaatgccgcgctgatttcacgctgccgaaacactcaacgttcggtgggatcgctgatatgcgcgctacctgccgtcaggaacgctaa

SEQ ID NO: 168213 - DNA, 165 bp, Enterobacter cloacae
atgacagtcatccacaacggcaagcaatacaccgtcaaacgatgcgccctgaacaataacgaatggcggctaacgtctgtttccaatcctcgcgagcaggtcacgccgaaccgctggcagatgcacgttgctggcctcctggaacaggttgaggtgaaggtatga

SEQ ID NO: 168214 - DNA, 264 bp, Enterobacter cloacae
atgtatactggaagacgatattttatccttgtgctcctttttattgcatcaatgataaattatatagatcgggcagcattatctattctcgccccctatatcacgacggatttgaatgtcaataaagctgagctgggtcttatttttagtagcttcgcgatcggttatgcggtgttctgttttgttggcggctggctgataaatatggaccacgacgcatatttgctggcgcgatggggttatggtcgctgtttgccggtttga

SEQ ID NO: 168215 - DNA, 168 bp, Enterobacter cloacae
atgaacaacgtaaattccctgtttaaaaacagaaaactcattattttatgcttcttttgcttatcttcatggtgggtattatcaccagtcttcagtatcgccatcggcttcttatcgactgtgattcagattttgtttttcgcgctccgcaaaatcagtatgagatga

SEQ ID NO: 168216 - DNA, 249 bp, Enterobacter cloacae
atgaaacttcccaaatatgggcaggaaagttctttaattacgccagataaacgccatctcaaatataaacaaagctgctacattaaaaataaaagccatttatttcagcaagttgcaaatagcaatccattcttaaataatcacttaacgcttccgattccagatttatctcaaaaccacacacgtgcttttcaacatatttatccgccagtatatcaggtgtacattacctccaacccaacccattga

SEQ ID NO: 168217 - DNA, 318 bp, Enterobacter cloacae
atgggatttccttcaccggcggctgatttcgtagcaccgcgtttatctccggaaattatctgcgggatcggcatggacagccgcatcctcgaaacctcgtctggctttgcggttatcgagccgtgcaccagactggtacagaatcaggttctgctaatcctcagcggcggacggactcagtttgccagagtcatgggcagggcgctgatttgtgatgatggtgaagcgatagagggggaggctgcggaagaggttgaggtgatggggcgggtgacgttcttcatcaacagtacagacgagggtgacaggacggtgtaa

SEQ ID NO: 168218 - DNA, 939 bp, Enterobacter cloacae
atggaagaatttaaatcaaattcagtttcaggccgcgattataatcccgtctacgcatctgcctcttcaggcgatgttgacgcccaaattaaactcggaaaaatgtaccgtgacggcgacggagttgaaaaggacggtaaaaaggccgttgagtggttaactaaggccgctgaacaaggtagccttaatgcccattaccttttaggcgacatatatgcttcgggaaacggagtccctctgagctattcaaaagccctggagtggttcaaatttccgttagatcagggcgactcggatactcaggtttacgtgggatggctgcacgaaaatgggtatggggttcctaaggataattcaaaagctattgaatattatgcactcgccgtagaacaaggtcatagtactggccaacataacctcggatacttttacgaacagggtattggagtgcctaaagatgaaaataaggcattcgaatattataccttatcagcgcaacaaggagatagtaacggccagagaaaactgggcgaattgcatattttccgcaaggattatgataaaggcaaagaatatcttcgtctagccgctgagcagggtaaccaaaaggcccttgaaacgctaaagaaaattgaagcagttcaagaaaaacacagaatcgaagacagtgtcaggaaaatcacttgtcctttctgcgggaaaaaaagtgtttggaaggcgaagtattgccacggctgcacagcccggattacgtacgaacctataagagaatatgaatggataggtataggtctcggtattattttcgctgtagttggtattgcaatcgatccgaatcatatcggcatggtactattttacgccttcattatatggtggctatccatcatgctcggtaaattttttggtaaacaaagagccatgttcagcaaagactaa

SEQ ID NO: 168219 - DNA, 726 bp, Enterobacter cloacae
atgtcagaatcttcaatcgtcccttacgtaaaaaccactcccaaaccttttggtgtgaacgtcgaatggaaatggccgggtggatgcgcggtgctagaaatgcaatgccttcatgaagatggccgacttgtgaaagaacgcatcttctggccagctaccgtataccttatttccgggctcaaaactggtgagcgagttcaggtgcgtctgcgtccaattgcagaggatggctcagcacgagattggcgagccagtgactggatcgaaggcgtttcttctgtcgatgccgaagaaatggttcaagcgctgcaagacgatattcgcagcaacgcaatgttcgacgccctgagttgtgatggtggtatttccccagaagaaatgcgggatgccgtggagcacatcaagcgcaccaggatggcgaaagctttaggcaagtcgctggctgaactgtctccattcaccatgaagaacggacaagtgtttatcaatgatgcgtttatcgggaatggcattacgtcagagagcggccgtatatatgcttctggtatgggtgtttctgtagacaatggaaaagagcaggttgagtttgaagctgaaaagtttgaaattgctgccagttccaaaggcccgctagatagcgccttacaagaggccatcaaaaagatagtgaacgaagccctgcagaaagctactcagccaggtggcctgctgcattctcggaagtag

SEQ ID NO: 168220 - DNA, 210 bp, Enterobacter cloacae
atgcaagatatgaagattgaataccggggcggtaagcttgttgaactgagcattgatggcgtgagtttcagctctgttaccgccatcaacttcaaccacgaggtgggcgagacgctacctacggtcagcctgaccttcccgctcggtgtcggagaaagactggtgcccgccaccctctcccgcgaaaacctgcgaatcatcgagaaatga

SEQ ID NO: 168221 - DNA, 234 bp, Enterobacter cloacae
atgaaaattaaagctctccgtatgttctcgcattatcacctgggcactgtatcccagggtgaaacccgcatcgtgaaaaaagagatcggcgaggcgctggtgaaactgcatctggcagaagaggttgagcctgaaaaggcagaaatgccagatcccgaaaaaccgaaagccgggggtaaaggtggaaataagcgcggatcaaatggcgcagataaagacgcatctcagggttga

SEQ ID NO: 168222 - DNA, 252 bp, Enterobacter cloacae
atgatgactacatatagcttaaccgaaattttcatgcaatgggcagtatttgctctttgtgttgtaatcgtaaaacaattcactcgctttgaagcatgtgaagcaatcatgtccgaacataaaacggttttacagggatttgctttccttgcatatcgtgtagttttatacactctgatgcttgttagcttgattgctatgatggttgctattggttactcactcggctatttaggtgtgtatcgtatgtaa

SEQ ID NO: 168223 - DNA, 621 bp, Enterobacter cloacae
atgagtttcgaaacagaaataagcacaaaagaaaaatttcaaaaccttatagatatatgcaaatctaactttcaaatgaccgacgatcaagcaaactgtttttatcttatgatgaacagaaatgctcataaacgaaatatggggaatggaagatctgaaagaataatcaacggattacccaaaacaatattagaattatcaaaaaggcttgaggtttgggagattatatataaaggaaacagtacagcaagcatcagcacagtaggtatggacggataccctgtaaatatagctatggacagaaacaaagctcttatgaaggataatgatttcattaatactttcgatttaatgttgttcgaccaaaaatataatatcaaaaatatacctcaccccccatcaaaacttacaatggcgagaatatttaaattttataaagaatctggcgtccctttaaccactgatagaatgtctataaaaaatttgaacaatagaaaattttaccctatatacgaatcatgcgaacaaataatagcagaacatgaacagcaaaaaatttcacaggttttccagaacggcacacccggcagcggggcaagtaaacctaaaagaagaatgtga

SEQ ID NO: 168224 - DNA, 549 bp, Enterobacter cloacae
atggtattaagaatccgggataagacagaaagagtggaaatatttctaagcatgttagatgatgtttttataaacaacagcgacaagaaaaataatctatctgataaatttacactgaaattcaaaaagaaaattgagaagctatgtaaattgcataacagaatttacgatgcccctaatttatggaagttgaaagttccttcattgtttactggttataaaatgctattcgatagccaggagttaaaagtttcattcgttaataataccttagcaaaaaaaaaggtagtaagagaaaacttcattgttgctgaaaatgtctattttacagtccccttttattggagtaattcaaaactacccgtattaaatgcaacatacaggcttgttatagataaaagtttaacaccagaagcaatagagcaagagtttgataagatgcttaaacttttcgaatactcattaaaatatcatgaaggtaaaattcctgtgtttaaagttgatttatctttcccagagcttgtaagaccaccatacattaaagattaa

SEQ ID NO: 168225 - DNA, 375 bp, Enterobacter cloacae
atgataaagagatacagtgaaagacttgcagaactggaactattacaaaacagactgttgctgtcgttccgaacggacgacgacgattatattttatctgtatgccgtcaaatcagcgatacagggctaaatctcaaatacagtaatacagattatattttccattacataaactgttgctcttaccacagagaacccagttttattgtgatcggtttactgttgtcattacaggctaaaaaaacggtcatggcatacagattatttaagaagctgtatatagataaaaaagatagccacagcttaactgacaacattcaaagaacggctggtagtttactgactgttatgaacggaaaggaaagtgcagcttga

SEQ ID NO: 168226 - DNA, 255 bp, Enterobacter cloacae
ttgctgcgacagcgcagcgcaaatatattcgacctcatgcgcggtgtggacgccgtacaggatcatggcaaattcgtcgccgccaaggcggtaagactgatgacgtttttcgccaaactcgaccatccttttggcggcttcgatcagtacgcagtcacccgcggcatggccccaggtgtcattgataaatttgaagttatcgccatcgaggaagagcagggcagaattggtttttgccgaagcgtcattcattaa

SEQ ID NO: 168227 - DNA, 165 bp, Enterobacter cloacae
atgatgggcgttaagcacttccgccacggcaaattgcccctgcttgccgagggttgccagcgtttcatttgccgccacggcatcgttgaacaccagagaggcttcaagactgtggctcatggtggcgccggtaagttcgaggtttttttgcgcgtattgctttaa

SEQ ID NO: 168228 - DNA, 684 bp, Enterobacter cloacae
  misc_feature (654)..(663): n is a, c, g, or t
atgctggattacgtcacaaatgagcgctacggtcttggtgttaaacttgataaagtagacgtagagagttttaaagaagctgctaaatttgctcgcgacaatgatttccgttcagacggtgcaacagatccgaacgcttcatttaaagaaaacttgacccaaatggctgccgctttcaatggattaatctttgatagctttggtcgtatgacctgtcgtattgatgggcctgatattgttcaatatgatttcaatgaagaaaatattagtgcaagcaatattagttttaacactggtggttcagaccagtactacaatacattaaacgttgcgtatcaagacccagcaattgattattctgaccaagttctgcgttatccatctgatgttactaatgacctgacaatcaaacgtgataaacgtatcatggcgaaagatataacttatcgttttgttaaacgtaagtctcagattgatacgttagcctcaattgaacgtaacaaatctttattgaagaaatctcttactttctcaacaattgatgcgtatacggtacaggtttgggatgtgattcgtgttaatcttggttcagacctgattaatcttcagaactcattatggcgtgtaactcaagtagaccgtacattacaaaannnnnnnnnngttccagcttctgcgtactga

SEQ ID NO: 168229 - DNA, 660 bp, Enterobacter cloacae
atgaattctatctattgggtgattttcatgggactgctgataaacataccatcactggttcctgtgttgtttctccgtaagattcaaaagaacgtgaagatatctattgcgatcagactgtttctcgttaacgctttcttggtgctgtcccttgtgacgttatcgcagaatatcacgcaagaatacgggttgtttccgatatggctgctgtcaactgcaatggtgctgtttgcggtcacgctagtaccaacgataaaatttgtgcgtaagtatttaactgtcgggaaaagcagagctgttatcctctcatcattcctgattgtctatgctgtcaggtttcatggcgtgttttcagatgtgaatggagttggatatgcacttaacggatataacgccacatggacattcttcttcttgtttgccagtctgttggcttatatcggttgctctgggagtaaaacatattctggttattctgcgtcgtcatctgcaccacaatcagattactttaagccgaacaaagaatataaaacacaatctcaaattgactacgatattgcggtgaaggggcggagtgttctgtctgatcccaatctgagtattgttgagcagcagcgttatcgggatgctcttgagaaaaaagaaaaagaacattggtaa

SEQ ID NO: 168230 - DNA, 2283 bp, Enterobacter cloacae
atgagtacaaaaaatataatgaggtatttaggaagtatattcttacttctttcactaacaataacacaaaatgcttatgcagaaggttttgatctctttaaacccagtgatgataattggctaattaaacatatattcctacaattattctatcctgatgtatcgccacttggtcccatttcagaagttttccttgcgggtattcttgcttttgggggaatccttgcagggtataccatgcttgccggcacactacacacggcgaacgatggagagatgttaggtaagaaatggtcttctctctggatacctatcaggacaaccctgggtgtgtctatgattttacctatcaagggcgggttctgtgccattcagttagttctcatctggattgcagtgcagggtatagggcttgcagatcagacctggagtgcttttgcggaaaaccccttgaagggttcagtcgttccacaaccttacattgataaacaagtcaaagaactctataaagctggggttatgggttatgcctgtcttgcagcgatacaaaaagaccaggatgaaaatgaagctgatgcaaaatcagcaggaatcattgataaattattgaaaccttcaagagatgcctggaatccgggtatcactacaaccacttctaaaggagctaataatagtcaaagacttacgattgagttcggtaataaaaacaatgaagtatatagaaatgtttgtggttctatcacatatgatatgtctttatctgcaactcaatcagtatcatcggctccggcagcggcattagatttagttgatttagataagattcaacatgctcttgttcctgtgcatgtaacggcattgagtgcattactggcaagatcaagtcaaataggtaataagcttgttaattccgatgaaataacacctgaaagccttgcttccgatatgaatacagctactgatgcttataaggtcgctattgctcttgcagctaacacagcttaccaggatgcaatcagtaaagatgcggttgaagcaatgaaaaaagacgggtttgtttccgctggggcatggtttatcagaatagcttcggcacaggatgcagtaaatgctcttgcgaataatgttccaatgggtacgggtccgggaagttatttagaagagtcaactggttggtggttcgacacttctgggaaaacaaattacccatctgttgagaaagttatcaaaaaagcaaaagcatattttggtaaagcaaatatgattaataataacagtgccagtggtgcaggtgtaggtgctgatggtgaaattaatcttttagataaattactggcttatatttccccttctgaattaggtgcattgtttgattctcagtctatgacttctaaccctgttattgcaattgtcagtattggttctaaattaatcaactttgtaatagtaacagcctcagcaatagtagcgggtatagtggttgttggtactacttcattagtggcaagtggtggtgtaattgcaggggtaacttttgcaacacctttattggcaagtcttcttggaactcttttgtggaacggggttaaaatggcatatgtccttgtctggaagccattcataatatggtgtggagcggttattggttggttaattcttgtcgttgaatctctttttgctggtcctttatggatggttgctcaccttgcccctgatcaggatggtgttgtgggtaaaatggggcagggatatatgttagttctttcattgttccttcgtcccgtcctaatggttataggattcgttgcggcattatcacttatgacaccatgtcttatgttcataaatgcttttatcgcttttaacggtaatgcaattggtgtaggtgcagcggctttaatcggtaagattgtaatgataagcatctatcttaaagtagttgaagaagtaatgaacaagttattcggattaatacactctataccagatagtatcttacaatggatcggtggtggtttatctcgctctatgggtgattatgcaaacggcattgaagcaggttctacacaaaacactgaaagatttggtcaaggtatgagccaggttaatcaggcagtaaccaatgcgggaactgataaaataaaaagagtaggtgctgaaaggaaagaatcacttaaaggtaatatgactaatgccagtgcaggcgacgaaccgggaagtggtgcaggcaacaaaacaaaagcaagtgaatcaccaggcaacaagccaaaaacaaaaggttaa

SEQ ID NO: 168231 - DNA, 426 bp, Enterobacter cloacae
atgcaaatattcgatttatttaatataacacatcctgttttgactgttccaataacaatcattattggattgatatttcttactgtgcttttcaatctattcaaaaacagttttttagccaaatatcaaaagctcgaagagtcggggttctggaaaaatatatggcatttagcaaagtggattaaaggcaaaatcaattatctggttggtgtttatttttttagtatgacattattgttttccatcatggtttttatattcagagataaaacattcaagttagacttaacggcttatatcttatgtggttttatcagtgttggtttaagtattctcttttacacatacagagatattaatttcgatttaaaaacctataagcaagtaagacaagagcaaaaagaaaagagaaggagaaatgtatga

SEQ ID NO: 168232 - DNA, 537 bp, Enterobacter cloacae
atgattataaaagaaagagatttagtaggcatcaagctaatactgaatcaaagtaaaatatcatccagtattgtgaatttcaaactttgcattatagaatcaggcaaagagataaaacatataaaggagagtaatagttttatttataaaaacataataactaaacagtatcgtaataaaaagacgggtgaatatgttcttagtcaggaagcaaaagaaattttagatgaattactttctgttttcactaacacaaaggaaatttgcaagattactattcagtattttatcagccgaactgacagaacggacagcgagaaagaagaattaaaatccgtggcaatggagatcacagataaggttttcgaaagtgtaaaagcagacgaccagactttaatacttatcattcatcaggaagtcactaaacacttactaaaaatggattggtggaaagataacgaagctaaacgaatcgaagcccttaacagatttgaagaaataaaagaaaagatagggggtgtttatggcgaaatttaa

SEQ ID NO: 168233 - DNA, 603 bp, Enterobacter cloacae
atggcgaaatttaatcttattggtaaaaaccccgaacaagctaaaaaatattttaccttctggacaattataaacggtggtcaagaagaaaagtatcaggaagctatggagttgtctcttgaaccagagttcaacataaacaaggtaaaaacagcaggttattttttcatggaagatctgattttcagttgtagtaaggagttcttctccctgttcatggacacacaccgccaaacggtcaaataccacctatcccgcaaaacttacactatcccggaactggtcatcgcaaggtatatgggtaactacaccaggcgagccagagacaaggaagcgatagaacgcatgaccgctaacattgtctgcttcctcgatgccatgttggccactggcacacataagcgattacagcacctggacagctacgagaagcttatagcgaaggtggaagaggattacatgatagtcatacccgatttgcagtctgtaaggctatatgaggctctcaaagcgaaagttgcaggtaatgagcaagcggagttgcaggaagtcatagcagcgacgacaggaacgacaggaacgacaaagaagagaagactgtaa

SEQ ID NO: 168234 - DNA, 1401 bp, Enterobacter cloacae
atgtaccataaaataataggaggtaaaaaaagcaaaggccagagaaatataaataagagcattgagtatttattgagggagaaaaacccagaacaacagaaagacataaaaatattatcaacaactacaaaacaagatctaattaattttgaaaattatattttagataaaaacaaatcaaatccctatgtgtgtggtgtcttatcttttgaagaaaaaacaataccggaagaattaaaaactaaaataataacagaatttgaagatatattatttgttggtatcgaaccggaaaacagacccccggttctttgggtggaacacaatgacaaaggcagattagagttaaattatttaacttttaatagtcttcaagatagaagatcatatacagtttatttagataaattagatagagcattaattaacaactactcagaaataataaattatgagaataatttatcaagtccattcgaaaaaaaagaaaataaaaatacactcgtaaacaatccaaaaactaatattccagaaaataaaaaagactatttagataaaataaatactgaaatattagctttgataattaatgaagaattagacaacagagaagaagcaataaaatatattgagaatttaccgggagtaaaaattaatagaatacgaaaaaatcaaatatctataaaatgtgatttttttgacgataaaccaattattcttaaaggagatatttatgaagagggaagaaattacagcgattatagaaaacaattcaattcaacaattgaaagagatccaagaattgttagatctgaaatcgatagaaacaaagcagagtttgctgaaagaattgaaaaaagaaaaagcagaaatagatcaaagtttaaaaactcacagagcaaaaataaaccagagaatacaaaaaacattaaaggaaaaaatagcaatattgaatatagatctattaacaataatattgattttactgtcaacaacaacggttttacagatattaacgataatatatttgatatggagaaaataaaaaatgagtcaattaattcaaaatataaaacaaaaacagaagaagaagaaagaggaagaattgcaagagcaagagatattgaacaaattaataaacagcaacaactcattaaacgaagaattgaggaggttagacgaacggacagccagctctcaaagtctattgaaacaacaaatgaaagagttagaagagatcgaagatcgatacaatcaattatatataatgctcgaagacacattagaacgctttcagcttattttagaaaaaacgaacacaaaagatattttgaagaaaaaaaacgactcgaagaagaaaaacaatttaaccaaaaaagaagaaaaaaatttatatattga

SEQ ID NO: 168235 - DNA, 354 bp, Enterobacter cloacae
atgagtaaaaactataaagatagataccaaagaaagcacagtctcacactgtgcttcaatgacgaagagtttcaacaagtcgaagaactggctgaggcattgagaaaaccgcgtgcaacagccgttagagagttaattctcaataaagagtttaaactcaaaaaagaaatatccaaaaaagaaaacggagatatttattacgaactacacaaaataggggttaatatcaatcaaatagcaagagcaataaatactgatattgataaatttattaaccaagatttcgctgaagattttataaatttgtttgaagaaataacaaatgatatagaaaaaataaaaggaaaaatataa

SEQ ID NO: 168236 - DNA, 423 bp, Enterobacter cloacae
atggataaagcacagaaagaagtagatttattagctaaaaaattagaattgtattatatgaaattactgaaaaaatataattatcgtatttttggtttttcatgtaaaaccaaaaaaacagaaatagatagttcggagaaaataggcttaaaagattgcatgtatgttttcaaaacagaaagtacgatcagaaaaaaagatatagtatcaaagtattttgtattaaaaaatatgaaacaccagtatgtgaaaaatacatattttaatgcttacttttgtgttgatagaaaacaatacgaaaaagacgaagactatttaaataaaatagaaaaagattttaaagaaagaattaaaaacaaaatagaaagaaacgaaaaaacaaaagatataacatacaatgagagatttaaaattaatgagtaa

SEQ ID NO: 168237 - DNA, 1239 bp, Enterobacter cloacae
atgtcattaattccacagccttttattaccaatgaaaatataaaaaaggctgatattttgagtgttatatataataatttcattgaagaaacagaaataccattaacacttccgatattttcattttttagctttttaagtgcttattgtgtaaaaaacaatattacatattcaatgccgttatctgaaaaaaaatctcatgttaatacttgggttacggttttagcaccgtcaggatcagcaaaaacctattcattaggaaaaatagaagacttaataccaataaaacctgatggagaaaaagtagttgagcaaaattttgtcaagccgtcaggcccagcaaaatttattgaagagttttcaaatcttccagactccagagacggaaaatctcaatatggcttttggattgaagacgaagtggctcaaatgttcaaacaagttgaaagagaaggaaccccgctttcagaaataaaagaatatttcttgaaagcctatgacaataaaaaattaacaagaaaaagcaaaaaagagacaatagaaactaaaaatctaatattggttttatttttcataaacacttttgatagttatgtgaataatatatcttccgagtctatgaccgatggtttaatgagaagatttaatcttgtttatacagaaaaagataagagccgagattttaccgatttccctatatacaacgagaaaaaaatcacagacgaaattttgtctgatagatttgaagatttatttttcaatatcaatccagatgtaaattatacattttcagaaaatgcttttgaactttacagaaaatatttcaagatcttttggcatagaaaatataaaaatattctcacagataaagaaaatttttatagaacatatatgatgcaaagctggaaatttgctgtattctaccatttaattttgaaaaaagaaggaacagtgatcgatggtgaatgcttaatatatggaatgaaaatttctttgttatttgccaacagtatgaaaaagttttttgattttaaaaataaaaatatatcagactcaaaaagagaaaaacaaaaagatactttattgaaatatgctgattttctcaattcaaaaccagatgcgacagttagagatttttgcagaaaattcagtattaaaaaagcagatgctgtttcaattttgaaaagtcttgaatgctcaggaataaaacattcaatatttgaagttgtgagcaaataa

SEQ ID NO: 168238 - DNA, 1479 bp, Enterobacter cloacae
atgacgactgctgagcaaagggcatttgcccgtaaggttgaatgcgaagaggacgggctctattacgctcgctacttcttcaagcagcgcaccggcggaaagatgatagtcgcgcctcaccacaaggtgattcagcaaacgctggatcgcgtcattgatggtgagattcaacgcctgatcatcaacgttccgcctggctacacgaaaacggaactggcgaccatcaatatgatgggccgagggctggcgctgaactgccgggcccgcttcatgcatctgtcctattcgcacaacctggcgctgctgaactcttccacagcgcgcggcatgattaagtcgcaggcataccaatccatgtggccgatggcgctgcgcgatgacgctgacagcaaggccatgtggtggactgagcacggcggcggcgtttatgcgtcgtcagctgctggacaggttaccggctttcgtgccggacacatggagccgggatggcagggcgcgctgattatcgatgaccctgttaagccggacgacgcttactcagagatcgtccgcgacggcgttaacaaccgtttcaacgagacaatcaaatcacgactggcgatcgagacgacgcctatgattgtcatcatgcagcgcattcactaccacgacctgagcggctatctgctgcggggcgggagtggagagaaatggcatcacctgaatctgccggtgattatcgacaatagtcagccatatgcggcgcagtaccctgaaaactcacacgctataccgattgaccatggcttacctgacggctggctgtggccttttaagcacaatgaatcgcatcgtgtatcgctgttctcgcaccggcgcaccgcagaagcccagtacatgcagaagcctcgcaggtttaatgcagaaggcgctctgtggacagaggtaatgatcagcgcggcacgcgaactgcaaattcatcacgataaggttcgcactgtcgtagccattgacccgcaggcaacaaacagcgacgaaagcgatgaaacaggcattgtcgctgccagctcatatggtgctggtgataaaaagcagttctctgtggatggcgattacagcggtaaatattcacctgctggatgggccaagaaagccatatcggcttatgagcaacacgaagctgacgcgatagttattgagacgaaccagggcggagatatggcggaggagacactccgcaacgccgggttcaaaggtcgcatcattcgtgtccatgccagcaaaggtaagtatgcccgcgcggagccgatatcggcgctctacgaacaggggcgagtggcaaatcacggcaatctctacgtgttggagaaccagttgatggaatacatccccgccaccgcgaagaaatcacctgaccgcctcgatgcgatggtttacgcactgacagaactcaatggatcgcaacctgtggggatgatgattccgaaacgccttcgctaa

SEQ ID NO: 168239 - DNA, 432 bp, Enterobacter cloacae
atgtcaaacggcggtgaaactgaactggtgcgtgcgctggataaagccggtgcgcttgatgtcattaagggctacgcaggctggaacacgacctgtaattcgttaggaacggggatcgcgcaccttgtcttttcgaccctgggcgataatgctgacgctatcgaacgtttctataaagaaaggctgatatcggactgggcttatcagactgaagtccgttttcccgttcagttcgaatatttaccttcaattggcctgagttattcctcattcgcagaaaaggaatccagcgtattcgataaaattaagactgaaatagaaaacacctggcaggaaaatattaagcatagctttaatggttgctgtcctgcgattacatccatttccgcaccttttcaacggatgagcggtttacattttactgttgtatga

SEQ ID NO: 168240 - DNA, 1167 bp, Enterobacter cloacae
atgaagaaactactcgaattacgccagcagaaagccgcactcaaaacacagatgcgttccatgctggacaaagccgacaccgaaaagcgcagcctgaacgaagaagagggcaaaaagttcgatgaactccgcgcccaggctgatgcgcttgaagttgaaatcacccgtcttgaagccgtcgccgacgatcagcgcaatctgccaggtacttccgttgaaggtgagccagtaagcaacgacgagctgcgccactacatcatgaccggtgatacccgctctctctccacgctggtgcaggctgacggcggttataccgttatccctgagctggacaaagagatcatgcgccagttgcaggatgatagcgtgatgcgctcgatcgcaacggtgaagaccaccaaaaccaacgaataccagaagctggtatctgtgggcggcactaccgttcatcgcggtaccgaaggtgaggcacgtaccgaaaccagtacgccgaagatggagcgcgttgatatcaaactcaacccgatctacgcctacccgaaaaccactcaggagattctcgacttctccgaggtggatattctgggctggctgtcttctgaaatcgccgacaccttcaccgctaccgaagaaagcgactttgtgaacggcgacggtgataaaaaatccaaaggcttcctgtcttaccctcgcgcggccactgccgataaaacccgtccgttcggcacgttggagaagatggaagcggctgacgtttcctctgatggcctgatcgacctgctgtataagctgaaagccaaataccgcaaaaacgccgtatgggtgatgaactccaacaccgcagccaaactgcaaaagctgaaaaacggcaacggggattacatctggcgcgatcgtctggttgccggttctcccgatacgctgctgggccgtcctgttcagtatctggaaaccatgcctgatgcggaggcaggtaaagcattcctcgcggtaggcgacttcaagcgcggctatttcatcgtggatcacaccactggcgtgcgtacccgccctgacaacatcaccgaaccgggtttctataaggtgcataccgataaatacctgggcggcggcgtggtggactccaacgccatcaaggtgcttgagctttccggctccggttcctga

SEQ ID NO: 168241 - DNA, 363 bp, Enterobacter cloacae
atgagtacattcattcgctgtctaatcgcctcattcgttctgaccatcattgcctttgctacggtgtacctgttcccaactgagtacgtatgcgttcaaaccgttgaacaacagaatggaccagatcttactaatgtcatcactgtgaaggaccacggcctgtggttcagctacacagataagatcggtacattcaactcaggtctgatgagtactgttaatgaccctaatatcaaaggtcgtatgaaccagactaagacaggaacatttatccgttctgataaaggtgagacaccaacgtatatgcacgttgataaatattacaaagttactaagatgatgaagcaatgcgataagaaataa

SEQ ID NO: 168242 - DNA, 228 bp, Enterobacter cloacae
atgaaaaaggtgatcgttttttttaatgccaatcccagcaaattcattatcgtgcttaagggcataacgtccgtacgccagacttatccgaatggcgaagaaattaatcttcagatcatgactgcaagctttccgtcgttgaccggcgatcatgattctctgtatgttgcttcagacagagaacttacctctcaggacatatctgatgttgccaaacaatatttataa

SEQ ID NO: 168243 - DNA, 291 bp, Enterobacter cloacae
atgtctgatgctttaaaggttatcaacaatattcgtactctccgtgctcaggctcgtgaactgacactcgatactctgaaagagatgttagaaaaactcactatcgttgtagaagaacgtcgtgaagaagaggcctcatttctaaagcagcaggaagagaaacaggccaagcttgaagcattccgtcagaagttgctggaagatggcatagacccggcagagttgctttcaactcttgatttaaaccgcaacgatcacaacaaaacctgttataatcgcagttccgattaa

SEQ ID NO: 168244 - DNA, 513 bp, Enterobacter cloacae
atgtcagaaagaagtaaaagagcaggaaaacgaaatcagtcagaaagacgttcagaacttataaaggcattgtggggaagcgaggaagtaccaacctggcacaggctagaaaacgatggattctctacagtaccgcgttatttacctttgattggtgttctaatggacagcttatcaaaaggatcaccactatcgacaacgtacttagccttgtggtttagggtttcagatgaaggactaatagaaataagagataaaacagtgttggcctatgagtcagggtttgccagtgatcgaggagtcactacatggacaggaagaatgaggaagttaaaggaattgggtttcatttccacaagagaaggtagcactggtgagtttcataacgtactgattattcacccattatatgtagttaaaaagcttttggaggatggggttatcactaagggaagaacctataacatcctggcggaacgagttgttgagattaaggcctcatggggggaataa

SEQ ID NO: 168245 - DNA, 495 bp, Enterobacter cloacae
atggctaaagcggtcgatgggttgcaaacgtttaaagatctcgatctgaaagatttgaggaatctagacgtcgatgaacgtaatgagcttgttgatgagattgatgccggtagtagtcttgatgaagctcttgcattgcttgaggttcatatggggtttagcgctgaagatatgtcagagatcgttaaaaccactcctatcggagatattcacatcttgcgagataagctttcacacattgtcgaaaagcgagcagatgcgcgcgaacgttacgtaaaatttgcgcttgatacgctcgttaacccctatgagatttgggagaccatgtatgatgacggtatggtgcggtatatattcattggcacatataagcaaaagcaacaaatgctggttattgttgcgccatgggatggaaaagttctctggaacttcatgcacacagaagcgaagggtcttaacaagcatcgtagagggattttgctatacagcagataa

SEQ ID NO: 168246 - DNA, 915 bp, Enterobacter cloacae
atgataataagagatttagaaggtaataatttatacagaaacagaaacgatttcgaaccagacagaatcattgatgccatagtaaaagcaggtggcatagaaaatattgacctgacttttcatgccagtgatttctatgatgacgaagctattaaagcaataaggtttttgaaaaatatcaactacgacattaacaagcttccgatagaccaatacgaagaagttgtagctattgaacttatcaagcaaggctatgatatgtacaaaacaggtaggcataatatcccggtcattacagaatgtggttatggggttttaaaagagtgtattaaacaaggtttagatctgaataaattcaatgttgacaatcattttagatctgaaattgactatgatgaaagaggtaatagtagaaaggttcattattctgatatatctaattttataagatataaagagagcatagactacgacaaatttagcttgcttgctgacaatggattgttaaacgaaaaaacattaaaagacttagagggagactttggaccgctttattataaatatcaatcagccatgaataaagaaacctttaaaaaagttcttaatgcttacgataaaatagagttaaatattgataagattcaagaaattcatgacatggatctgtgttattttaatggttctggtaattttaaaattcaattaattgataggtttttagaaacgagtgcaaacaaagattctgctattaatgaaatatatcagtcattggagaaaagaggtgaaaatataaacagtaaggataacttaccatttataaacatgattaaaaaacacactaaacaagaacagaacgagattcaggaagttttcacacatacagcaccaaagcccagcaccagaagaagaatgtag

SEQ ID NO: 168247 - DNA, 618 bp, Enterobacter cloacae
atgacacaggttgatgattttggcataccccatattgctaacttcggtaaggaagcactatcagaagtgataaagaacgggttagatatgagtcaatttacacaaggtgatcattttgattttaatcataatcatagatactctcgttttattaatacaaatgaaaagcttgaagtatttcttcaagctggattgctaaccgctgatactattaaagactatgaatgttttgaacatcacaaactttataacaaacctgatttaaatctaactgataagggattcgaactgctttttaaatgctatgactccatatcattaaacaccggaatgatgagttcatatagtatacattcaggtgaaaccacaactaacccagcagtgtttgagttaattggcaatgaaagacatttagatcatttgttcaaacgatacatagaagtgagttcagataaagttgaagctattaacttcataaaagatctgttccagaaatcagaatctcacagtttgaacagtgggaactaccctaatacagtgacgacaattgaagacattgaaatacagaatatattcaagcaatcacaaccaaaaaccattaccagaagaagaatgtag

SEQ ID NO: 168248 - DNA, 645 bp, Enterobacter cloacae
atgggaagaaatatagaaagcaaatcattcgtcagtatatggaaggaagtaaaaagttatacttgcactgtgaatgaaacagaaacatttgaaatgttattattggtaatgaaaggtcgagggtttagttttaacaaacacgagagagttatattttcaacaagaatacaaatgagaagccagcaaataaatagatgctcattacacaagaaattcttttacaagtctgtagaagaaaaaatgaagagtgtattcagggcattaaagcaaattcatgataaaaacgaaatggaaagaaatagactattaaacggaagggataaaataattagccgtttcaacagaattaaaacctttaacagtatctggaaggaattaatagaattagagatcactactgacgagatagatagttatgaatgtctcatttttataatgaaacacagaaaaatagaaattcctgaaacagcattagttgcaatggaactcaccgctcttaattcgctacaaaagaaaaaggcatacagggaaataaattccatcccatttatactcgattctatcaaagaagaactaaataatatatataacttactaacggataattttaaatatgacaaatttcaaacgatacactctctataa

SEQ ID NO: 168249 - DNA, 615 bp, Enterobacter cloacae
ttgggccagatcggcattgaccatcaggccaacgccctgctcaggggtggcggctccgacttcgtgcagcaggattgcgtcgtggtccatgctgtgaatcttcgccacccagtcagcaccggtagcgcgttgttgctcgttcggttcaagctggtcgaggaatgcggcaacactggtatgaatcggcggaacgtcttcaccgcgctcaatggcagcgacacgctcaagaagctcccttccaccttccgactcgctggcacgggcaacatctacccacttttcgaggtagatgcgattaccggacttcttaacattgcggttccacgcgcctacgtagccgacgttaagaccttcaggagagaaggccgacacgaactgaccgttaacctgcggatgacccagtggcgcgagcgtgccttccagcccctgatagtgggcgttgatttcatcttctgtgtacagcccgccattcatgacgacgttcgccggcagcgtatagctcggcagcaccagatgctcacgaccgttatgtgtttcgcgccggatagactggctgttcaccttcgtggtgatgttgacctgcataggcatagctatttctccgcccaggcgtaa

SEQ ID NO: 168250 - DNA, 831 bp, Enterobacter cloacae
ttgttcgcaccttccctggacgtcgtctatattgctacaccgacatctgagaaagagaacctgctgaagttatgtctcgaattcaataaacatgcattgattgaaaaacctttcccatccaccgagtccatgcagactctgctggataaagccagttccaggcatctggtatggatagatgctacgcattacattcatactctctggtataagaagcttgatgatctattgaatgaatatgttggaagtgtaaacaaaatccatgcaagtttttcatggcctgataaaaacataggtcagataaaatacgatcccatgctcgagccgtacgggttggcaggtgacctcggctggtatccgttaaggataatcagcaaattcatcccatgcggtaatatcaacaaaatacattctctcctgttgcgtgacggcaataatgttatcgtcgatatgagcgccattggtaacactgataccggtattgtttttatggccaatgcttcatatacggattttgttgttcaacagaaatgtgagatctccggctctaaagggcgattgatcattaacgatttcgttatgccttacagcggctcctttgtgtatggaactctgctgcaagatatgcgggtacaggtcgagtggggcatgaagcctttaattgataaaaaggaaataattattaacatccgggaaaaacaacatatcagcatgttaaaatatcttgccgaatttatagacaatcctgagcaccctcaacttaagctgctacagtcagagtgtatgagaacgatggaactcattcgtgcaattgaaaattcacacttctga

SEQ ID NO: 168251 - DNA, 324 bp, Enterobacter cloacae
atggatgacatatcagaaaagcaaaaaaacagaactaagccacgtattaaaaagacattagaacagcagttggcttcagctcagatgcgtttgaatcgcttacaacataaatccaagcaagaaactaaacagattgaaactcgtcagaagatcattctaggtgcagaagttgctaaagcattagattgtgatgttttcacggttgataaggaactagttttaggaatgctgttggagatcccaaatctacatcctgacgataaggtgagatttagaaaaaatggactgttatttctggctagcattaaaggtaggaaaacttaa

SEQ ID NO: 168252 - DNA, 516 bp, Enterobacter cloacae
atggggaaattgaaaacaaaaaatcttaaggaaagtgagtttataagatatatagaaactcatccagttttttcagagtctttatgtaagaagcatggggtttctgttgtatcactaggttattccctttatgtccatagtaatcatttttttctggagaatggttatgtgtcagatgatattcattatgacatggttaaaaataacttaatcatcatgaaaccaactcttaaacgattttataaaagaacaaggcaggtagattataatgattatactttcatatcggggattaaagagcatcaagactattgtatgttattaacgctttgttgctatcattggattgccgatgtgttcactgtctataatcataataaagggagtgatatagtcgttgacgttgccaatgagcttttacaaagaagcattgactacttttcaattgaacatcagaacgtagttgaatgttttaatgagttaaaacataagttcccacattatagaaagcgataa

SEQ ID NO: 168253 - DNA, 498 bp, Enterobacter cloacae
ttgcgagtcagtgaagtcagcaatccaggcgtattcatctgcgcccgccgcaaacttcgctttggctgcgcgatcgagacgctgttcgcgctcccggtaggattcacccaccagcgcgcccgagttcgctttaagcggctgtgccagatcggcattgaccatcaggccaactccctgctcaggggttgccgccccaacttcgtgcaacaggatcgcgtcgtggtccatgcgatggatgtcggcaacccactccgcacctgttgcgcgctcctgctcgttcggctcaagctgatcgaggaaagcggccacgctggtatgaatcggcggaacgtcttcaccgcgctcaatggcagcgacacgttcaagcagttccctgccaccttcagactctctggccctggccacatcaacccacttttcgagatagatgcgattaccggacttcttaacgtttcggttccacgcgccgatatggcctgcgttaatcccctcaggtga

SEQ ID NO: 168254 - DNA, 609 bp, Enterobacter cloacae
atgacgggtcagcaggcggatctccctgtcgaacgggaacgcgtagctcacgctggtgatgtcgctggtagaggacaggtcaaatccggcgtagcactccattccggcgaggtctttttcttcgtagtcgagttggcaggcatcccatgcgccggcacccatccacggagtggaaccctgacaccagatattgaaacgtttggtcagcatttcgacccactgcgacggtatgccccgcgctttctggatagtggactccagtttcgccgcgtcaacggacacatgcaggttagggttagccttgatccacatttccggctgctcaacctcgctttcgtcgtccagctcgtagatcaggacaaacagcgaatcgttgctctcttccccggccagaatctggcagcagtagtcatagtgctgtttacaggcagagacaacgttactcccggcggtcgtgatggcgaacaaaatcgcctcaggacgtgcgcccatacccagctcaagtgcggaataaacgccgttatccgggtgaaggtggtattcatcgacaattgccaggctggggttagttccttcaatggtggccgctttcgccgccagcggctttaa

SEQ ID NO: 168255 - DNA, 243 bp, Enterobacter cloacae
atgaacgttagcgtcacgcagagtagatttcagatcagcagctacagcaccacgcatgatgaacttaatttcttcttcagtaacactggcatcagtcagttcagcgattacagccaagaacgctttgtaggagaacgcaccagttttaaccagaccagcatcaatcagctgtttagcgataccatcacggaagttagtagtagcagttgcactgaataccgcttgttccagtttgatacgtga

SEQ ID NO: 168256 - DNA, 213 bp, Enterobacter cloacae
atgcctgatgcggctgcgggtgaagcgttcctggcagtcggggactttaagcgcggctatttcatcgtggatcacactactggcgtgcgtacccgccccgacaacatcaccgaacctggtttctacaaggtgcataccgataaatacctgggcggtggtgtggtggactccaacgccatcaaggtgcttgagctttccggttcaggttcctga

SEQ ID NO: 168257 - DNA, 282 bp, Enterobacter cloacae
gtgatcgacgctacggtgaagttagggcgtctgtcgtctgacatcaaagctctcatgaagcagtggaaaggggcggcgcggctaacagctattacggccacgcggcagatctttgacagcggcgatgtgtcggtaccgataaagtcctggcagttatacgttaagacggtggacatcgacgcagactccgcctcggtaaccctgtctgtcacaaatccgctgaacaacaacattggaaggctctatgacccaacggaatacactggccttcagtacctctga

SEQ ID NO: 168258 - DNA, 423 bp, Enterobacter cloacae
atgtttgaagaaaaaatccgaccttttcttgctgtagtaataattcttggcttatgtgtgctgtgtatttatcttgggggtagtatatttcagtcatacttctctttcgaagatagtattattttttcatggttaagtattgcattaattgccttgcctgttgtgatgatttttccacttgtttattttgccctgataattgttaaggggaaaaattttactttcaaaaaaatggataattatgtttcttatttgaagtggagttgcattgctatcataatattagggttgttattttcctgtttgtaccccaaagaattgctcagcaagggatatgtccgttgtaatggtgttccatcaggctggatggcaggaactgcaacccgctacgttaaacatccgtctatctgcgtcattaattga

SEQ ID NO: 168259 - DNA, 522 bp, Enterobacter cloacae
atgaaaaattatagagttatatttctgttactgttgttgtcatctagagtgctggcaggagacaccggtggaatatccttacttgttaaggccttgccgtcggccagtgattataaatatgtccttgatggcttttttagaaattattacggtgtggacaatcctcgtactcctacatgtgatcaaaaagattatgtcccatatattgataatatatatctgaatactcttcctaaaggtattgatgataatattttaataaagtctataacagactcatcggccagaactcagattgctaaaatattatcatcttactctgatgatcaagtttcggggtttgatggagttcttttttatgctgctaacgataacaaattatttatttacacatttgactcaaaatccccggtgtatattttcaaaaatgagttgaatattaatgatattattaattttaagcttttgggaagatctgtttgccagtctataagctcaaaaatactccctcctagcccttga

SEQ ID NO: 168260 - DNA, 1908 bp, Enterobacter cloacae
atgaaatttgtaaaagcgtcataccatcttaaaaccaaaacggttgagtatgaagctggagatggtactcgtttgctaaaaattggtggggcattgagttggcgatttaacaaccctggtaatataatagcattacctaatgccagtaggcaaaaagggcgaataggtgccgggactgtgtataatccgaaaaaaaatacatttgtcattttttccagcattgaaattggggagcgagagaaatgcgcgttattgaaacgaaaatataaagataataccatatctgaaatgatgttgcagtatgcgcctgagtccgctggcaatgatcccgtagcttacgccaattttattagctcggaaagtggagtttcaaaagataaaaaaatatcagatctgaatgttaatgaattcgacaaagttgtggctgcaatcagtaaaaaagaaggtggcttgaagcccggaactgaaaaatgggtgtacgtgacaaacgtgactgtttctgatggctctcgaccagttgcagatgtaccatttaaagtgacattgggaagcactacctacgaatggaaaacagatgcttacggcaagctcaagacgatcatccatacagaacaaggaatggctattatcctcaaatatacaaattctgctggaaaagaggatattgtttattctgctgttgcgagggatgaaacgaaaaatatacttctcacgagaaacttttcgcaattttccgcaaaaacacttgccgagaacccaaaagtcccacgggagaaaagcactcagaagccgatagagtacatagtcatgtcaggagactcgctctcgaaaattgccgagcgttataagacaagtactgatgaaattgctaaaaataataatataaaagatgtaagtaagattttccccggtcagcacttgacgatttatgggggcaacactagtagcccttcagtatatatcgtttcaccaggtgatacacttgctaagattgccgcacaaaatggtacgactgtcgatgaactcgctcgcgaaaacaatatctcagatccaaataaaatctatctagggcagtcgatatttatttcaactattacggaagattcaaaagcaagtaatccagtatcatcttcagataaacaagcgctcaaacctgaacactcagtcaagaagtctccggtcaatttaaataaaaaaatactggaatctgtaggttctaaaaactctgatgaaccgatagctttgctaccccatgatcaaagggaggcaccatggatggcgattgcgatccgtgaggttatagaatggcatggaacaggagagaaggaaattactgataattatcataagctaatgggatcaaaggcatcattgggtagtacggcgtggtgtgcttcgtttgctaattattgtctgaaagaagcggggtatgactactctaagagttttacaaaatcttctcaatttccggtttatgacaaaacgaaatttgtcgagataaaaaatcctgtatatggtgcattgatggtctttcgtacatatattgaatcaagtgatgaatttacaggaaatggacatgtaacatttgtttatggaaaaacgagtaatggtgatattactgggttaggcggcaaccagggaggtaaaacatatggtggaggtactatcaagttatcaatgtatagtaccacgaaaccaacatccagattcaaaatgactgtcagaaaaaaagcagaaacccctgtatatcaaaaattttataagtattatattcctgtggcgtataaagaatatcattcaaaaatttccgtggagttacctttagttgatgttgacgatgttaataagaatttattcggatttgatagcgaaactaaatctgcgaatgatgaaggtggtggtcgatga

SEQ ID NO: 168261 - DNA, 432 bp, Enterobacter cloacae
atgttaaatctgcttatgaaacttacgttgagtatagctatcttagtttatcacttcggtgtaaatgctacatgtctgaaagagggggatgagatagtactctcaggagtgattaaagaagagttgttttacggcccccctaactggggggaagacaggaatcatgacgaaaaattactttactggatcctgcatttagacagtccgttaaagtgtgtgattgatgctaatactgaacaagagggttgggacagtaatgttcaactcattattagcggtgaagattataaaattaaacgtagtttacttaatcatcatgtcgctgtagatggaaatgttatgcttgctgtaacaggctatcatatgacttcagttttactaaaaaacatcagttttaaacaaacgaaaaaaattaaaaaggatgacatatga

SEQ ID NO: 168262 - DNA, 1671 bp, Enterobacter cloacae
atggtagataattctttaccacaatggaatccagaagaattcattgttaaaactaatgagttagaaagtattatttatgaacaagactcattatcaatactagcagggcctggggctggtaaaactgagatgcttgctcaaaaaaccatttatcttttagagcatgatatttgcccttggcctaagaaaattcttttcctaacattcaaaaacgaagctagtaaaaatgtcaaagatagagtattaaagcgctcacctgaggcaaatgacagatttctatctaagacttatcattcctttgctaaatctatcgtcgatagattcagattatcacttgatgaaaacataagacctaatgcaggatatgatgttatattcaagggtaagagcgataaaaacaaagttcatattagtgatgtaattaaatatgcgtcagcaataataaaaaacaatggaaaaattccgattttatatcaggaatgttttactcatatttttcttgatgaattccaagataccacattacagcagtatgagcttatttcattattattcttgaatagccaagtaaaaattatttgtgtaggagatctaaatcaaagcattatgctttttgctcaagcttatcctgaaatatatcgactagtagagacagattttaaacctaaaagaaaattactaattagtaattttagagccggcgttaaaataaaagaattcctaagccactttcaaccttttgtcgaaaaaggagtatttaatcagataacaccacataaaaataataactgcacaattcatcattttaatgatgatatcaatgagtcggaattcataactgactatgtattaaataaaattgcatctggattttcaccagaagacatatgtatactcacccgacaaaaatcaagcaactacagtgctaaattatgtgatcgattaaataataaaggcatcagtaatattgtttatgatacttttcaggatgcgatagcagatccattaggaattatctttagtttaatcctcgaatgtgcattgataaaatcacctaaggcttggtctgagttgttaaatctatatatagaactgaacataatagatgagaacaatgactctgataataataagttaataacgtttattgattatttttcaactactaaaaaagctacggctttcaacgactataagaatgttttagattttataacaaatataattgatcacataggcctcaatctaataaagagcaaatggccacaacacaaatcagttgaacatacaaaatacatttggacggagttagctaaacaacttcataaaatatactcaaataatattgacagagaaacaattgtgatgaatttctgtgggaagcaatcattaaaaataatgaacatacataaatgcaaagggcttgagtataaagccgtgatactaattggtttcgaggacgaggctttctggaattattctgatgataacttcgaagagcgatgcgttctgtatgtggcgtttactagagctaaagaagagatattaataacacaatcagattatagagactttatatctggtggcagaaaaaaaaccagtcaagaaatcacttcaaaattaagggataatttaatcgacaaatgcgggtttatactccacttacattag

SEQ ID NO: 168263 - DNA, 1986 bp, Enterobacter cloacae
atgcatttaaaaaatatgactatcggtggttttaaaagtttttcatataatgaaccacaaaaaatttcatttgaaaaagacagaacagtattcataggtaacaatggaaccggaaagagtgcaattcttgatgcactaaataaattattcagtgtttcaaattcattccgaaccatatatccttctgaatttcatgttgaaaacgaagatgatcaaacccaaattaaaaatctcttcatagatgtcacatttgctttcggcaaaataaaagatgatgtaagtatcccttcgttaatagaacaaatgacactcgatgacggagaggatgtaatctttagggtccgacttgaagcatcattaagttatgaattttcagatgtcggcgatatagatgaaaacatctatatcattacagatatctcagaaactcccagcgatgattgcaaaataaaattatcaccattgattcgaaattcaattcaaatccattacgtacctgcgaccagagatccattaaaacaattaacttactcctcatcagcggttttgggtaagttaatgaaagcgattaactgggatgaaaatgctagggacgagtataaagagaaagcattagaactgattgccatcgcgaagaaaaacaaagagataagtttaatatcagagtccattaatagtggatggtcaacactttataaagagagtgtactttcaaatgcccaattagacttccctctaaactcgatagatgacttgatgaagttagttactttattcttaagtcccaatgaacaaggtgcaattatatcggctgaattacttagtgatggtcaaagatccctgatgtatcttgcaataatcaatgcattatttaacgtggaaataaaaataaaacacgcggctaaaggtgaatatagttttgataaatcaaaattaagactcccaatatttagcttaatttcattagaagaaccagaaaaccatttatcacctcattatctcggtaggataataaagttattttccaactatgccgagaaagattcattccaaatggtaatgtctacgcattcaacctctataatgtccagaatagaacctgaacaggttcgacatttttccttgaaaaacacttgtagtgttataaataaattagaactaccgttgaaatccgatgagaaatttaaatttataaatgaagcggtcaaatcatatcctgaaatatattttgctagtcttgtaattttagtggagggtgatagtgagcaggtaatactacccaaaatatttgaatcttataactttgacgcagatagtaaaaatattgcaattgctcctttaggtggtaggcatgtaaatcatttctggcgcttacttgagtctttaaaagtaccttacataacattattagatctcgacctaggaagaaatggtggaggatttgaaagaatcaaatatgccataaaacaattatcctctcataggaatgtaacttatttacattctgagatgcttgaccgattacctaattgggactcggagcaagatccattaacttttacaatatgttacaaagatggaaaagaagtaaatattgtcgacgagttaaaaaagcataatatatttttctctgctcctttagatatagactatatgatgattaattcgtttcctgaaatttattgtgaaatagattcagaaaacaatgaaaggggaccagaggttttgaagcaagaaaaaataattgaaaatgacataataaaacaagtccttaaagatggaaacaaagggaataaaaattataaacatgataatggttatttaacaaaatttgtttggtataattatagattccttggcagtaaaagcaaaccagcctctcacatacggcttattaataaaataaagggatcacttgtcgaaaggatgccaagcgttcttaaagaattagtagaaagagtgggagagattagccatggtagataa

SEQ ID NO: 168264 - DNA, 129 bp, Enterobacter cloacae
atggtgaaaactgtggcgcaacgcacaaaattattcaccatgaaaataattatctccgtggggcaaaacgagttcgaggttaaccgattgcacggggtattgcgagcaaaaaagtccgtttttttataa

SEQ ID NO: 168265 - DNA, 570 bp, Enterobacter cloacae
atggaaaaatatctatacttatccgagcattcgcatgtggacgcttgggtttatggtggtgaggttcctttcttcaagactagtaaatacaaggatcaagaaaggaaaggtatcttcactcctgatgaaaaccttattgacacttcaacatttgattttcgaccctattctaatgctattttcttgggtgacaatattatcaattgcaatgtgagtctcactgtagatggagtcgaaatagtgagggacgccaaagttaataaatggactgaggatggtctagtagtatgttttgccaatagaagaagtagattcatcgcaaaaaagcttgagaaaaaagcatgtgttagagtactaaatgtagaattgcttaaaacgttaattgatgcgcatgttggctcgaagggcgaaatggatttttgcaaatataccaaaagccataatcggaatcatttccttaagtctgatgaagactcttggcaggacgaatttagaatgttttggaaagatgttgagccgataaaactaatattacctcctgggattgcagttctagagttttacagataa

SEQ ID NO: 168266 - DNA, 312 bp, Enterobacter cloacae
atgattttggtgaaggcaatgaaaaaactagtcttatttgtattattttttggtttcagttgtgtttcaaatgcaactcaaacactggctccattagaaccaaatgagttgcaaagctatacgtctacgatttgctctgatcatgcaaatcctgaattgtgtaaaaaggctttttttaaaatcatgggctatataaaaacaaacgatgattactactatttctgtcaaaagcaaaaagaggcagggatgacgattaataaagattcatgcaataaatcggaagctctgagagaatttttagacaagccatga

SEQ ID NO: 168267 - DNA, 225 bp, Enterobacter cloacae; identical to SEQ ID NO: 146674

SEQ ID NO: 168268 - DNA, 435 bp, Enterobacter cloacae
atgagcaacaaatacgaagatctggttaaaaacgccaggatgaatgccgattgtggtgagcacatgtcgccggcagaagttacgactctgcttaacgtagttgaaaccacattcgcggcgctggctgcggagaatgcggggctgaagtcggctatcagtgagcatagtgatggtttcactgtatgcccatgctgtggaactgagcatgacagttgccacgatgatgtatgccgcgctctgaatgaaaccccggcgacagacgctttcctggctgaagtgcgggcgcagggggtggagatgtttgctgaaagccagaaggaatacgtcagaaagaaccgcgacgaattggattccatgactcgcgctgcatattgcggcagtgctgttgatgctgaacgattcgcagcccagcttcgcaaaggagtgcagtcatga

SEQ ID NO: 168269 - DNA, 363 bp, Enterobacter cloacae
atgagcaccggaatcggaaatcacgagttcagcacgaactatcgaaacatctacaaaccagacctggccatctgcccttattgcggattcgaaagctgcgaagctgaccactgcgatgtagggatcggcatggttcagtgtggtccgtattactgcccacaatgctgtgcatctgaaattagcagcctggatacgcgagagcttactgaccgtgaaaaagaaaccgggtggtttaagcctgatagcccggtaagcgatgtcgccaacacggtcaacggccagttggttaatcacaaagaagccaagcaggcttacgacattggcttgctcgatgttaagaaattagaccgggaggcatcatga

SEQ ID NO: 168270 - DNA, 570 bp, Enterobacter cloacae
atggtaaaagttggatttatcgtcgagggcagtactgaatctatcattgttaactcgtctttatttgtcgcctttttgcaaaaccacggtttcgaattagttacgccggttgtagatgccaaaggtggcggtaatcttttgccaaaatatgttgatagcttcgtcgcagaattaaagggggcaggtgctgagaaaatctgcattctgacagatttggaagatgaagcttcaactgaagtggtaagagcacgcatcgctcatggtgaggttgacgtctcctttattgcaattaaagcgattgaagcctggtttttggcagattccgaggcaatgaaagtctggctcaatgtagatgaattttatgaagaccaacccgaggtaacggtcactaaaccttgggacagactaaaacaaatagcccagcaactaaacaaaccagggactggccctagcaaaactatttttgcaaataaaatggttacccgttatgggtttgatgtgagcaaagcagctgcccacccaaactgcgcaagtgcccgcgaactggtagactggtttgagaatcaataa

SEQ ID NO: 168271 - DNA, 1122 bp, Enterobacter cloacae
atggatcaacatcccctgattattaaaggctacaagagtatcgcggagctttcccttgtggaaagcccaccgttcattacttttgccggggccaacggcgcgggaaaaagtaacattaccgatgctctggctttttttggtgccgtggtcaaaaccggcgcgactcaggctattcgcgatttcggtggttttcagcagatccattgctataagctgcgtagtgaaaaccggacgacggcgtcactgcatcttgatattgagctggcaggaaaacagtttacctatgatctgacgatcaaaagtatgaataagaagcccgccattacagagaggttggcgatcaatggggagatctatattgatcgcagacaaccagatgccctcaccatccgtttaagtgacgatcccgaaattccccctgcgcattttcctaactattcgtcagatatgacggcgctcatgctgctgggtaaaagcgagctgtatgcatttttaaccaatattgtcgtgttccgcatcgatccgctgcgggcgaaagaacctgatggtgcaaaaacagacgcctcttttctggaccctcacggcaaaaatattgcctctgtgcttgctgaactggagtccaatagcgacttcaaagagcaaatactggactggatggagctcattgttcctggtatggaaaatgtgtccaccgaaaaacaaaaactggatggttcaacagtactgactttcaaagaacacggaactaaagcgcgttttccagcacatttgatctccgatggcactatttataccttgtgcattatgacggccatactaagtcgggcgcagcagacaggaatgaccatcatcgaagagccagagcgaggcatccaccctaaagccatcggtgagctggtgcagttgatgcgcgagaatgctactttggaacatcccattattatcaccactcatagtgaatctgttgttagaaacctggaaccggatgagctgtggcttgtgagtaagcaagaggggaaaacccagttgaaacgtgcctcagatgctggtgttgataaaaagaaaatccccctggataccgcatggttaacaaatttgtttaacggtggtttgccatggtaa

SEQ ID NO: 168272 - DNA, 3606 bp, Enterobacter cloacae
atgaatacgtcaaacatcaaaaaatacgccccggtggcacgtaaacagttccgcgatgcggtcatgcaaaaactgaccacgctgggtattgaggccgataaaaaaggtaatgtacagattgcgcaggcaaccgatcttggagacctggttcgctatggccagttctcgctggacaaatccctaatctcacgtcgtgaacgtctggtaaaacgtgccgaaaagcaaggctacgaggtgttggtagagcacatcgcttacacctggtttaaccgcttctgcgccattcgctatatggaattgcacggttatcttgatcacggtttccgtatgctgtctcacccgacgctggcaggtggttttgaggttctggaccatgtgcctgaagtggctgatgcacttgggctggacacatcgcgtttggttgagatgaagctggcgggcgatcgtgacgaagagctgtatcgtgaactgttgcttgcccagtgtcatgcgctgcacggtgcaatgcctttcctgttcgaagcagtcaatgatgaaattgagctggtgctgccggataacctgacccgtactgactccattctgcgtgggctggtggacattattcctgaagaagactgggaacaggtcgaagtgatcggctggctgtatcagtcctacatctccgagaaaaaagacgatgtaatcggcaaggtggtgaagagcgaagatattcctgccgcgacccaactgtttaccccgaactggattgtgcagtatctggtgcagaactcggtgggtcgccagtggctgcaaacctatccggtttccaacctgaaaggcaaaatgccatattacatcgagccagcggagcaaacgccggaagtgcaggcgcagctggcagccatcaccccatcaagcattgaacctgaaagcattaaagtgctggacccagcctgcggctccgggcatatcctgaccgaagcctataacgtgctgaaagcgatttatgaagaacgaggctaccgcacccgtgatattccgcagctgattctggaaaacaatattttcggcctggacatcgatgaccgcgccgcacagctctcaggctttgcgatgttgatgctggcgcgtcaggacgatcgccgcatcctgggccgtggtgtgcggctgaatattgtctccctgcaggaaagtaagctggatatcgctgagctatggaccaagctgaacttccaccagcaggtgcagcgtggcactactagccagatgttccctgaagagatgacactagccaacaccgacagcgcggaatacaagctgctgatgcgaacgctggcgttatttaccagcgcaaaaacgctgggttcgctgattcaggttccacatgaagatgaagtggcgttaaaagggcttcttgatgagttgtatcgtctggctgtcgagggtgatatcccgcagaaagaagcggcggcggagctgattccgtatattcagcaggcgtggattttggcgcagcgttacgatgcggttgtggcgaacccgccatatatgggcgggaaagggatgaatggcgagctaaaagaatttgctaaaaaacaattcccggacagcaagtcagatttgtttgcgatgtttatgcagcatgcattttctttactcaaagagaatggtttcaatgcgcaagtgaatatgcagtcatggatgttcctgtcgagctatgaagcgcttcgcggttggctgctggataataaaacttttatcactatggcacatttaggggcgcgggcgtttgggcagatttctggagaagtggtccagactactgcatgggtgatgagtaataaccattttgaacgctaccagccggtatttttccgtttgattgaaggaaatgaggaactgaagaagacggttttgctcgagcgggaaaatcgatttgataatactctacaagaagactttaaaaaaataccaagcgcacctgttgcgtattggctaacaccatcaataatagatgttttttttagaggggaagctttgaggaatatatccattcctcgacagggaaatactacaacaaacaatgaaaaatttgttcgctcttggtttgaagttaattttgataaaattgggcttggatactcatcagcaaaagatttttcagagcataagaaaaaatggtgtccatacaataaaggtggtggttcgttaaaatggtatgggttgaatgaaagcattgttaactgggaagacggtggtgagcaaataaaagccataccacactcagtggtagcaaacgaaagtaactatttcaagcctggaataacattttctacggtctcaagctctggttatggatttcgtctatttgataatgggtttatctttgataacaaaggagcttcaattttcatcgatggagaaaagcgactttacctattagctatacttaattcgaaaatatttgaattaaccgttcattctattaccccaacaatttcactgcagccgggcgacgtcgctaagttacctgtaatcgagggtgatagcactcaaatggaaaaggttatatctctcagtaaagaagccgttatgaaatccaaacagagctgggatgataaagaattatcttgggattttaaaagaccaaattttatatctaatactgcattagatgaagtgctatctaactctataaataaatatattatctcatgtcaaaatcatgcggattgtatttccgatattgagaatgaaataaacattgagttaattaatatttatgacattagagaggatgttatatctaatgttgttagtggttctgattatattaatttaaccgcaatgattggggagctgatttcttacatcatcggctgccaaatgggccgctactctctcgatcgcgaaggtttagtctacgctcacgaaggcaacaaaggttttgccgaattagtcgccgaaggtgcttacaaaaccttcccagccgatgaagatggcatcctgccattaatggattccgactggttcgacgacgatgtcaccgctcgtgtaaaagagtttgtccaaaccgtatggggtgaagagcacctacaggaaaacctcgatttcattgccgaaagcctctgcttgtacgccatcaaaccgaaaaaaggcgaatcatcactcgataccattcgccgctatctttccacgcagttctggaaagatcatatgaagatgtacaagaagcgcccaatttactggctgttcagctccggtaaagagaaggcgtttgagtgtctggtctatctgcaccgctataatgacgccaccctgtcgcgtatgcgtaccgaatacgtggttccgctgctggcgcgctatcagggcaatatcgacctggttaacgatcagcttaagagtgctgaatcgggagctgccaccacgcgcctgaaaaaagagctggatgggtttaccaagaagttcaacgaactgcgcaattttgacgatcgcttgcgtcactatgctgatagacgtatcactattgatctggatgacggcgttaaggttaactacggcaaatttggcgatctactggcagatgtgaaggcgatcaccggtagcactccacaggaggcataa

SEQ ID NO: 168273 - DNA, 327 bp, Enterobacter cloacae
atgcagcagacagattttacggctgatattctgcttctgctctttggacaatggccccccaccgctggtgggctcgaccttatccgactggctgataacaaacagcaccttatgccggtatgcctccccaatcacttgatgataaaagtgttcatccactgccagcgcccggtcatcggccttaatcagccacagcaccaggtcaagccggggaagctgttcgcgatacagcgcagcatattcgttatcgcgagcgccactttcgcccacaccgggcaggtccaccagcgtcatatggcggtcgccaaccagcagacgaaagcgtaa

SEQ ID NO: 168274 - DNA, 468 bp, Enterobacter cloacae
atgcttgtgtccgtaaaaatcacagacaaaaaagaggtctggagaagaataagggtcggacttaatgagctggagcccgttgaggtagtggcagggattcaaaaaggggaggttaatgatggagtgcttgtcgctgaatatgctacttggaacgaatttggtaccagaacaactccatcacgtcccttcatgagaaatgctttcgataaaaacgtggagacacttgtcagattcttttatcaggggcggcgtgggattgttgatgggaaaatcaatcaagaccagcttatgaatgcagttggagtaaaaatggtccaactgataaaagagagcatccttaacgaatcatgggcaccaaacgccgaatacaccatagacaggaaaaagtcttcaaagccacttgttgatacgggcacgatgcttaatagcattacttatgccatacacccttatggaacatcgagatga

SEQ ID NO: 168275 - DNA, 225 bp, Enterobacter cloacae; identical to SEQ ID NO: 146674

SEQ ID NO: 168276 - DNA, 495 bp, Enterobacter cloacae
atggcgaaaactaattttctgattggacgcggcgagttattaaccaatgatattcccggtccaaaaagagccccaggaaaagctgaggtgtactctctttatgaatcgaaacagcgcctgttgccgcaaattgcatctacgatagaaaattttgctaagttacctggtcgggcatgtcctgacgattatgcagttgcaaaggtaactatcaatccaagctatattgcgcgatcctttttccctgcgaagatgttgaaatctaccggattaacgtcaattgggagcaggacggttagagttacgccgcaaagctggaaacgcaaagttgctgtttctgaggttacaacaacacagatgtttattgcgggtaaaagagaatcattcgaagagttacctcattgggtctctggacttaaagagttaactgatgaagcgattgattttgcgcgtatagaaaagtttgaagcttatttgcctgatgaagtggtttactga

SEQ ID NO: 168277 - DNA, 351 bp, Enterobacter cloacae
atggccagtaccggcgagaatggtcataaaccaggtcaccagcggggcaaggaaggtgatgtatttcggatggcgacgcagcattcgctccgccagactgaccaggtagtccataccgcctgcgacctgcatggccgcaatagcagcaataaccgccatgatgatttcgataacgtcaaaagggattgcgccgggtttaatctgaaagatcagggtaagtacaagcaccccgagaccaccagcaaaaccgatgccgatacccccgagtcgtgcgcccaaataaatcgccaacaggacgatgacgagttctgctccaaacataaagacctgccttgctcattaacaagttga

SEQ ID NO: 168278 - DNA, 894 bp, Enterobacter cloacae
gtgatttttgggatcggaccagttaaccagcgccgtggtgtagcgcgtcgtctcgctggggtcggagaatgtaaacttgccgttgaccacgttggcatggttgtagatatgagaggtgtcgtccggcatatccgccaggacatacatgcggttgtcgccccagtaagtcataccccggaaccgtgccgccagatcgcgcagcacagtccatgcgtccgcccggtcctggatgtacacgttacagcggtggcgtggctccatgccgcctcggccatcagggatcagctgatcgcaatattgcgcgatgcggtacagctcccagcggtcaagctgttcagagccaatgcgctggccgaggccaaagcgctcgctcaggacgatatcgtagaaaatccaggccgggttatcggtccaggcccatttaaacgtgcccgtccaggtcccgctgtaggtgcgggtctccggatcataagtatccggtacccggattatccgccccttcgggctgcacaccacctgtgggatgccattcggaaactgccgggcatcaaattcaacgtaaagcagagcagtatgagggtagcgaagcttggcatcgatgatctcggtaaccgcctgcactttcatcgtatcgacgacgttgatgctcgtggcgtccggagagacgcggcgcacgcgcagctgccagccggtggtggccttcggcaggtttatgcgatggcttcgctcgtagagagtcgtcgccttgtcgtccacgacaccgttaatcaccgtctcatatgcgccgccatcaacagacagatcgatggcgtattccacacgggtaccaaccttgtcgccgttatccttctgccagagcagggtcgcccagcctacgcggacacgtaccgctga

SEQ ID NO: 168279 - DNA, 459 bp, Enterobacter cloacae
atgatccacagcgaagtagagatcggggttgtacgttgtgccggtgaccgcataggtgccgtcgttgttgtcggtgacgcccgttacgcgaaacagcgccatatacagatcgtcagcctcgactgcccagttgctttccgcttccggcgtctcactccagggggtggtgacggtaaccatttcaccattaacagcctggacggtgcgcgcctgcgcagatccggacggcaggttgacgaacaggcgatcgcctggtttgacgtcggctgcacggtcaagcttaacggtgcgcccgttcactgcactgatgcgcccaccgataatacgcccggccagctcattcgcggccacaccaataaccttacctaccgggggcacgtccaggccggtgtcgaacgtcaccacctcgcccgctccgttcgtcagcaggatccagcgtccgtgacggtttgcttctga

SEQ ID NO: 168280 - DNA, 303 bp, Enterobacter cloacae
atgcagacccgccagcgcgatgcagctgcgctggatgccaaatacaccggagaactggctgatgcgaaagaaaccattgagcgtctgcatagcgatgtcattgctggccgtaagcggctgcagctcaacgcaagctgtcccgcgaacggaacgaccagctccggcggcctgggcgatgcttccggcccccgacttactgactccgctgaacgggattatttcaccctcagagagcgaatcgtcacagtgacaaagcaggtcggctatttgcaggactacatcaaagagcagtgcttaaagtga

SEQ ID NO: 168281 - DNA, 687 bp, Enterobacter cloacae
atggcaagcgacagggaggcaacagcgcgttcgctgctgagtttgcagactgacgtgaacggcaacaaggcagaaatcaacagcctgaaccagacgttttccaattatcagcaggccacggccacgcagataaacggcattacggcgaccatcaacgggcacacttcagcgatcactaccaacgcgcagaccattgcgaacgtcaatggcgacctgaaggcgatgtacagcatcaaggtcgggttatccagcaatggtcagctttacgcggcagggatggggatcggcgtggagaatacgccgtccggcatgcagtcgcaggttatcttcctggctgaccgcttcggcgtaacgcaccaggccggagcgaccgttacgcttcctttcgttatccagaatgggcagaccataattcgggacacggttattggagacgggacgattggaaacgccaagatcggcagctatatccaatcttcaacctgggacggtaccgggaacgttggctggcacatcaacaaatctggctacgcgacgtttaacaacgtgaccgttcgcggctcgatttacgccacaaacggtaatttttctttcaatggctccggcaatacaacggtgattaatggtaatggcgtaaccattaatattccgggtggcggccgcatcgtactggggacgtggacataa

SEQ ID NO: 168282 - DNA, 366 bp, Enterobacter cloacae
atgcagcaggcagattttgcggctgatattctgcttctgcgccgtggacaactgtcccccaccgctggtaggttcggccttatccgactggctgataacaaacagcaccttatgccggtatacctctccaatcacctgatgataaaaatgttcatccaccgtcagcgcccggtcatcggccttaatcagccacagtaccaggtcgaggcgaggaagctgttcacggtacagcgcagcatactcggtatcgcgagcgccactttcgcccacgccgggcagatccatcagcgttatatagcggtcgccgacttgcaggcgaaagcgcagtggctcacgtgtacaggccgccacatcgctgaccggtga

SEQ ID NO: 168283 - DNA, 999 bp, Enterobacter cloacae
atgtctgaaaaacacttaagccatttggttaacggcaaggtccccttgacggatgacgttgcgaggaagcttgctaccgtcttaggtagcactattggattttggctttcacgagaagcaaaattcagggagcatcttgcacgtcttgaagaggaaaagaaatgcattgagtgggtggattggctctcatgccttccggttaaagatctaatgactacctcatcaatacccaaaaggcgtgtagatgacaaaaataagccatctatagttaaagattgtctgcagttctttggtattgccactccaaatgaatgggacaattattattcaggaatgcaagttgcgtttcgccgctctagacaagaacagagcgatattggtgctatttcagcatggcttcgacttggcgaaatagcagctgaaaattatcataacataccaaaatataacagagcacgcttcgaaaagtcgctttcagaaatcagaaaattgacaactgaaagagctgaaatttttgaaccaattatgaggaaacttctcgacgaatctggcgtattattggtacttgtgcccgcaattcctaaggcacatgttagtggtattgcacgttggttaactcctactaaaccaataatacaaatgtcgctttatggaaagacaaatgatcgcttctggtttacctttttccacgaagcagcgcatattttacttcatgcaaataatgcagaggaaaaaaaagatgttttccttgatgaccccttatcagctaaaagcgatgatccaaaagagaaagaggctgacaattgggccggtgagtggttgatacccgaaaaatacaccactgaacttatcaaattaagtcgaaaagatgatgtacgacaattttctgaaaaaattggagttcacccaggaatagttgtagggcgcttgcaacatgacaaaattattcccccttcatggatgaatgatttaaaacagagctttagatttgcaaaataa

SEQ ID NO: 168284 - DNA, 138 bp, Enterobacter cloacae
atgagtagcctttccaatatccccaaacgtggggcaaataacaaactgtacatagtacaggattcatatcagcaaaaactattgatgacatatattattaataaatcatttttaaataatgtcaatgactgtgaataa

SEQ ID NO: 168285 - DNA, 309 bp, Enterobacter cloacae
gtgaatcagcagcgttttcagaccgaagagatcattagcctcctggtcttcatcccacttagcccggcgcagcgcggtagtcacttcagtgcgcgctattcggttcgcccggcgcttctcgatgccggtctggtctgtcaggttgcgggcaatatccagcggattgagcccgcgccctacaccatcagtcagcacgcgcgccatatctcgcttaacgtcagcagtcagccccttcatttcctcaaatacacgcgcatgcaccagcgccatacgttgctgatacgggtcgcttgtgaggatggaagctaa

SEQ ID NO: 168286 - DNA, 165 bp, Enterobacter cloacae
atgtcgacctctttagctaatcgaccctgtgtatatccagcgctttccattgcctgcgctaagcgctccgagaatcccatattcacctctgttaatgactcctttaactctatcgctcaagcgattatttggcaaaaaatcgcctatgcgattgacattcgctaa

SEQ ID NO: 168287 - DNA, 165 bp, Enterobacter cloacae
atggttaagcgcagaaagtaccaggaaaaagaggagcgacgccatccagattcaccagacggtcttatcgtcgcagcgtccaagaaccaggcattcgcagagcgcctgattggggttatccgcatcgcaatggctaagtcaggggtgaagcatgggcgtcgttaa

SEQ ID NO: 168288 - DNA, 831 bp, Enterobacter cloacae
atgggcgtcgttaaatttgcagattacagacctgcagaagcggtcgtggagcgccaggtggctgatctcgatgatgggttcatcatgatcgctatgaggctgtatgaggagctgattggagcaaatctgacgcgcaatcaggctaaggttgcacatgcggtatgccgtaaaacctacggcttcaaaaagaaaatggaccgtattgctgatagccagattgcagagattgcccggatcagtcgccctaaggcttgcatagctaagaacgagttgatttctatgaaggttctaatctcagaaaacgggatgattggaccaaacaagaacatccatgagtgggaaattcctgagtgttcccaagctgataactttgttaccaaatcgggaacaaaaaacgttaccaaattggttacagcgactgttaccaaaagggaatacacaaaagatatctctaaagataaaacaaataaaacccccttaccccctgacgggggcgacgctggaagtgaaaaacttacagccagaaccaaagtcagcatcgactacgaatccttcctggcagcctacaacaccgaagtaggcgaaaggctcccacacgcagtggcagtcaacgagaagcgcaaacgccgcctgaagaaaatcattccccagctcaagacgccaaacgtcgaagggttcagggcatacgtccgggcgttcgttcatcaggccaagccgttttacttcggggataacaacactggctggacagcagacttcgattttctgctgagagacgacacgcttaccggagtgcgggaagcaaaattcgctgacagggggatggcatga

SEQ ID NO: 168289 - DNA, 1368 bp, Enterobacter cloacae
atgagacaggatatcgaagcaagtgtgatcggcgggctgctgctcggcgggctgaccccgtccgcaagtgacgttctcgcccggatggaagcggacgcattcacaatcccggtctaccggaaagcctttgaggtgatccgcaaacaggcccggaaccgcaaactgattgatgccctgatggttgccgaagagtgtggtgatgcgcacttcgctgacatcatggaaactgcgaggtcatgccccagcgccgccaacctgcgcggatacgccgggatgcttagcgatcagcatcagcgccgcatgttcctgagcgcaatcgacgagctgcgcggcgacgtaagcaacggaacgctggataacgcagcctcggcaatggacgagcttatgcgtcgcctgagcaccatcaggaagcccaaaactgaggttgccccggtacggctcggtgatgtgctggacgactacaccgacacgctggagaaccggctgaagaacggcgatgagtccgacactctgaaaaccgggatcgacgagctggacgccatcactggcgggatgaacgcggaagacctggtgattatcgcggctcgccctggcatgggtaagactgagctggcgctgaagattgccgaaggcgtggcaagcagaccgatgcctggcaccgataacctgcgcggcgtgctgattttcagcatggagatgagcaacctgcagatcgccgagcgtagcattgccgggcgcgaaaatatgtccgtcagcgttctgcgtaacccggcgaacatgggtgacgaaggctgggcgcgggtattcaacgctatctgccacctgaaagacctcgatgtctggatggtcgatgcgtcgaaactgactgttgaggagatccgcagcatcgccgaacggcacaagcaggagcatccggcactgtctctgatcctggttgactacctcggcctgatatccaagccgaaagccgaccgtaacgacctggcgatcgcccatatctccggcagcctgaaagcgatggcgaaggatttaaagtgtccggtcatctctctgagccagctttcccgtgacgttgagaagcgcccaaacaagcgcccgaccaacgccgacctgcgcgactccggcagcatcgagcaggacgcagacagcatcatcatgctctaccgcgaagccgtgtacgacgagcattccccggcagcgccatatgccgaggtcatcgtcaccaaaaaccgcttcggtacgctcggaaccgtttaccagcgattcgttaacggtcacttcatgccatgcgatcaggacgaagttcgccgcatctcaaccagcaagccatctaccagcaagcgctacacgaaaggggctgacgtatga

SEQ ID NO: 168290 - DNA, 498 bp, Enterobacter cloacae
atgagcagcagagaagcgtttgaagcatgggttgattctaacttcccattcaaaaaagaccgttttgacttgtttagaggggaatataaaagccagtttactaaacagctctggcaatcatggcaggcgagccgtgaaggtctggatgcaaaactcaaatccgcagaaaacaacgatgttgatgcacgatgccatgtcgccgaactcgaagccaagtgcgcgccgctggctgcggagctgagtgcagttgaaacaattcacaacgacgccgtgttcatcacagacgaacactatgagcaatgcccgccggaagtgcagaaaatgattcgttcactggcggtgttgcagattcctgcgtaccaggctttcctggctgaagtgcgggccagcggtgtggagatgcttgccagagaaacagaaaaactcggatggcatgaatcaacagtaagatttgtgctgaagttcgctgcccaaattcgtaaaggagcgcagtcatga

SEQ ID NO: 168291 - DNA, 456 bp, Enterobacter cloacae
atgagcaacatcgacaaacgcgtattacgtgaagcggcggagaaggcgacgcctggcaattggtggattgatagtcatgggcaggccatggtgtcgtttaccgacaacgacgtgctggaggtgtttgccaccaataacaagcgcgccgccgttcggcatgaggataccggcaatctctctcggtggcgaaacgataacgacgccacattcatcgcaacggcagaccccgccaccgtgctggcgctgctggatgagctggaagccaaagacaagcagattgctgagctggaggcgcgggaggtactgcttccgccaaaggctccagataatttggcatcttgtctggatggttatgaaaaatggctgatagccacaacgtttcgcgatacttggaacgcctgtattgctgaggttgttcgcgttaactcctcagccggtaaaggagaggcatcatga

SEQ ID NO: 168292 - DNA, 240 bp, Enterobacter cloacae
atgtcagagcatctaaagccagacacgaaactttatgatgaagcatgtaggatcgtcggtcagtgctgtcttgccctggcggaaaatggcgctgagactcatcgggaccaacttgtacatcaactaaagcgcctatcatggctgtatatgcaagaaaccaacgaaacaaaccttgccatgctttttgctattgagaagttggcgaccagcgaggactggaagaagccatacactggatga

SEQ ID NO: 168293 - DNA, 303 bp, Enterobacter cloacae
atggctgagttacgcgcaggtgggctggcgatagtcattttttcagaaaacaaacctgaaattggcagatgcgttgagttaatagaaaaagtatcgaacggatatgtatttaattttcctggtgtaggaaggcatggatggcgtgatgatgctccgggttggctagtcaaaggtaatgtgtcgatatatacaaacacaccatcaggaggattttcttacttttacagtaatgagctcatgccaatcgacggcgaggacttcaataatgaagacgagcaggagaaggagttggagcatgcataa

SEQ ID NO: 168294 - DNA, 261 bp, Enterobacter cloacae
atgagtgagttttcatcagaacaaatactgacagaggctcaggtgatttatgacgcagtttgtgattctgcgatggaaaacggcagagatttaccttggtggagtgagctggatgaaggagtcatgcagacatatctggagcaagctaaacgcaaattagcgcgcaaggctgaggctgaaaaagttctctcaaagttgaaagtaagcgatgtagttgagtggttgcagggtaaaggctacgacgtttatcaatacgaatag

SEQ ID NO: 168295 - DNA, 258 bp, Enterobacter cloacae
atgccaaactttgaatttaaaacaataaacacattctacgatgatgacattgcaagatatttaataactgaaaaaataacaaaaaaagaaaatataaatatacacaatttattaaaatcggtattgataagtagaaatatagactttaataaaattgatattttagatttatcagaagatgaaataaaagaaataaaaacatcagctgatgagattttagctgaaattgataattataaaaaagcatacaacctttaa

SEQ ID NO: 168296 - DNA, 1731 bp, Enterobacter cloacae
atgctttatgaaaatcataaagtgtttaagcatattgtcaagaagctggaagctggtgagaaggtaaattttttacctgtaaaaaaatttagcgaacttgcagacgtagcggcggcaaatgctcaaacactaaacagaagaaagaaagaaaatataagtctgtcaaagatttatcagaaaattggacagcaagacagagcgcatcgtgtcgcgttctgctgctcttaccgctatatgctcgtagacagcgaaaaacgcgctcacaacgtccatactgtgagatgtcgtgatcgacactgcagcgagtgtcaaaaaataaaaagttggatatatcaaagccgcttaaaacgcactgcgatagaaaaaattaaatctgattttaaatcagatgaatttttatttttaacattcactttaaaaaatccaaaagttacacaaatgagaaaggcgatgcgtacaatgtcgcaagcgttcggaatggttgcacgcaggaagccgttctcagacgtttttcgtggaggaataaggacttttgaagtaaccaggaattacgcagaacgtttaaaaaatcactgccatcctcacattcacgctatcgcacaaacgaaagctgacgcttttaatttgtttattgcttacattcaagcagaagaaataaaagcattaaaaaaatctttaaggaataaaagaaaaaacatcgatcttttagagaaagaaattaataaaataaataaaagatatagtaaattaacagctaataaaaaagctgaaattgttaaagttttttttgaaaaaaactggactgaatgccttaaaaaatgcgctgaaaaagagggtttgagctggaacgatgaagactacgcgaagacggaagggcgggcgattgttgacgtgaagcaagtaagagccggtggtgagccaggagcgccgattttgacgggtgaaggcttccaagagcacggcgaaaaagtgatcaattacgtgttgaagtacagcctcaaagaagacgataaacgtatattcactggcgacaaatggagtcaaatttttgactcagaaatccgtggaatgcgaatgattgcacccttcggcttgtggcgttctgagttgtcgaaagaagaagatcacgaatacgacgaaaaagaatatttcgcacgttttgaaagcgtcactgataataacgcatatcttgctaaatttgactccgaatataaaacagaaacaataacagcagcagaaataaaaagagttaaacgctcgcaattatgcttatcattagatcatctcaacaggaaatatatttcaactattaaagaattaaaagcaaaattgaacattgcattaacaaaaacatatataagcaaaaatgcagaagctgccgctataaatgaaatagtttttgaaattaataaatacaatggaagaatacgcgcaaactttgaaaaactttgtaaatatggcgaatatgttaaaggtgaacgtttttatattaaaacatatattcaggctgaaagttatttcaacaatatagatctcgaatatcaaactaatatacatctattcaaatataatggcattagcaaagatgatcgtaattttaaacatcacgttttcgagtatctggaagaatacaaaagagaaaaaattgatagctatcaattctttgatattgaaccgatagacgttgaagaatacgcagatattgaagtatgcgaagaagcaccattttaa

SEQ ID NO: 168297 - DNA, 1074 bp, Enterobacter cloacae
atggctatatttcatttgaattttaaaatactaaaacgcagcgagggaaagagttctttatatctttcagcttacaattctagaacgagattaaaagacgaaaaaacagggttagtttttaattatgaaaagaagaaagaagacttgatgcatcaagagataattcttcctgacaatgcgccattaaggtttaaagatagatccatattgtggaatgaggttgagttacaaaaacgcaaagacagtcagctcagtaggtattttatcgttgcattaccgcgagagttaacgcttgaacaaaatcataaattgctcactgattatattaaaaaaaacttcattaaaaagggaatgtgcgcagatattgcaattcataatgatgcagataataacaacccacacgctcacgtaatgcttactatgcaagatgtaaatgaaacaggatttttaaataaaaatagggaatggaataataaaaacaacgtggaaatatggaggcgttcttgggctgtttcagtgaataaatctttacgagaaaacaataaaaaagatcttgtaagtagcctttcttttttgcgccaaaaagagatattgattaaaaaagcaaatgagaatttaaacgctgataaaattgatgaagctgaaaaatatcttgaagcatataatcaaatgaaagataaaaaaccaaagaaaagaaaaagcagacagtcatatattaagagaaaaaaatttaaatcctacgcgaaaacttacgagcagcaggtagaagaaaacagaataaaaaaagaaaagaaaaaagaagaaatgaaaaaagaaaataaattgaattctttttttaaaagtattatgaataaattgaccaacaaaaataagagggaggcagaggaaaggaaaaatagagaaatagcagcaatgcaggaatggcagaagaacgaagaaaaacgcgcagaattacgcgagagattaaaaaatgaaaacttaaacaaagaggaaattaattatgtcgataaaattcacaacgccccccgaagggatcaggattacaacataccaagcgcaaaatataaaatttga

SEQ ID NO: 168298 - DNA, 408 bp, Enterobacter cloacae
atgataaaaacgaataaagattttaaaaatgatatagattgtttagctaataatatttataacttttatttagacacattgaaagaaaataattatagaatatttgccaaggacgttaattttaaattagatgaagttgatgaatatgaattaaacgcttttaaaaaatgctttaaggtttatttaaaaacagatgcgcaatttaggaaaacaaaacatattaaaagcgattgtttaagtgtttccttgccagatttttataataactattacaccgttaattttattatttataaagatcgttatagtgagtttggaaaaaaatatttagacgatatttttaatctgtttgttaaaaatatagagtacagagttaaaaataaagagaaaataaacaaaggagaataa

SEQ ID NO: 168299 - DNA, 267 bp, Enterobacter cloacae
atgacgagattaagcgtagagcaaaaaaaagaaagattgaaaagagaacttgctaaaattgaagcagaagaaaaaaaacttaaaagagcaaaagaattaaaagacttgaaaattattaatggtgaaatattaagatatacaaaaaaagattttgataattttaaaaaaattttagggctattggttttatttgaaactcaaaacgatgaatttagaaaagctgtttttacttctgctgatcgtgaaatacaaaaaagaaacaaataa

SEQ ID NO: 168300 - DNA, 321 bp, Enterobacter cloacae
atgaaaacctctgccgttatcacactcgttaccgctgtctttttgctgagcggctgtaacagtgagccctctgaacaggatctttataatgccatgaataaggtcgtggagcagacgaatgccatcgttaaatccatagcaggtaaagatgtcccgaaagacgcactgcgggaattaaaatctgtcaaaaagcatgactgcgtagaagtatcggataaaagctataaatgtaatgtgacggttgttgttgataacgaaaagcgtactgctgctgtaatccttgtcaaaacggatgatggctggcaggtcgttgataagtaa

SEQ ID NO: 168301 - DNA, 1404 bp, Enterobacter cloacae
atgaatgaaaaatcaattgatgaaatattagctgaaagacaactaaaagaatttaacgaatcgaaatttggtcagtttttcaataatcaaaaactaaaagaacaagaactaacataccttaacaataaagcattagacatagtgaatgaagaagatttattcgaaataatgtcattaatacctcaaccatttattacagaagaaaataaaaatgttgatgttttaagccttatatataataactttttagaaaataccgaaataccattaacacttcctattttttcgtttttaagttttttaagtgctttttgtgtcaaaaatgaaatcacatatacaattccattgagcgacgaaaaatcgccgcttgatacttggatcacgattttggcaccttctggaagtgcgaaaactttttcaaattcacaaataaaaaaggttataccagtaggtattgacggaaaaaaagttattgagtcaaatttcgtaaaacctaatggccctgcgaaatttatcgaagaactttcaaatcttcccgaaaccaaaaacggcgaaaatcaatatggtttttggattgaagatgaagtttcgcaaatgtttaaacaggtagaacaaatcggatctccattatctgaaattaaagaatatttgttaaaatcatatgaccatgaaaaattaacaaggaaaagcaaaaaagaaacaatagaaactaaaaatatagttttaaccctgttatttataaatacatttgaaagttatgcgaataacatttcaaatgaatcaatgacagatggtttaatgagaagatttaatctcatttatacagaaaaagacagtgaaagagatttcacagattactcattatataatttgaaaaaaataagagatgagacattacaggacaaaatatctgaattattcaactcaataaaaccagatcaaaatttcacattttcagacaattgttttaaattatatcaaaaatatttcaagattttttggcatagaaaatataaaacaattctaccagagaaagaaaacttttatagaacttacatgatgcaaagttggaaattcgcagtattttatcaccttattttaaaaagagaaggaacagaaattcagggtgattgtttagtgtttggtatgaaaatatctctactatttgccaatagtatgaaaaagttttttgatttcaaactaaataaaaaactaacaccaaagaaaaaagagaaaataaaagtagatttcacaaaatacattgaatatttaaatgaaaatacagatattacattgagaacattttgcagaaaattcaacctgaaaaaagccgattcaatatcaattttgaaaagtcttgaatgtaataattatcaacacaaacttattgaggaactggagtaa

SEQ ID NO: 168302 - DNA, 1425 bp, Enterobacter cloacae
atgatacataaacatatcggaggaaagaaaaatcagcgaagtgttaaaaattcacttgattatttattaagaactaaaaaaccagaagaacagaaatttgttgaggttttatctcaaacaaacagatctgatattgaaaatttcaacgaatacataaaagaaaaaaacttcaaaaaccctttcataactggtgttttatcttttgaagagaaagacatcgatcaagatttaaaaacaaaaatcatgaatgaatttgaagaaatgatgtttgaaggaatagaacccgaaaaccgcccaccagtgatctggatacaacacaaagataaaaacagacttgaattaaactatacaacttttaattcattaatgaataaaaaacattttcaatgttattatcatttatctgataaaaaattatttaactcattttgtgagaaaataaactatgaaaataatatcagttctgttttagatgttcaggaacataaagcaagaaatacccttgttaacactttaaataataaaataccagaagaaaaaaaggcagttgttgagaaattacaagaagagattttatcgaaaataatcacagaagaaataaacaacagagaagaattaatatcatttattcagtctaaaaacataataataaacagggttagagaaaatgctatatcaataaaatttgataaggctgataagcctatcagcttaaaaggagatatatatgaacagaacagagattacaaaacttatagaacagaatcaacaatcgatcacagagcagatcagcagtatgtcgaaaaccaactcagacaccatagagaaaattttgacacagagcttaaaaaaagacacagcagaaatagaactcgttttaagccaacacagagcaaagagcagaaaaatgttgaatacagagttaaaaaagcaaatgacagtaaaaatgttagatctgaaataccagacaataataatgttcctgttaggaatgaacctgatattgatttttttcataataataaaactatcgaggatgtaagcaatgagcaaaatttcacaaatgataaaacaaaaccaagagaagaagaaccagcaaaatttgatctatcaagagaaattgaaacagctaatacacaacaacaattcattcgttcaagagttgaagaggttggaagaaatcaacagcaattcagaaagtcgcttgatagaactcaggaacgatctggagtatgtagaagatctctacattcaattattcacaatattagaagatacgtcagaacgttttcaatccatacaagacagaatgagagaagacaaaaaatcgaacacagacaaaaaatcttccttgaaaagctcaaaaaccagcaaacacaaaacaatcaaagaagtgtcgtcagaagtagatttaaaccgtattag

SEQ ID NO: 168303 - DNA, 480 bp, Enterobacter cloacae
atggctgcattatcaccggaggttaaggcctttatagttcaggccttagcctgctttgacaccccaacgcaaattgcttctcaggtgaaacaggaattcggcctggacataagtatccagcaagtatcctcatatgatccgaccaaggcgattgcgaagaatcttggtcagaaatggatcgacctgttcaacgcgactcgctcccggttccagaccgaattaagcgacattccgatcgccaacaaagcttatcgtctccgcgcgcttgaccggatgatgaataacgccgagaagatgcgaaacattgctctggcgaccgaaatcattgagcaggcggcgaaggagtgcggcgatgcctacaccaataagcacaagtttgaacattccggcccgaatggtggcgccatccagacgatcaccatgagcaaagaggaatacaaatccgcacggcaggagatgatggaggatgacgactgctga

SEQ ID NO: 168304 - DNA, 906 bp, Enterobacter cloacae
atgaagttcaaaaatcaagtatatgaagatttagttaaagatttaattaatgacgccttttacattgaatcaagatcaaatagaggtaaaatctctacaattcgacaatattcagaagttgtcatacgcaaattatgtgacatccctcaaggcgaagaagttaccctcggtaatttcgaagttattaaaaagttaaaggccacaagttcagatgataaatttttaatgggagcagttagaaagctacaaaaattagggaataaatgcacccatacaaaaaacacaaaacctattcttgatactgatgtggattctgcaattgatgcgttgtttaagttgtatgcaagcttgtttattttgtactttaaaaagtataaatttggttcctgtaatgaaattgtgcgcgcattttccatactccctccaatcattagattttttgttctcgacaatctgtatgacagtgataaaaaaaatttactagttattgataagttatgtttggttctgctcaaagcatttgacaaaaaagatgcattaaactggctaactgaaaggaaaagtgagttatctgacatattgccgtacacgcctgaagctatttctgacattgaagttgcccatggaaaactgtatgcgaagttagttgtagctaacgctcctgctaatatgtacatttgttgcctagaccgattggaggaagtcgacttaatacttaagaagcaagggttgctttacaataactttgagcaggcaaaaccactctatttagatgaaggagttctcgataataatagtgcggagaatgaggaatttaatgacataatggaatttgtctatcttggacgaaaatccgaaataaatgaaaagcttaataaacggcatttatacagtattacggtttag

SEQ ID NO: 168305 - DNA, 273 bp, Enterobacter cloacae
gtgcttcgcttcggcatcgcggcgggcttgttctgctgcttcgcgcttaatgcgttcttcgtgatcacgctgagcctgttccgccaggcggcgctgctcttcgcggtcacggtcaaacttgtcattcatcagcagagccatttcgtggtctgcttcgatctgcgcggcgcgctggaggtcgaactcttcgttcatcacaagcgcttcggcgtgaatcgcgttcatggcttcttcagccttaatgctttcctgctcggcttcccacttggttag

SEQ ID NO: 168306 - DNA, 870 bp, Enterobacter cloacae
atgattgtcatcatgcagcggatccactaccacgacctgagcggctatctattgcgcggaggtagtggtgagaaatggcatcacctgaacctgccggtgattatcgataatagccagtcatacgctgcgcaatacccagagaacacccatgcaatacccattgaccatgggctgcctgatggatggctctggccgtttaagcataacgaatcgcaccgtgtatcgctgttttcgcaccggcgcaccgccgaagctcagtatatgcagaagcctcgacggtttaatgctgagggcgcgctgtggactgaggtgatgataagcgcggctcgcgagctgcaaattcattacgataaggttcgaacagttgtcgccattgacccgcaggcaactaatagcgatgaaagcgatgaaacggggattgttgttgccagttcatatggtactggcgataaaaagcagttctctgttgatggtgattacagcgggaaatattcaccggctggatgggcaaagaaagctatatgggcttatgagcagcatgatgccgacgcgatagttattgaaactaaccagggcggcgacatggcggaggagacgctccgcaacgccgggttcaaaggacgaatcatccgcgttcacgccagcaaaggtaagtatgcccgcgccgaaccaatatcagcgctctacgagcaaggtcgtgtcgccaaccatggcaatctctacgtgctggaaaaccagttgatggaatatatcccaaccacagccaagaaatcgccagaccgccttgatgcgatggtgtacgcgctgacagaactgaacggaactcaacctgttggcatgatgattccgaaacgccttcagggcagataa

SEQ ID NO: 168307 - DNA, 870 bp, Enterobacter cloacae
atgattgtcatcatgcagcggatccattaccacgacctgagcggctatctgctgcgtggcgggagtggagagaaatggcatcacctgaatctgccggtgattatcgacaatagtcagccatacgcagcgcagtaccctgaaaactcacacgctataccgattgaccatggcttacctgacggctggctgtggccttttaagcataatgaatcgcaccgcgtatcgctgttttcgcaccggcgcaccgccgaagctcagtatatgcagaagcctcgacggtttaatgctgagggcgcgctgtggactgaggtgatgataagcgcggctcgcgagctgcaaattcattacgataaggttcgaacagttgtcgccattgacccgcaggcaactaatagcgatgaaagcgatgaaacggggattgttgttgccagttcatatggtactggcgataaaaagcagttctctgttgatggtgattacagcgggaaatattcaccggctggatgggcaaagaaagctatatgggcttatgagcagcatgatgccgacgcgatagttattgaaactaaccagggcggcgacatggcggaggagacgctccgcaacgccgggttcaaaggacgaatcatccgcgttcacgccagcaaaggtaagtatgcccgcgccgaaccaatatcagcgctctacgagcaaggtcgtgtcgccaaccatggcaatctctacgtgctggaaaaccagttgatggaatatatcccaaccacagccaagaaatcgccagaccgccttgatgcgatggtgtacgcgctgacagaactgaacggaactcaacctgttggcatgatgattccgaaacgccttcagggcagataa

SEQ ID NO: 168308 - DNA, 459 bp, Enterobacter cloacae
gtgcttcgcttcggcatcgcggcgggcctgttctgccgcttcctgtttcagttgctcatcacgttcacgctgagcctgttccgccagacggcgctgctcttcgcggtcacggtcaaaatccttattcatcagcagggccatttcgtggtccgcttcgaacttggcagccagctcctgatcgaacctgatgttcatctccagcgcttcggcgtgcagcgcgttcatggcttcttcagccttaatgcgttcctgctcagcttcccattcggtgagtgggcggcgggtcgcatcgcgcagctcgtcgcaggcatcaacgaaacgcttaatttccgcctcagcaggacgcacagcctctttcaggcgcttcaggtactcacgaccaggcttttcgattgccgtcttactgcgggacacctgcgcagccagagaggcgacacggtcacggcctttcttcgttga

SEQ ID NO: 168309 - DNA, 210 bp, Enterobacter cloacae
atgagtgatttggagtttggcttaaaggtatacgccttatggtttgtcgggacatttctgctcgacatagcaatcaactcgctgacgaaaaaagagcatcgccagccactttcaaaactagccattgaccatgttcgcatgtattccgcaataaccattgtgggcctgattgtgtgcggtatgggctggttcttattcaaggtggtgtga

SEQ ID NO: 168310 - DNA, 558 bp, Enterobacter cloacae
atgataagcgcggctcgcgagctgcaaattcattacgataaggttcgaacagttgtcgccattgacccgcaggcaactaatagcgatgaaagcgatgaaacggggattgttgttgccagttcatatggtactggcgataaaaagcagttctctgttgatggtgattacagcgggaaatattcaccggctggatgggcaaagaaagctatatgggcttatgagcagcatgatgccgacgcgatagttattgaaactaaccagggcggcgacatggcggaggagacgctccgcaacgccgggttcaaaggacgaatcatccgcgttcacgccagcaaaggtaagtatgcccgcgccgaaccaatatcagcgctctacgagcaaggtcgtgtcgccaaccatggcaatctctacgtgctggaaaaccagttgatggaatatatcccaaccacagccaagaaatcgccagaccgccttgatgcgatggtgtacgcgctgacagaactgaacggaactcaacctgttggcatgatgattccgaaacgccttcagggcagataa

SEQ ID NO: 168311 - DNA, 435 bp, Enterobacter cloacae
gtggctgtaaaattcctgctgcgcgaccagcgcatccgccaaaacctcatcgattacatcaatcaacagccgctgaatgctgagtttcctctcgtcgtttctttctcagaccctgaccggacattgccacaaaactcactcttccacgcgctatgtggcgacgtgtcaaagcaactgcaatgggcagggaagagccggaacctctcggaatggaaggttctgtttgtctccgggcatgcggtcgcaactggcaaacccggtgaagttgtgccgggtattgagggagagttctgcgccatccgagaaagtacctcgaagatgggcattaagcgcatgaacagcctgattgagtacacgcaggcctttgccgtaggcaatggcgttcagctccgcgaagtgcgctattcgctggactatttcgggagggttgcatga

SEQ ID NO: 168312 - DNA, 276 bp, Enterobacter cloacae
atgaatgattctatcagagtgccggaagataaagattttgtatgtgcatttgtagcttcaccgaatagcttgtatgaagctattgaggcctattgtgattatgtagatccagtcgaagagatagcgtttgagcacgtgcttctttatgtgttgtgttctatactcgtcgagggtggtacagatattaccattaatgatgagttacgaatgtgtattgagcaaattgtcaatgaaaaaaatagtgccataaataataatgtggataaaaagatgtaa

SEQ ID NO: 168313 - DNA, 180 bp, Enterobacter cloacae
atggagatgcgaatcactgcgctgatcgttgtgaccggtttactgctaaccgcgctgcacggtggctggaacatatccgacatcacggtgctgtttgttgttaacctcggcaactcgctgctggccgctcgcaagagcggccttctgaatccccagcggtttttaccgcatcgcatataa

SEQ ID NO: 168314 - DNA, 1821 bp, Enterobacter cloacae
atgcgtttggataatttaattataaaaaactttagaaaattaaaagactgcacaataaactttagagatgccacgttcttaattggttcaaacaatgctggaaagtccagtgttttcagggcattgcaattactccatcaaaatattaatcctacatcagacgattattctaaatgttataaccaagaacgtgatgattacataaaagaagagactatagaaataataggggaataccataatattcctgacgaagcggaaacatggatagggtttaaaggtagaattattaggaatgaacaccctttacctggagaaacaaacaataaaattgtttacaggaaagtgtggagtattacaagcacaaaacctgaaatttatataatggagaaaaacaaaaacagaagtgaaaagtatcttgcagcgcaaactcctgcagaacttgagggcgatgattttacagttaaatttctaacagatcatttcggtgttgataatttaaatacatcgctaaatacgaaagcaaataaagaaaaagcaaacgaactaccgcaactatgggatgttgttgcagattctgcagcaacttgggtaaaaaatccaggcggcatcccaggcaatataatatctaaactgccaaaagtaattatcattccagccgaatcgtgcatgtctgaattaactagccaaaatggggctctattaagtctattaggcgatctattcaaaagtgtcagaaacagatctgataactatactcaagctcagcaacatctttctttacttgccagagaaatgaatccacaagacagggaaacagatttcggacgattgatacaagatctgaatataatggcacattctttatttccaaatgcatctatacatgtaactgcaaatttagatgatgcagataaagtaattaaaccattatttaatgttgaaatggaaagcaatgtcagaacttcagtaagttatcaaggccatggaattattaggtgcactgcttttcaattgattagatttatacaggattatttgaatacgcatgaagaatcccaaagatcaacaattctatgcttcgaagaaccagaaatatatttacaccctgctgctgcaagtcagatgagagatacaatctatcaattcgcatcgggcataagtcaaattgtagcgacaacacattcgccttacatgataaatttaggatcagatattaacttaagcctcactaaattctctgtaagcgaaaatgattttacatccactcattcttttaatcttgaacaagcattcacaagtttacaagagaatgaaaaattaaatcttaaaatgctcctgaagattgatgattatattgctagaatattctttacaaataaatgtatatttgtcgaaggtgatactgaagaagtcatggtaagagaaactattaaaagactttctccagaacaaaagtctatagctataggaaattgcgagattttgcgtgccagaggaaaggcggttatgatttcaatggctaaatacctaaatgcattaggaattgactacatcattttacacgattctgatataggaacaccaaaagcggaattaattaacccattgattttagccgaaacaggtgaggcacgtagaataatggttaataactgcatagaagatattctcggctatgacgcgccttcgaaagataaaccatataaagcatataattttatacagcaagaatggggaactgattttagtacccttcttcaaaactggcgagatatttttttaaatcttcactcaccttatcttgatcatctccgctag

SEQ ID NO: 168315 - DNA, 336 bp, Enterobacter cloacae
atgagcaaacctgatatcaagcatgtaattgtccatgaattaattaaagaaagtggaaatgattttgattatgagaatccgtttaacttaaggaaaacagagctagataaagaaaataagatagttaataagttagttgaagatgtcattaaactgtatggctcaagaggaaatacagcgcattacggtatctttaaaaaggataatgacagggggcctataccagatgaattcaataactatttttcattaacaaattatagttccaaagattttataaacctttccatatcaattatgaagcaattatttgaaagcgcaaaaggactttgttga

SEQ ID NO: 168316 - DNA, 171 bp, Enterobacter cloacae
atggcggcgcagtatcggctgccgtggatcgcggcagatgagccagtgacttaccagatatgggccagaaaagaaaaaccctctgtaaacagagggttttatcagtcttacctgcttatgacgtcgcaggaagggttatgggctttcccactcgactatcaattaaattaa

SEQ ID NO: 168317 - DNA, 501 bp, Enterobacter cloacae
gtggaagcggcgcgtgcgggcgaacagggccgtggcttcgcggttgtggcgggcgaggtgcgtacccttgcccagcgcagcgcgcaggcggcgaaagagatcaaagcgctgatcgatgattccggcgagcgcgttaacgcgggttctcagctggtaaatgaagcgggtgcgacgatggcggagatcgtcaatgcggttacgcgagtgaccgatatcatgggtgaaattgcgtctgcgtccgacgagcagagtcgcggtatcgaccaggtgggtcaggcggtggcggagatggatcgcgtcacccagcagaacgcctcgctggtagaagagtctgcggcggcagcggcggcgctggaagatcaggctgcacgcctgaacgaagcggtagcggtgtttaaaattacccgtaatcaggcggtgaaagccgcgccggtaaagacctgtgtacctaaagcgcagcccgtagcggcggcgtctgaagcgaactgggaaacgttttaa

SEQ ID NO: 168318 - DNA, 1581 bp, Enterobacter cloacae
atgtccatactggattcacggaagttggttgagaaacattccagattcaccgcttttattactgtatttatctctctgtctattattgttggcgtgaatattatacatgcaaaatataatgcggtaattaaccgggcgctggttttttcgctaatactgctgacattaaagagtatcggcaataaattaataaggaatgtgctggcagttattatattaatcccgatcgcgatagatattactttacagttatacgcatggaataattacaactctgcttttagttatggatttgcgcaaagtgtactcaatacgacgccgggtgaagccacttccatgcttggcttgtattggcgcgattgcctgatttttatcgccctctccatattattcatttataccgttaataccgggatgtggtctgttgcgccgcgttttcggcgctggcccgctattgcgcttgctgtcacgctgctggctttttatggtcaggctttacagcatcaactcaggaaaagcaatgttgaaagtctggcacagcgtgtggtttacgcaacgcccatcagtacgtcaaaagtcttcatgcaagccattgaagataacgcgatagttgccagcattggaaacaacattcctgagtatgaaatcacattatccgataccggcatcgacaattatgtgctgatcatcggggaggccgggcgtacagcaagtatggggatctatggttatcatcgggataccactccggaactacagaagcaaaagtcgcagcttttactttttcgtaatgctgtggcgcctgctccggtaacgattatgtccgtaccgctagccatgaccgcgaacactgtaaacacgcgtgatccgcataaatatggggataacatcatcaatattgcgaataaagcgggctatgaaacttactggtttagtcgtcagggcaaaggaggggctcataacaacgtcattaccgggattgcgctgaatacgaaacagcaaaaatggattgagggtggctatgacgaagatctcctgccgctgttacagaatgcgctaaaaacgtcgggcaaaaaaatgatcgttctgcatttgtacggcagtcatgaaccttcctgccaacgtttcccggccacacacgcggtattacgcggcgataatgaagccgatgactgttatgacaactcgatacgatatacagatacgctaataggcaaggtgtttagcctgttggaaaattcacgctcttccgttttatatttttccgatcatggtctgattcgcgatacgaagcgtgctgttgcgtattcccacggtaacgttaatcctccacgagagacgctgcatatcccggtgtttatctggtatgcccaccaggttgattccgataagaagtacattgcggattacaatactgtctggtctgctgaggatattaatacgctggctgagctctggcttgggatccatcgtcagggagagcctgtccagtcggtacaatcatggcttgctcattataataagaacgttactgtgctggacacgaccggcaagatccatgactggcgtaatattcattaa

SEQ ID NO: 168319 - DNA, 165 bp, Enterobacter cloacae
atgcaatgtctgcttttggcacagagcggacattttaactttgccctgccccggacatctgaacttagctttgacaaacgtcagataacgaaaattgtagccagactggtgcagtcgttattcacctgttttaagactttgttgaataaatcgaacttttgctga

SEQ ID NO: 168320 - DNA, 897 bp, Enterobacter cloacae
gtggatcttaatgctttaaaaatgtttgttcttgccgcacgtggcggtagtctttccgctgctgcgcgtaacaacaatattcctttgcccacgctcagccgcaaaatagccgagctggaaaaggagctgaactccgtgttgctcgaaaggacttccacaggttgcaggttaaccgaggccgggcaaaagttaatgaattatgcaagctcagcaatggatattctgactgatgccgaacaggctctgctgacagcatcgccccgtattacaggacatctgcgtctgacaataccccagtcacttgaggtgtggtggcagcttataaggcagtttcagaaggcttatccggatattgctatcagcgttcatacgacggagcgtcgtgtggatctcatctctgaaggcgttgatgttgcgttgagagtcggaactatcgctgacgactccgtggttattcgccaccttatggattttcgtcatattctggtcgccagcactgctcttttcagttcagcaccgcttcctgtaaaaccgtccgatcttacgggctatccctgtgcggcctggggatcggtgacaggggcacggcccgtctggatgctgggcaatcatgcctatgaagttcctgccaccttaacggtaaatgattatcttcatttgcgggcaggagcacttgagggggaatacattacagagttgccggttttctttgcagctgactatataaataatggaaagttaatcgagctgcttccagcttatccactgccttattcttcattacatctggtctataaaaggcaaggacatatctcagcctctgccagagcttatattgatttttgcagtgacaacattggcttgctgtcggctaaatgcctgataaccccctcctaa

SEQ ID NO: 168321 - DNA, 936 bp, Enterobacter cloacae
atgattaagaccgcattagaatattttggacatgattatgaattcgcacacagcatcccaggcctgccaacgaagctctcagatgtgaaaggccttgagataggatcttttcagactaacgatggcgtgaagctgacttactggaaagcgggaaaaggcaccccgttagtatttgttcccggctggtcttcaaacggagcggagtacatcaaccttattcatcttctgaaagataaatatgaagtctatgtcctcgaccagcgcaaccacgggttgtcagataaggtgacttttggcaatcggatatcacgcctttcagccgatctcaacgatatgctggtttcgctggacattcgcaaagcacacctttgtggctggtcgatgggatgttctgttatctggagctacattgacctgttcggtaacgagaaaatcgaaaaactggtgtttatcgacgaggcagcatctatttactgtcatagcgactggactgaagagcagcgtattaatgccggtgcctttacaacatcagcggaagcgatgatctcaatgtattacggtaaaggtccctcaaacaggctggttgtgaatacggatatcatggatttttacaccgtcacaggcgcgcccgcttttgaaaactcacatacttttgcagaagagatggtgccgcctgatatggtagccctggagcttgtgcttttcgaccatattcttaacgactggcgtgatgtccttactcagaaaatttcaaaccccgtgcttgtcgtatctggtgaacacagtaactgggtggaaagccagcgctggattgcagagaccgtatctgacggacgggtcattatctatgataaaaaaaataatggtgaccatttcctgcatctcaaagagccgctgacgtttacccggcaactccatgaatttctgagcaaataa

SEQ ID NO: 168322 - DNA, 585 bp, Enterobacter cloacae
atggcaggcagaccaagagagtttgacgacgagctggtaatacaggccgccatggatgcgttctggcgtaacggctttgaggcaacttcagctcaggcgcttgtcgagagtaccgggctgggccggggtagtctctatgccgcttttggtaataaagaaaacctttaccatgaagcactgcgtcggtatcaccgctccagcattgagtttcatcaggaagttttccgacagcctggaacagtcaaagatcggctgcgcatcctgcttgaaaagggcattgaactagatttcagtgaaatagagcgtaacggctgcatggccatattctcgccgcttgagagagcagctaaagataagaccgttgaggatctgagccgcagttatatcaaagagttggaagccttatttgtagcgcttttcgccactggtattgcttccggagagtttgcagcagagcgtgaaccagagaaaatggcaaaagcatttatgtgtgcctactttggctttcgggtgttcggcaggatcgtgcatgaggttgattaccaacagcatgcaattcaatcgcttatcagcagcattcagtaa

SEQ ID NO: 168323 - DNA, 1185 bp, Enterobacter cloacae
atgaacattcgtccggcgaataaactaagcacaataacgcagggggtaatcctgttatccgcgctattcagtatgaccagcgcagcgagggcggcctgtagtgtgaagaatatgacgaccgtaccctttcaatataacgtagacgaaacctacagcggaaatgaacgtccggtgggcagcacattataccgggcggcctatgcggttggctcatttggcggggataccacggtgacctgcgaccaggacaccacgttatataaatttctgaccatcaccgctgagccgctaggacagccggtaacgatggccacggattttggcactgggcccgtttatccgaccaatgtcagcggtatcgggattgtctacttttattccaacccgacgagatttatcaccctgacacagccaacatctccaacaacaataaaccttaaggcaaatacgccccagagcatggctacccagcttagcttgagtgagggcaatttcgatgtggcgcttattaaaactggccctgtggcatccggctcatcggtgtcgatatctcaggccgtccctcacttggcggtagtggtatccacaaatcagacctacgacgcctcagccatgaaagtggtgaatattccacaaagcgggtggataacggttacaacatcgacctgcgaaacgcctgacgtgtctgtgagcatgggaagtcatgatgcgaataaatttaccggaaagggttataccaccgggtggaaagatgcctcaatcgtgctgcaaaactgcccaaccttctcgggctattacgccaacaattataccgcgcaggtcatccctctggagggaggtacgccagatgaacccagcatgggacgtaatctgaacacccttactgtgtcgctgacggcgttaaacccaatagttgatacgactaaccaggtgatggggctggacagcgggaatgatgtggccacaggtattggtattcagctgggctatagcgccagtatcagtgcggtggcgacatcgccccagaccatctggtccccaggaaaaaactgggatatcgcgccaccgacggacggacgactgtcattcaaaatcccactggcagcacgttattaccagacagaggataccgtgatgccgggcaaagccaatgcaaaagtcactttcaatatcgattataagtaa

SEQ ID NO: 168324 - DNA, 666 bp, Enterobacter cloacae
atgataatgtccttatatgaaataggatatattgacaatgattttagaactgtaaaaaaagagaaagatcctacccttcgtgccacaacacaacgcgcatggatagaaaaaaatataatttctcttgtgatttctagaatattaatttctgttgtattgggtttttttctatattttaaaactgattttgcccagcagataacaatattgcttttgatggttttactgttgtgtggtttttactatcataatacattgcgttctcgatggaatgtattgacctattttattgtggttctctgccgctatataattccagttattgcatctgtaaatagtgtttattttccatatttagttccgtttattattctctcatttcctttagtccgtactattgagcatgcttgtaaagagaaatatggttttatcaaagttaagaaacttgtaaagaacccagatctttttcgtgtaaaatggtatatgttagtgacattgctcatttttacaataatgataatgcaccgtgttaacattttaatcgaattattttttctaagtatgtattttcttttgtacagaattgcaacactgtatatttccaaaacaaaacaagttatgagaaataaacatcaatcttataattgggaagacaatgaaaagtaa

SEQ ID NO: 168325 - DNA, 1242 bp, Enterobacter cloacae
atgagtgatttatataaaattgttcaactattcagaacttcaacacaagttgattttgacggtgcctgtattacgggcacagttggctattctgcattagtagacactatcttgaaaaatattatggaggagttcttttcggcaggcagattgagcgaattagaacttgacaacattaacattgaccatgcagatgattaccctaattcgtgggcaacatgccgctacactttcattattaaccaaggcgacgcaagcaaattttatttggactgcaatgattttattcaagccaactgcctttcaaaagggtgtttcccagaagagtactttattgttgaagataacttctactctcaagaggaaaagaaacccacattcatattacagcttgaaaaaatcctaacactcatttgctcgctagcgaaaattgcgcattatcatgatattaaacatgagggcggaaatagcttctatcgcctcgtatttgtgatggattctgagtcaaaatcaacctctgctgttttagaaacctctattcaagccgacattctaaacgttaataatattcaatcccagctaattaatagtcttgtagccataaacccactcacagatgctcattacgaggaaaaaataaacaccttccgaaataccctaatagaatacattataaaccataaacccagcttcactaatttggtatcaaatctggagtcaataaacaaattatactctaataatcttgcagtttatatgtctgccttctcatttcacaaagcaagaaaagaaatagcagacgcggaaattgatttcgcagaaaaaatctcgaaaacactattagacttatctaataaagtattggccataccaatttccttagtgggttctattgcattgtttaagttaattgaaactggagaaataattgttgcatttattggcattgttttaacttcaatcattatgcacttggttattatttcacaacaaaaacaatttgagagagtaattcacgctaaagaaattgtgttcacatcattattaaagaagattgacagtgaagatgaggaattgttgaaaaattctgatttagaaacgcgaatcagcgaagctaaggctcacttaaaggataatgaatcattttgtaaaaaagttttatactttttgctttctgcttcatgggtgccaacttcaattggcaccctagtagttttatataaattattagtcaaggtctaa

SEQ ID NO: 168326 - DNA, 693 bp, Enterobacter cloacae
atgattcatctagatctcagcaatattaatcaagcagcaaaaatcaactttcatctttacaatcaatatctctccgcagatgaaacagcccgtacggaactgacattcttaagttttgttagtaaaactaaggggcaatctgcatcagcttattttatctcggcgttaggatgtgataaagggatagcatcctcagcagcaacacgtgcattacctcgagaagcacgaaacttttttaaaaaagatgttgattcaaaaccctttgctgaagcatttcgtaataaagttataagatatttagatgaaacaaaccgtgccgatcaaccagcgaaacttactgacatagcagatatcgcagcagcacaattgacttcgctcgaagaagataaaagaaacgaaataattgaaggattcatgcaacatttaaataatgaaaacatgcgcattccctcagagttcgttatcaataaatccactcttgataaaataaaaaacgtatcatataaggataaactcttaagtttcaactttgataaagaattgctcggagagacaaatgatgctatggtttactatgatgaaaaaagcggaagtttaagtttcaataaacttccggccgaagcaaaaaacaagattgaggcagcgattaaagagcggaaagcggcgcttagcaaaaaaatgaataataattaa

SEQ ID NO: 168327 - DNA, 369 bp, Enterobacter cloacae
atgggggtgatcgtgaccgtctacaacatcctcccgatgggaaagccgcgcatgacgcgtgcagataaatggaagaagcgcccggaagttatgcgttatcgggctttctgcgaccatgtccggctcctgggtgtcactatgcccgaatctaattcacacattaccttcattcttccaatgccaaaaagctggagtaagaagaagcgccagcagtttgatggtaagccacaccagagtaaacctgacttcgataacctggttaaagcactctccgatgccatttatgaagatgacgctcatatctgggatgcacggattacgaagctatggggtgaagtcggtcagataattatcaggaatatcgactga

SEQ ID NO: 168328 - DNA, 945 bp, Enterobacter cloacae
gtgatttttacctctgagaaaagttttataagttggttcgttaggctggttacatttagcaaattctcccatgtaatgttatatgttaatggcactacaattcattctgtaagtggtggtgtatattcaaaaaacctccagcgactgctatttaaaaaacaagataaagttaaggttttcagacccaaaaaaaaattaaccgcagcggaacagtctaaaatttgtgaatatgcaagaaataaagttttatcagtatatgctttacttgaaacgatttatgttgttattccgtttacaagtatagctagtaaaaaacaattttgttctaggctagttgcccaatcgtacaaagctgcagggaaaataattgtaagagacccaaactactgcagtccaaaacaaataatgatgtctgactttttttatgaggtaaccgattgcataaaacctgccagcgaagaggaaattgagttcaccaaaaagtttaatccaatacaaatcattgaaaatagtacggtatctatgataaaagaagtgaggaggatatacggtaaaaaaatacaaacaattcatgacataattaagctcctaatcattcatcctgaagctgatgactccgttacatcgtcagcacataaatttggttactttgaacatgctcactttgacttaaaaataaactcatggagatataatgtaaaagattttatgaactatattaattcattggagttaaatgacaatgagatcaacagtctggctcatgaggtatataatgttgggagtgatgcagctaatgttcatgctaacgaattttatttatacactattctgtatgaaaaatacaagcttaccttcttttatgatagtatgattttatacaaaaaacttattgatactgatattttaaggaaaaatacagccatttctgtattgtcacgatag

SEQ ID NO: 168329 - DNA, 1980 bp, Enterobacter cloacae
atggctactacacctactcagaattcggttccgagcgagtccccacgcgatttgaaatttaacgccgggaaaatcgatgagtttgtaacctctctggctcttcagtacatcgaccgctttggcattgctcattacactattgaaggaatgaagcagctcgtattagagcaaatttatagccttggatggaacctgaagggctcattccaggccgggggaacagttcagaaccctggcgatctgctgcaagatacatcaaccggaatctggtatcgatgggatgacctctcttcgcttccaaaaactgtaccagcaggatcaacgccgtcatctgctggtggcactggccctgggaaatggcagcctgtcgatgtagctgatgtgctaaggaaagatcttgctaaaccttctggtgcgggattatctggttatgatgcaacagtttcatatcctgccaatactgttggtgccgaattaaacaatcgcagaaaaaatatggtgtttgcgacagcggacgccggaattcccaacgacggatctgacgtatccactcaggtttcaaccttcctgaacgccaacaaaggcaagttcattgtctttgactcaggaacctacatgttcgccggtgtcgtgctttctggtacgggctgggaaggcacgacaatttacttcaaaggcaagcatctgctgaagcctgacacaacaggtacgaacacgcctggttatggagctttcatagggttaattattccaaagggtgtagacagacttactttatattaccgaggtgaaggcaatagaacccttcagtttaacagagagcatatttttaacgttgcaatttttggcgctacaaacatcagcattcctaagtttgattgcaatgaaataaggggggacggatgttatgtaaacagcgaagatcaaaccgtgtcaacttctcagaatgcgacaaacataacatttggcgtagtgaatgggaaaaactcggctgttgatggtcgcaatctcgtttccatagtttcatgcaataggggaggtattgatactcttatttctgaaaacattggtggtgttgtaggaggtgttctacagccaggtgctttagatatagaaccaaatagccagccaggctgtctggttcgtgacttcatagtcaagagtgcaatatctgtaggcgctggaaatattcaaatggtgtctcctttggatgcgtcaccgaaaaaaatccagaactgccacattcttaaggctagcctcagaaattctaatcaatccctgaggctatatggatgccaagactcttcattaagtggtgacacaacatcctcatcagctgtcgcggcatacatcgaagggtgcataaacacatcccttgatgttcacgcaacgtcgtgcaaaaccgtagtatttgctggcttaacagcaacaaactacgattgtaaaattaaggcatttggcagaaacatcaggaatgctggtctcataacagccggatctgagaggtgcgactacgaccttgattttgatatcttcattactggaggaggagcaaacttctttgggttgtggtttagagatcaaaacaatgtaggttcattaatacagaggtcaaacagatttcgcattaggtgcaataagggtaataatggagcttacgccatccaatatacccctggaacgtctccattgacattcattggagataataaaattgagtctgacagcgtttttgatgggtggcctgattttgcccatataactggcgcggcgggtcagtacctttccaagggtgacgctatagccaacctcacattgaatagcagcatgcctacaaatggaacatggaaaattggcgacgttgtaaaaaacactcaaacatcaagctcatcacttgtgtacggatgggtaagaatggttggtggttctggaaacgtagctggcacagactggggcgtgttaaagttcacaaccacctaa

SEQ ID NO: 168330 - DNA, 189 bp, Enterobacter cloacae
atggatatagaactgctccccatgtctatctcagcgctggcggtggctatctctgtgtacgccgctgtgtcgcttcctgagcagaatttcaagcagattaagcatacaccccgcgatcaactcccacccggagtgcgaaagctcattgagaacgttgatgagcttgagcgcagggttaaattactctga

SEQ ID NO: 168331 - DNA, 261 bp, Enterobacter cloacae
atgtcttctcattcattcaatttgtcttctcttcgttctaaaaactcaccaatggcaaaaccaaccagtcctgaagagcacgcgatcgctcacgaggttttgctgattgcgattatgaaggagctgaagaacatttcaggcgacccaatgacacttattaacgttcacaagacttgctctcaaatactagacgccgctggcaggccaaactcaaaagcaatcgcagcagaccttattacagaagcgcagcaatcagagtaa

SEQ ID NO: 168332 - DNA, 231 bp, Enterobacter cloacae
atgaaactgaaaatgcacacgccggacggatcggtgattgtcgaaagtaacctggtaacgcagttctacgcagattttgaaagcggtggtgagctgaccacaatcgaaacagtatcagatacaggcgaagccatcattgtgaaggtaaatcactcaatccttcaggttacaagcgcactggccacagcttggagtgctgataaagagaaagcagaaggagccgcccaatga

SEQ ID NO: 168333 - DNA, 204 bp, Enterobacter cloacae
atgcatccaagtgagaagctgacaaagcggttctttacaaatcgacagatcgcaagcatagaaaattttaaaaataaaaaagaaaaagggattgcgaagagtctaaaggagggtgataaaaaatactttgcgcacggacaagaacggatgaaatttaatattcaccatgtgaatatgttttcacaaatgcattttttgaaatga

SEQ ID NO: 168334 - DNA, 558 bp, Enterobacter cloacae
gtggcgcgaatgaccattcgaaaagcgttagccctgcttgtgagctgggggctggtggaggtgctgcgtcagcagggaaaagaggtgcagagcaaggtcttacagttcgaagtgatgcccgcgccgcccgccatcgccagccagctgcggattcaggttgatgagcggatctatttttcaaggcgggtgcgttacgtggacggcaaaccgctgatgctggaggacagctttatgccggtgaagctgttccgcaatctttccctggcgcatctcgaagggtctaagtttgattacatcgagaaggagtgtgggatcaccatcagcggcaattacgagagcctgacgccagtgctggcagataaacagctggccggttatatgaatgtgccggaacagacgccgctgctgcgcatcacctccctttcctacagcgacagcggcgagttcctcaattattccgtgatgttccggaacaccagcgattaccaggtggactaccatctgcggcgcatccacccggaagacttattaacccatcccccggaacagcaacggtaa

SEQ ID NO: 168335 - DNA, 1752 bp, Enterobacter cloacae
atggctactggattttttctgtatcacctggataaaaccacttgtggtggacgtattctctcgggtgcacccgatgacacttacgagattggtggtgtggtacgtcagcaggttcgggaaggcgacccggtgacctgcgggaagcataaggggcgtttccgcgtctgtggcggcatgggagatacctattcggtgaacggtgccccaaaagagtgggcgggttcgctggacagtttcagctcctgcccctgccgggcccggttcgttcctacagtattttcacacacttatgaaagtgattgtaatgccagtcgcgtggcagagcgggcaagggaggcagataagaaagccctgatagcccagcaagatataatgcccacaaatagtctgccgggagccgctgctgcttctgcggcagtactggtatttgctaaatcagtacttcgcggtactggcaatactgatgcgggaacagcagacgagccacaaactaacattggggaaatgagtttctttcagtccagaccctcacagccagcccctgagccagcacagcacgcacaggccgcgaagaagaaaacttcacctccaccacctccaccaccagaaccgccgaagaaaaaatcactattcgataaagtgacaggtttcttctttggtgaagctgaagcaatgccacttcacccgcctccggttgttatgggcggttcagctgaagccggaatggcagctgcggcaggaggggctacagcaaaagcgaatcaggacgcagccaaagccctgacgcataccatgaagcacctttcaggcccggaagtcttgagcggttcgattgcgatgaatttgccgtttgttttgatgggggtgattgttcagtcaaaactcaagggtgaaaagagcgatttgctgacacatgaaaagttactggaagtcgctcacagtaagggaaccgtaccaacccgcgtacgctataactggattaccgatgatgaaaccgggcgattaaaagccgttggctatcataccagcccggagagcgcgcgtgatcaggtgaaagtcaggctgatggaaaagcgatttgacgggaaatatcgtttttggggtgatggaccgggtggaaaggtacagataacatggacacctgccgacgctccgggtaatacaaatgctggcgggtggcatacgggtaatgaagggcaaagtgctgggacggtgacgattccggggcttgagaatcccgatattcagggcgtaactatcaccacaacgccagtaccggaagagaaggattttcgggattacattctggtgtttccggggaacatacatccaccgatttacatttacctcagcaagcccccggtacaactgctggaggttaatctatacagcaactttacaggtagaccgcgcaatggtactcacgcagaccatatgccatcggcagccgcagtgagagcattcttgcgacgtcaatttcctgatgcaaaaccctctgaaattgacagcatggcgaaggatgtagcagcagtcattattccagccgaaatccaccagaagttaagtgttacttatggcggtaggaataatccggtacaaatcgagcaggattcaaaaaacttaagagcagcattagaacgagacattgaaacaataagacctgctctaaaagaacgtggcttaactgatggtcagattgatgaagccaaagctaagatgcaccaactgaatcaaggacaagggttatattaa

SEQ ID NO: 168336 - DNA, 468 bp, Enterobacter cloacae
atgagcgtaaatgttgaaaatttaatcaatagcttaggtaaaacgtatcaggaaatttttgatacggggcttattccttacaagacgaaacctacaggttatccgggagatccagaccttactttaagtatgatgaatgaaggcatttatcttgcttttaaacgagaaggtgtaattctctattctatcgaactttttttgcaaaactcaaataaagccaattatcgcttccctaacgagctaccatcaccgttagaggctgaaatggtacgttcgtgggttcatgcgcagtttggcacccctgataaatttttgccgccaagaaagcgtttacgcaaagatgttggttacacagatctctttacaattatggatttccacattccgatcagtatgcaggtcgactatgatttgcaggaacaggtaaaggaagttgcattcatcataacgtctgaagttcgctggtaa

SEQ ID NO: 168337 - DNA, 273 bp, Enterobacter cloacae
atgacgttgacgaataggactaaaaccattctccgttggggagggatttgtattgtcagcctgggttactttctcggactgtttgcagcctcgcaagcattcgagattttctcacaaaatcagacacttacctcaaacactgttacattaaaagagtattaccaagctgttgattcgcttgctcaggctacaaacggtgtttttgatgcggcaatttacggtttcgcagtctgcgtccctctgatcctgcttatcttcaaaaaagtaagatga

SEQ ID NO: 168338 - DNA, 441 bp, Enterobacter cloacae
atgtctctggaaaagggtattgataagctggtacaggagtttattgccgcaggacgaccttcctcgcgaaagcagagtattgatgaccggagaagcgggtatgtcgccagcacagcgctggccggggaaacagaaacgcgagtccaggttgaaacgcttgttcttgaggatatgacctttcgggtcttttcgcctttcaatgcccctgaaatgttaccttctgccctctactatcatgcggttgttttgtcagcggtgggtttgaaacccatgataatcagcttcgctaactggcgttttacggtaactgtcgggtcattgcggttcagtacaaactcgcacccgagcatacgttccccgctgcgcatgacgatgcagagagagcggcagatcttgtctggcaaaatgcagaacagctggagccgaccgtcagcatcctga

SEQ ID NO: 168339 - DNA, 1263 bp, Enterobacter cloacae
atgttaactgattcccgcatccgtactgcaaaatcccttgataaatcctacaagctgactgatacacacggtctgtacctgatggtttccaccacgggttcacgcttatggtatttccgctaccgctttgccggtaaagagtcccgtctggcgtttggcgcttaccctcaggtgacactggccgaagcccgcgaaaaacgtgatgcggcaagaaaactgctggcatctgatatcagcccttcccagcttcgcaaaaccgaaaaatcccccattgatgattcccgaacctttaagtttatcgctaccgaatggcacacgaataatcttgttcgctggtcagaaggtcatgcggacaaaatcctgatttgccttaagcgctatgtctttccggatgttggcgcaatggatatcaccaaaattgaaacccggcatctggctcagcttgttaaagccattgatgataaaggcgtacatgacgttgccggacgggtacgtaagcatctgaccaaaatcatgcgtcatgccgtacagcgcggttttatccgctataacccggccttcgacctcgacgacgttgtgaccccagttgtgacccaccaccaccccgccctgcccctgaaacgcctgcctgagctactggagaaaatcaacggctacaaaggccgggtactgacccggctggcgctggaactgaacctgcatgtcttcctgcgctccagcgaactgcgtctggcccgctgggatgagttcaacctgaaagcccgcatctggacagtgcccgcacaacgcgaagcggtgaaaggtgtgcggttctcggagcgtggttcaaagatgaaggatgagcacctggtgccattatctgtacaggccgtgaccctgctggagcagattaaagacatttcgggtggagcagcctttgtttttccgggtgcccattcgctggacaagccaatgagcgaaaacaccatcaacaaggcactgcgggtgattggctacgacaccaaaaccgaggtctgcggtcacggtttccgcacaatggcctgtagcgcgctgaacgagtctgcgctgtggtccaaagacgctatcgagcgacagatgagtcacaaagaacgaaacggtgtgcgggcagcctatgtgcataaggcggaacatctggaagcccgtatggaaatgatgcagtggtggtcggattatctggatgtcagccgcgaggggtatgttgcgccctatatctatgccaggcagtacacacgggcatcctga

SEQ ID NO: 168340 - DNA, 369 bp, Enterobacter cloacae
atgccactggcgcttcttgccctgacgatcagtgccttcgcaatcggcacgaccgaatttgttattgtagggcttgttcctaccattgctgatcaactcgctatttcactgccttctgccgggctgctggtatctatttatgcattaggtgtcgctgttggggcgcctgtgctgactgcactgacaggacgctttccgcgtaaacaactgttagttgctctgatggtgctcttcaccgccggcaatattctggcgtggaaagctccggactacaccacgctggtcattgcccgtctgctgacaggcctcgcgcacggtgtcttcttctctatcggttccaccattgcaaccagcctggtgccaaaatag

SEQ ID NO: 168341 - DNA, 333 bp, Enterobacter cloacae
atggcgtggaaggccaaacagcttatccgcacgcactttcatttgcccatatccacttcgcagctggcgaaagagctgcactgcaacgctgattaccttgggcgagtatttcgccggacgtttcatttaaccctgacggaggcaattcatcgccagcgcgtcagggccgctgaaaaactgttgttgaacgatgcggcctcgttaactgaagtggccgcccggtgcggttttaatgacgtgggttatttccggcagatattttcgaaacataccgggttaacgcccgccgtgtggaaacggcggtactgtaaagagcatattaattccggctaa

SEQ ID NO: 168342 - DNA, 204 bp, Enterobacter cloacae
atgccagtaaaaatcagggtgatgccggactgcatcgttattaccacccagaacacccgcgagctgtggggctgcgccgaggggctgagcatgacttacgtcaaccggcagaagatgaagctgtggttaggagagtttccgggggcgctgaatgacaccggcgacgtgccggtgattaagcgccgtgacgggcactgtatgtaa

SEQ ID NO: 168343 - DNA, 1080 bp, Enterobacter cloacae
gtgttaaataaaattgtcttagaaaattttaaaggatatgagaggttagagctagataagcttcaacgtgttaatttaatcgcaggtatgaataacactggtaaaacatctattcttgaagcgatttatttacatcatgatagaatggctgctgatgttttgattgcccctctcgcacgtcgcggagttcagcaatttgatttgtctgcagaatatatttttcatccttatttcaataattttaattatgagaaaccattcagagttataactgaagatagtggtcataaaaacattgcttcatatgctatggttgtgccagaaaaccaacgattggctataaataaaaataattttcagatgaattctgttttgtcatctgcggcagttattaataatgcgattgaaattacatacacttcagataataaacctcaggggaaggcattaattcaaattgtcaataatcaaattgaaatgaaagttgaatcagtgatgacaattaaccgtgttgttgtctttgttcccgcttcagcacgaggtaatagttttaccgatgcacaattcatgagcaaattggatatgaccaatgggctggaaacttttgtctcatacttgaagatgatcgatgctagattgcgaaatgtatcgcttctctcaattggtggtcaaccaaccatttatgtcgatgtaggattgaaaagaaaaatacccatggtaaacatgggggaaggtataagtaaactaacatctattttgactgcaatattatcgaataaaaatgctatcattttgattgatgagattgaaaatggtatacattattccttgatgccaaaaatttgggaaataattttttctgccgcgcaaaaacaaaattgtcaaatttttgccactacacatagttatgatgtcataaagggtgtttctgatttcatgcgagacaatgaactagataattcaaaaaattcatttagttacataaggctagatagaaataaagaaggcgtggttgttcctaaatattatggtccttccgccctgcttacatctgttgaacgtgattgggatattcgctaa

SEQ ID NO: 168344 - DNA, 630 bp, Enterobacter cloacae
atgccatctaaaattataaaaaacaagttgctattggttgaaggtcaggatgaaataaaattcttcactgctttcctcgcaaagtatgagattgcggatatacaaattttagaatctaaaggaaaagaccaatttcgagctgaacttgacttgattatgaatgagcgtgaatttgaagatgtaatatctgtaggcgtgatcagggatgcagatgaaagtcagcaagctgctgtagatagtatttgccatcatctccgtcaagttggattaccagttccaaatgggcattgtcagtttaaaagtgacggtgtcaggaatgtcggggtctttatcgcgccaggttttactgataaaggaatgttagagagtttgattttggaatctttaggtgatcaccccgttaaaattgcatcgggtgaatatctagataatttaaagaatttattagctcccgttaatcagacctgcgcatttaattatcctagaaatattcataaagctcatatgcatgcttttttagcaggtatggagaaatttatcccaagtgctggcctagcagctcagaagggctattataacctggattccgatgtatttaatgaagttcgtgattttttgagggggctttga

SEQ ID NO: 168345 - DNA, 537 bp, Enterobacter cloacae
atggagccggatttaaaccaagaaatctacggcctaccggaatacctgtccgcaattccttccaccctgctgaacgaatccgccactctgtttcgccgcaattattacatcaacggcagctatgtagggtttatcatgtgcaggaccgacgccgcgcagaatcacgaggatgtgaactatatctgcaaggccatgaaaagcgccaaagggcctggcaacttccgcaacctgtttatgtactcgccaaacggtaaaaaggacggcatccagatcatcccactgtcagaggtcgcagcaaaggatgagtttctgaatatcaagaacgtgagtagggacgacatgatggctgcacaccgcgttccgccgcaaatgatggggatcatgccgagtaatgttggggggtttggggatgtagagaaggccagtcgcgtctttgttcgcaacgagcttacgccactgcaaaaacgattacaggagctgaacaattggttagatctagatataatattattcaaatcatacgaactttatgaatag

SEQ ID NO: 168346 - DNA, 246 bp, Enterobacter cloacae
gtgaagcgcaacattctgaccagcacttttatcccacatccgctgctgagccagcaggctttcagccggttcatgcaggactatctggtattcggtaacgcctatcttgagaagcgcaccaaccgcctcggcggtattttgtcactgataccatcgctggcgaaatacaccaggcgcggcgtggatctggaaacatactggtttgtgcaacacggcatgaccaggcagccatatgagttcacttaa

SEQ ID NO: 168347 - DNA, 1443 bp, Enterobacter cloacae
atgagcacagtaaaatctatcgataccatttcttcatattttaacatatcgccattaattcttgatcaacttgatgttgttgatgttttattagaaacagatactctactttttattgaccctatgctccttcctgaaagtaagcataacgaaatgagattaaatgctcataatgaatatatatccactttcacaaaaatcattaaattaattaaggcatctaaggagcaaaaagacagtgacgttgcttggaaggctgccaaaaaattattttcattttccgaaataggatggacatgtttgggttatggctcatcggccaaaggctcagggttcggaccacaattagtaaacaccaccatgaatactgcctatcaaattatcaatatggatatcgatgaccctgatttatttatggtcatgtcgttatttgaagaaggaattggagctgatagaatcagtgacatgactacaaatattatatttgagtccttagtggaattttcagaaagagttaataaaacactacaaattccaacaaaagagttctcatttaagggaagtaaatacatcgccccacataatcctttaactaatacacccctaatacttgttcctaaagatattgttcgtgatttacctatatccactgactggagcggcgcagtcagtacaatgaaagaaaatacagacctacgagacaggattaatactaatattggcaaactactcgcatcaatgactcaaaaagaaaaggctgaagctaagcgcagggctttagagaaaaaagaatattttgaagatctcttagagttaataaaagaagtagaaaaagaaccttacgattttaaagctgataaaaatggagagctattttggtcaaggcttgtatcttctttagataagaaataccccttcaacctttcgaaattcaataaaaaactaacattagatgaagttgaagctttagttgatgagatattaaaccaattcaaagatctaattgaaaacaagggtctgtggaaagaaatgtgggcagatgataaaaaaccacgtaaagaaaaagcggcccaacgcttactttttgctgtcgcatattcatattgcagagctaataacttggatattagccctgaagcagactctggtaatggacctgtagacttcaaagtttcgcaaggtttcgctcagaaagttttagtagaagttaagttatcatcaaatggtaaattacttcatggatatgaaaaacaattagaaatttatagaaatggtgacgatacagatcgtgcatttttcgtaatagttgatattggtcatttaggtgaaaaatatcaaaaggttcaacaggctaaaattgcagcagttaatgaaggtttcagagcctcaaagatcattcatatcgacgcacaacaaaaagattctgctagcattcgtatataa

SEQ ID NO: 168348 - DNA, 972 bp, Enterobacter cloacae
atgtatttgaaacctttactattaatcataaatatattttttattattttttatttattttacctctataaaacaaaagcattctctatgaatgccgaaccactgacacaccaagcattatttaaagcagcactagttataccaatagtttcatttatattactaggtgggatagcctggtctggtcattcattgcaattggacggtgaaggcatgaacaattttcttaatattagcaaacttccatttgcagccctttcattatcgataccttttggagttatcgtaaacaatatacaccgaacaattcagactgataagcaaataaaagaagcagaaagtaaaaatagcatggatagattttatgcgcacaggaaaaacacaattgaaatcttacaaaacatagagctatcaactatattcgtagtaaacgatgaggttaaactggcatttgaaaacagttactctatttataaaagcttttatcctcacgcatcaataaaaagcaacgattacagttcaccgtctaaaattatagacaatgccaataaattattccttcagctcaacacacatcttagtaagactgaatttgacaccgaagaagattattatcagcatttaaattacatagagcaatgcctatatcttattcatatgcattatgaattaaaacaaattaaccctacaaaaatcttcaatttgataatagttaatgacgaaggtttaacattcgaatttagaacattaataaaaaacgaacattgtttgaaaatgaatatagcttcatattggctagttcatttaactgttgctgacctactcgaaattgagattaccaaagaggtaaaacagcaactgaatggtcttatcagatacagcatcaatgcagaagataaatacccgaagtgggcaacctcgaacttagttaatgcaactattccatgcttcaaacttataggaacttcttaa

SEQ ID NO: 168349 - DNA, 522 bp, Enterobacter cloacae
atggtttcttttctgtacccacaagaaatcaaaattcttttggatcatcttgctgagtctaatagctcaagtgttctcattatctctaaaatatgcctggctacaggggcaagatggagtgaggctgaaaatctcgaaggttcacaggttacaccatatcgcataacgtataaaaataccaaaagtggaaaagttcgctcagttccaatctctaaagaactttatgatgaaatcccaaaaaaacgcgggcgtttgtttactccatgtagaaaaacctttgaaagagttgtagaaaaagcaggtatagaacttccagaaggtcagtgtacacatgtgctacgccatacctttgcgagccacttcatgatgaacggcggaaacatacttgttttaaaagagatattaggtcattcagatataaaaatgacaatgatttatgctcactttgcgccaacacacttggaggatgctgtgaccaaaaatcctctatcaaagctgaaaccattttcagaggatatataa

SEQ ID NO: 168350 - DNA, 300 bp, Enterobacter cloacae
atgtggctcgtgacattgccggagatcattacaaataacattacccgccaggaggaaaatctgatcgtcattctgtgcagggagcgatcgtgggggccaacttctgaccattttcccgacggattgtaccgggtctcctgcataatgatactgtacctggccgataccgaacagacgaagactcaggctttcactgcaatctactggcctcaacagaaggccctgcatctgtttacagatgagttcagactggaacggcgcctgcagggacacggcttgggtagctggttcacgcagtag

SEQ ID NO: 168351 - DNA, 1998 bp, Enterobacter cloacae
atgagtgaaaatgatacaatcccgaagaagtctacaagccagattaacaaagcggtattttttacatctgctttgctgattttccttcttgttgcctttgccgccgtattcccggatgtcgccgacaaaaattttaaactacttcagcaacaaatcttcacgaatgccagctggttctacatccttgctgtggccctgattttactgagtgtcacgttcctgggactctcacgctacggtgatatcaagctgggcccggaccatgcgcagcctgatttcagctaccactcctggtttgcgatgcttttttcggcagggatggggatcggactgatgttctttggcgttgccgaacctgtaatgcattatctttcgcctcccgtcggcaccccggagaccgttgcggcagcgaaggaagcaatgcgtctgaccttcttccactggggactgcacgcatgggcaatttatgccattgtggcgctgattctggcgttcttcagttaccgtcacggtctgccgttaaccctgcgctccgcactctatcccattatcggcgatcgcatatacgggcctgtaggtcatgcggttgatattttcgctgttatcggcacggtctttggcgttgcgacctcgctgggttatggtgttttgcaggtgaatgccggtttgaaccatcttttcggggtgcccatcaatgaaacggtgcaggttattctgatcgtggtcatcacggggttagcgacgatttcagtggtgtccggcctggataagggaatacgtatcctgtctgagctcaatctgggtctggcgttgttgctcctggcgctggtcctgtgtctgggaccaaccgtgcttctgctgaagtcatttgtggaaaatacgggcggttatctttcggaactggtgagtaaaacgttcaacctttacgcgtatgagcctaagtcgagcaactggctggggggctggacattactgtactggggatggtggctttcatggtcgccgtttgtggggatgttcatcgcacgggtctcccgcgggcgaaccattcgcgagtttgtcaccggcgtgctgtttgttcccgcgggttttacgctcatgtggatgacggtgtttggtaacagcgcgatctatctcattatgaaccagggggccacagacctcgccagtaccgttcagcaggatgtggcgctggccctgtttaatttcctggagcatttcccgttctcttccgtgctgtcattcatcgcaatggcgatggtcatcgtcttctttgtcacgtctgctgattcaggggcaatggttgttgattctctggcatcaggtggagtggcaaacacacccgtctggcagcgaatattttgggcctcgctcatgggcattgtcgcaattgcgcttctccttgccggagggctaagtgcgctgcaaacagtgacaatagcgagtgcattgccattctcagtgatcttactgatatctatatacggacttttaaaagctttgcgccgggatttgaccaagcgtgaaagcctgagcatggcgacaattgctcctacggctgcacgtaacccaattccctggcagagaaggttacgcaatatcgcgtatctgccgaagcgatctcttgtgaaacgttttatggacgacgtcatccaccccgccatgacgctggttcaggaagagctgaacaagcaggggacgataagccacatcagtgacgcagtcgacgatcgtattcgtcttgaagtcgatttgggtaacgagctgaattttatatatgaagtgaggcttcgcgggtatagctcaccgaccttcgcgctcgccgcgatggataataatgagcagcagactgaacaacatagatattatcgcgctgaggtatatctcaaagaaggcggtcaaaattatgatgtgatgggctggaaccaggagcagctgattaatgacatactggaccagtacgaaaaacatctgcacttcctgcacctggttcgttaa

SEQ ID NO: 168352 - DNA, 1293 bp, Enterobacter cloacae; identical to SEQ ID NO: 144311

SEQ ID NO: 168353 - DNA, 171 bp, Enterobacter cloacae
atgatgatctcatatcaggaacttgttcgcaccttccctaatcaaagtgaatccccagatctgatgcaatttatgcaaatcaaatgctccagaagacggctggcagactatcaacaggatatctgtatggccactcttgcactctgcattccgattgacgccgcatcgtaa

SEQ ID NO: 168354 - DNA, 333 bp, Enterobacter cloacae
atgattgatattcttgaagagcttaaaagttgctttacaatgatctcccctgataaaaacactcaggaagaactgaatattttttattcatatgaaaattatgatggttatgccaatgagtttaaatcagcagtgacgttgttaagtcagacgatagagaaaaatgacaaaatagctattcaatgtgcgctaaccagagtcagaatagcttctttaaatctctctaatctttatcaggatattattgacgatgccatattgatcaataaacatgattcatggccggatattccagagagttacaggcttccagagtcgtattctaataaatga

SEQ ID NO: 168355 - DNA, 393 bp, Enterobacter cloacae
atgaacgatcccggccaccgagccgggatcttacttttatcgatcaggaaaaatgcccgttacagtgcgacgcgggagaaaggctcgcggctgagcggcgacgccgtggtggcggatatcgggcgcgacctgacgatagccagtacgcaggacagcgaccactacaacagcaggcagaacagcgtcagcggcggtgtgggttacacctttggtgcaggcggtttctcgggcagcatcaatgtcagccgcgacaaaatgaccagcgactacgactcggtgcaggagcagagcggcctgtttgcaggcagcggcgggttagccgctcatgaaaaagcaggcggtcatttgagtgatcgacatgttggaaaatctgaagcggagttattcgattga

SEQ ID NO: 168356 - DNA, 906 bp, Enterobacter cloacae
atgaaagtgtttatatgtgcgccttcttttgatgagaatagtggtggttccgtagttcttcatcgtttatgtcatattattaatgaatttagcgaacataacgcttttcttgtaaagttaaaaccaacatactcaggaaaaataacgattaaaaaaatacttcagcaattaaaatgggaagttcgctcgaagtcttgttttaaaacgcatgctgaatggaatactccgctatggaattcgaaaaaaattcctgaagatgggatagtcatatatccggaaatagttaatggcaatcctcttggggccaaacatgtcgtaagatggttactgcatcagcctggttttcatacatccatcatcaattatgaagctggcgaaatgtattataaatttaactcagctattaaagattttcagagagacgggtcgtttacatctcagcatgaattgaaagttatttattacccaattgatatatataatgaaagtaatgatgtaaaagatatagactgctgtttcatggttagaaaaggaacttataaagaaaaaatacatcccgctaatgcagtacaaattgacggtttaagtcataaagaagtagccgctattttcaagcgctctaaaaaattcatttgttatgatgattacaccgcctattcaatttttgctgtgttatgtggttgcccgtcatatgttgtaccagctcaagggcagtcgatagaagattggtatccaaatttatcggacagatatggtatttcttttggtttctcaaaagagcaagaggagtgggctcaaagcacaagagaaaatgtttataaccacattattgcagaacatcaacgatcaaatgaaacagtacttaaatgcttatctgagatgtctatatatttccatttaaagtga

SEQ ID NO: 168357 - DNA, 405 bp, Enterobacter cloacae; identical to SEQ ID NO: 143451

SEQ ID NO: 168358 - DNA, 189 bp, Enterobacter cloacae
atggatatcgcgctgctcgacaggggctggaacagaacatggtcagatacaatggtgaatctggaagcccgtaaactcgttgaaacagcaaaccggctgtcagcattctatttgcaaaatggtcttacacgtatcaagtttgtcgaagagataaggcaggtcgtagagaaagaatttgaaactgcatga

SEQ ID NO: 168359 - DNA, 282 bp, Enterobacter cloacae
atgaaaccggcggccatccaccgcccattagcgcagaagtctttttacgttcagcggcccggcttaagggcggagatgattatgagcattaaatacgcatcagtagtaattcagttggaggacgatcgcatagttcagcgcccgctgaccattgaggagagacgcttcattctcgctatcctggaagatggcggaaagttgaaggtatcgccttgcactggcgtagcgttccgcaaagggatcattgaagagattgatggcgattcccgggaggcatcatga

SEQ ID NO: 168360 - DNA, 162 bp, Enterobacter cloacae
atgctggtgtccgacatgatcgattcaaacccgagccagccgatgatggcgaagtgctacgtcaaatcctcgcaaatggccgacatgctaaaacgcagaggttttcaccttttcgacacgtcacccaaaggcacgcagatgctgtttcgcgatccaaagtaa

SEQ ID NO: 168361 - DNA, 552 bp, Enterobacter cloacae
atgtctgactactcttgccttagcattcttaaatccaaagcaaaagaattgtcccgcgttaaagggatcaagcgaaccgaagcgttggaaattgtcgctaaagaagcacagttccccagctatcatgagctttcggaagttgccaaacgcgaccctatggattcacgtctcgtctttgcaacattaggcgaaacctccctcgaagaagcaatcttcaatgagggcgtttttagcgcccttgagcgcgaagttgaggaacagctttctggcgatattgcagaaactaacgctgatggatttaccatggaagaccttgaggctacgaaagttagttacaatccagataaaggtattttgtctgtgactgtcactttcgagtatcagggagaccaagatccagatagagcttactctggtacgtctttttctgttgaagccgaaatggagctgctcttccgcaattatgagtggagccttgtggacgatagcctcaccttcctttctgtagaatcagatgtagaccgtgactggtacgacgattcagatctgtaa

SEQ ID NO: 168362 - DNA, 144 bp, Enterobacter cloacae
atgctgccgttgctaaatgaaggcccaaaggtggtaaaaccatacgtggaaatattctggagtcaacccagcaaaaaaggggccgaagcccctttgatttttgcgctaaaaagtgttggtacaatgctaggaatcaatggttaa

SEQ ID NO: 168363 - DNA, 207 bp, Enterobacter cloacae
atggaaaagaaattcatcgatctgggcttcacgatgtcagagaaaataccaagagaaactgcattggaaatcgttgctatcaagcaggttcttgcggccattttggcaaaaatgcctgacaaacgagatagcatcattgatgacttatcaggtgttgatagcgatatcatgcgagatatcgtggcgaactttaaaaaaattaagtaa

SEQ ID NO: 168364 - DNA, 207 bp, Enterobacter cloacae
atgactttagaacaacgagttgcagcattagaactggctatcgcaaatatggctgtgcagcagcgtaatgcaaatgaactgagagaaatggtgcaaaatgcggcttcggagttaataaaaaatgcttgcctcacgggtgggacaataaatgcggcccagaaacaggccgcgaaatatgaagctagtttcaatatttcaattacttaa

SEQ ID NO: 168365 - DNA, 1803 bp, Enterobacter cloacae
atgccggaattgtgcgttgaccagctcggccagcgccgtcccgtaggtttcgtcgcggatgtgccaggcttgcagccaggccagcttggcataggtcgtgccggggcacgactcggccatcttggtcaggcccaggttgatcgcgtcggccaggatcgtggtcagcagcaggttcttgtccttggccaggtcgcccgatttcaggtgcgcgaagtgccgggtaaagcccgtccactcatccacctccagcagcagttcggtgatcttgacgtgcggcaggatcatcgccgtctggtcgatcagcgcttgcgcggtgtcgggcaccgccgcatcgagcggcgtgatcttcaggccggattccgtgatgatggcgtctggcagctcgttggcctgcgccatgcggtttgcggtggcgagctgcgtttccagcagcgtcagccgctcgtgcaggtactggtcacagtcggtggtcacggccagcggcaattcgctggtctgcttgaggctggcgaacttcgcgggcggcaccaggtagtcctcgaagtccttgaactgccgcgaaccctgcacccagatgtcgcccgagcgcagcgagttcttgagttccgacagtgcgcacagctcgtagtaacgccggtcgataccggcgtcggtcatcaccaacttctgccagcgcggcttgatgaagttggtcggtgcatcggcgggcaccttgcgggcgttgtcgctgttcatgccgcgcagcacctcgatggcatcgagcacgtccttggcggcaggcgcggcccgcagcttgagcacgtcgagaaattccggcgcgtagcggcgcagcgtggcgtagctctcgccgatgcggtgcaggaaatcgaagtcatcgggctgcgcgagcgtctgcgcctcggtgacgctctcggcgaaagcgtcccaggacatgacagcctcaatggcggcgaacggatcgccgccattctgcttggcctcgatcagcgcctgcccgatgcggccgaacagccgcaccttggcattgatcgccttgccggacgcctggaattgctgctgatgcttgttcttggcggcattgaacagcttgcccaggatgcggtcgtgcaggtcgatgatttcgtcggtgacggtggccatgccctcgattgccagcgccacgagcgtggcgtagcgccgctgaggctcgaacttggccaggtcggcgggcgtcatctggccaccctcgcgggcgatcttgagcagccggttctggtgaataagccgatcgatgccggaaggcaggtcgagcgcctgccaggctttgaggcgttcgatgtgttcgagcatgtgccgcgagttcggcttggccggggactggcgcagccaggccagccaagtggtcttgccgttgtcgcggcgtttgagcagatcgtcgaggcggcggcgatgtgcgtccgacagcggttcggccaaggagtcgtagatgcgccggttggcgcgggtgatcgcttcggcacagacgcgctcgacaacatccagcgtcggcaagatgatgtgttggtgtcgcagagcgtcgaggacgctgctggccaacacgatgcccttgtcggtctgcaaggccaagtcggtcgtggcatggacagcctgccgatagtgcgccaggccgaacggctccatgcccaggtacgtccgcagttcgagcaggtgttcgcgccgggtttcctcccgctcggcatactgcggccaacacgtcgcgtcgagtcgcagttgccgtccgatccattgcagcagaggaaccggcacgacggcatcgggcagtag

SEQ ID NO: 168366 - DNA, 408 bp, Enterobacter cloacae
atgggcgcggacgtgcttgatattgagcgtgccgccgatcatcggtttcagcccgtcataggtggcgtcgcccttcgggatgtagagcttggtgtcgcccaagtcgcggatgcgcggcgcgaagcggaagcccagcaggtgcatcagaccaaagacgtgatcggtgaagcctgccgtatcggtgtagtgctcctcgatgcgcagatcggattcgtggtacagcaggccgtcgagcacgtaggtcgagtcgcgcacgccgacgttcacgaccttggtgtggaacggcgcgtactggtcggagatgtgggtgtagaacgtccgcccagggctgctgccgtatttcgggttgatgtggcccgtgctctcggccttgctgccggtacggaagttctggccatccgacgatga

SEQ ID NO: 168367 - DNA, 378 bp, Enterobacter cloacae
atgcccgttgccacgcagcgcgttcgccgctcgctccagatagaccgtgttccacagcacgatggccgctgtcaccaagttgaggccgctggcccggtagcgttgctgctcgaaactgcggtcgcggatttcacccaggcggttgaagaacacggcgcgggccagcgcgttgcgggcttcgcccttgttcagcccggcatgcacgcggcggcgcagctcgacgctttgcagccagtccaggatgaacagcgtgcgctcgatgcgccccagctcgcgcagggccacggccaggccgttctggcgtgggtagctgccgagtttccggagcatcagcgaagccgtcaccgtgccctgcttgatcgaggtggccagccgtag

SEQ ID NO: 168368 - DNA, 477 bp, Enterobacter cloacae
atgtccgaatgtctggccgctcgcgaaaatgatgagattgctcatacagcctcaaaaggctggatgattgcaggattggttggtggggccattctgggcgctgctgccgttgtcgtcactggagggaccgcgctggttgctgtttctgccgttgcggctggtgcatgtgctgcgggtgggttaggagaactcctcggcagtatgtcatgggctccacgccacacgacaggtacgctgaaagaaggttcacccaatgtttttatcaacagccgaaaggctatccgcgctcatctgtcagccggagagtgtgacgagcacagcggtagcttgcaacgggttgcggaagggtcgataaaggtttacatcaacaactttcccgcctcccgcattggcgataaattgacgtgtagcgctgagattagtcagggatcgcgtaatgtattattggtggaagcaaagttcagaccgatgaaataa

SEQ ID NO: 168369 - DNA, 177 bp, Enterobacter cloacae
atgaaattaatgatattcattaatggtagtatcaaaacataccaaaaaagcgccaactccgctaaaaagatagaaaaggaaatgctgataaatttgacccagcagctctatgctatctgcttcaggattaacaattgttgtcttgaaaaagtaaacgaggaagaaaaaaacaaataa

SEQ ID NO: 168370 - DNA, 138 bp, Enterobacter cloacae
atggagatggtgagtattatcgctgggatggcgtacttccaaaaaccgtacctgctaactcaacccctgatagctctggtggcgtttctccaggtgcatgggtcggtgttggtgatgcctcgttgcgcactgctctag

SEQ ID NO: 168371 - DNA, 159 bp, Enterobacter cloacae
atgaaactgccgcgaaacaccctgctctggtgcgtattaatagtgtgtctcacactgctgatattcacttacctgacacgtaaatcgctctgcgaaatccggtacagggacacggacagggaggtggcggcttttatggcttacgaatccgctaagtag

SEQ ID NO: 168372 - DNA, 189 bp, Enterobacter cloacae
atgggtatgttattttattaccaaggacaatgtcaccagaaccgtaatgtggagagcgcaattcattattcatttctgatgaccttacttttagttattgatgattttattaccatgcacgatatcaccgctaccatgatgagtactaacatggttaatagtctgcggtgcagttttaatctccattaa

SEQ ID NO: 168373 - DNA, 633 bp, Enterobacter cloacae
  misc_feature (600)..(609): n is a, c, g, or t
atgacttctttggttaagcgagaaattacggataaagataaacgtcagcacgcaatagatcaagactggcctacttacaggttgggtattgagtatcttggtgcaaaaaaggctggatggcggatccattggctggcgccaagcacttattctgtcgttgagatgatttataaatctgttcgagaattgacctctgggttccgtaaaacgattcagggcttcagagattctaatttcactaatatgctcccaggtaagatcgctgattttcctgatgaatggattgagcaaaattatcttgaagacatcatgtttagtggttctggtggctccaggaatgatcttggaaagagtattcggaattccattgcgaactttagcggacataaacctaaggtaatacccgttcataaacagaagaacagctggtacttcactaaagaacagttgaatgattatgtctatcagcgttacgctcaagcaaaaaactttgagcctgggcaccagtgcataatttcagccaaaaacaatggtgactgggaacacttcaattatgaagacctgatgttcatcatgccggaaggtgcatttggaattggnnnnnnnnnnagcatgtaccgagacataacataa

SEQ ID NO: 168374 - DNA, 936 bp, Enterobacter cloacae; identical to SEQ ID NO: 118628

SEQ ID NO: 168375 - DNA, 210 bp, Enterobacter cloacae
atgtttaacaaactcgcatattcagcagtcgcattgaccgtttcgcttggcaccttaatgtcctgtcaggcagaagcgatgggtaaggattactcgtcggcttttaaccaggtaaaacaaattaacgccggcgatctgaacgtcggttatgtcgatatcgggccgaaagacggtaagcgtcaagccactgccgcctgttgcgattactaa

SEQ ID NO: 168376 - DNA, 240 bp, Enterobacter cloacae
atgaattttcaaactaacgaagtttttaataaatttgctgctgttataaaatcgctcgtccttcaggaacgtgtttgttgcgttgtgacaaatatttctatccgaaatattatcttcgttgccgtggagattataagtcattcatatatgtccatcttgatctacatagtggtgaagctaaagaaatcacatgggagcaagcagacgatatgctgtctagtccaggaaaacccccattaa

SEQ ID NO: 168377 - DNA, 351 bp, Enterobacter cloacae; identical to SEQ ID NO: 159238

SEQ ID NO: 168378 - DNA, 2136 bp, Enterobacter cloacae
atgttttatgaactgtcagatactaacataacgctgttttttgaacatcctagacgcgagaagccctctttcgctcggttaacctttcgtgatacaaatataccacccgataagcttgaacttatacttaatactttggtgaaattcactcaaggtcaaaggtataatacacaacgccttggtgtcataaattttcttaaaccccttattgctttctatcgacaaagtgattcgaaatggccatgcagaacaaatgattggcagattttttggttatgtttttttcggttttacttaactgatacggggtggtccaaggcttcacctaataccagaatgagtcattgggcaactattgttgtgagaatttctgattttttaattttggatgaaattttcccaagggagattgttgttccagttattgaaagaaaactcttaaaatccctgacatcatcacaaatgctgcttgggcaagactcaccaagactagtacctcctaaccacgccccccagaagcttcttgttgatattgattttcaaatgaatgatgcagatttccttaaaaacattgaagattcctgccgaaagaaagtatccgtagtaaagaatgtctgcattgagcactggacttgtcttatgaaagatggagaaaaaggaaaggaaattggatctcaagtatcagatgatgaaattgagaatattattcagtccggaagatatgtaacggggctgagagggggatatgaatctcctattgccagtaccgcacaacctgacggcttcaaatgggcgctcgctgtggtgaggtacttgctttcgaagggacaaagtgaagattgtatatcaaagaaaacattgaggaaaaatccttttttcaatacgtcagtgtttagttcaagatattatgaacaacttctttctctgacacatatgtcggaagaacaatcttcaacatatgaaaaatttcagatattttgcaggtttgcaggaattctatcccctctagatgtaacagcagcaagttgtcttttaacaatagaacatccctcttttacttctgagtcattgcaggatgcaaaacttttaaattcctctggaaaatcatatcttcttctttcagaccgagagcaattttcaattcttagcgttgataaacctcgagcaggtagcagaaaaacagtagtgctaacatcgatatcgcaaaagattattgaggatgttataagatggactgcacctgtgcgctcaattttgaaaaaaagtggaaataaatattggcgccatctctttctaggggtaaaggggggagggattttaggaaacctagcgggtcatactcgttttataggacatgaggataagtgtgttagtcttacacgcttgtttcctgtccttaaagaagaggggctgataactggtcgctttgatttccgacgaattcgtaacacagttggcatacttaaatggtttgaaaccggttcagtaaaagaaatgagccgtacacttggaaattcatcacgtgtggttgtcgaacattatctacctcctgcacttatgcatgcatggaattgcagaattattagacgttttcaaaatactttaataattcttgcagcctattcagaagattatctggcatctgttagtgatttttcgaatatggaggaccttcaggtttttatcgaacaattacttacggattatccttcaggaacaagcccactggcgaatgaagtgcagtttcgtctggcaaatgattccatagatagtgacacgaagaaaacattatcttcatctggcgtgttgaatatacgtctgtctgttaccagtctgagttatctctatgcattcagtgattttgcacaaataaaattatcaaatgatgcactaatacacaaaggcagaatgacgaatgtttctcctgaacagttagttgagttagccaggatgctgcgtcatgcatgtgagagccctgaattaagagcagatctgagtgagttacttgatatggcacaactacgaagcattcatttgcaggcgcttgcagcactaccggccttgaaaactcgtttttctcaattctcgttatgtgatagctggggggagtatgaaagaactggcagcattaattga

SEQ ID NO: 168379 - DNA, 2196 bp, Enterobacter cloacae
atgaaagaactggcagcattaattgataatctcccacttccgaaattacccgaatattttagtgttgaagatggacaagtggtaatgttagcctgggagtcagcccgtcagcaagcacgtccctacgataaagaatatgtcgcaccatggctaatttcaccatttgatgacgatgtctgggtaacaaccaatcgtaatcgtgaggagcaggtagatggaaagtgggaaaatgtaatacgaattgactggcgaattcctatgccagatggattattacttaccgacccatcatatgaaaatctgcttaatataaacaaaaaaatagctttccttgtccgctcaggatacgtttccagaatttcttcaccgattagttggcatgccatggttcatgtacaaatacaattaactagatgggtggttcttcataaatcccgtttccagccccataatttcgggtttcgcctgttagatcaggacgctcttgaatatttattaatgttactttcaagggatggttggataggtgcgcatcaggtaatagagcgcgttctctctcatctctatcagtcagtatatggcgagcgctgccctgaagaattgcattctaggccatttcaattaccttctaaaattatcgatgattttatttcttggttaaatagacataattgctacaccgtcatccactgtggtgtttatactggaaaaagttatttgaagcgagaaacccttggaaatttaatctgccaccccgggcttaaaacatgtgctaatctgaagtttgaggcgttttgcagacaatttgaaccagatttgtggcatgatactttgcttacgggagcttttcagatgaccgaaaagccatcgcataaggtaatgacttttaatgaaatcattgagcgagggatggcttcagataccttaaagacacagatgaagcagctgactataattttttcagctcatcgccatgaaccagaatggcttcctgaacctgaatttttgtcctttcgtcgggctgaaaatctggccatgcgaaatacgtatttttcctcgcaccaccgttttatacctgttaacaccgggttcgcatatctaaatgaagcaatgcgtttcattgagatctacggacgcccacttattgattattatttatatgttgtgtcaactcgaacgaaattaaccacgctagaggaattgaatgctactgccttacgcgtggcatcaaagtggaaaatcgcaaatggggagcagcttgcttctgtgctgaacatatccggtttttacagaaaaaaccgccggacgagtttcgataaaataagaacggagcccacacttcaggaatgcattcatgtacttgtcggagcgtgtgcgattgttatgggtatgcttaagccttctcgtgagaatgaacttacacatcttaagcgtgactgtttatggcataacaaacaggggtattttatccatttctctttaagtaagcagaatgctggagaaacattaagacaaacacaccgtccaataccttctattatggcaaaggccattcatcttcttcagcatctaggcagtaatttgtcagaaatttatcaagaaacacgaaaagttcgggataatttattttatattccatcatatgatggaacccctctacctatggctgctaactctgcgctaatcaacaagaacctgaatattttctgcgattttgtcaaccttccagcagacgaatacggacgtagatggtatgcccgaattcatgaaatgcgtaaatggtttcttctactgttattctggtcggggcgctatgatgtcctggacgcagtaaggtggattgccgggcactcccgggtaacggatacttatgcatacattgagcgtgaatgtccgggtgaagagcttcctcaaatggaagctgaatatagcatcgaaaggcttcgcgaacttgaagcacataagcaaaggcaggcaagtaatgaaacgggacttgatatgctgtatgaacgggtcctgagctattttggagttgaatcccttacaatggtccctgaatgtgaatggaaggattatgtgtatacgcttcgcaaagcaaagggattccatcttgtcccccattcagtatatgcttctaatggaaaagacaggatcggaatcaatatttcatttatgatttcggaagaggtcttatga

SEQ ID NO: 168380 - DNA, 597 bp, Enterobacter cloacae
atgaatattcacagaccgatgcagagaaaagagaagaatctgcaaaatgtacaggctcgttatcgcctgctaaaggatgctcagtcactggatgatttaccctcggttgtcgttaaggcgctgtcaggtcagagagcattcgctgcactctctataccttcacttaatatttatccgttagcactgaatactttaaaacgtctcgcagacgaattatacccgcgtcccgatgtggatggataccagggatttaaacaacttaattcctttcgtatgaagtttttattgctgttatctaaagaaaaagatagacaatcaaaaaagccagtgcttatatctatcgataaagaaaagtggttagatataatacaccgccttgaggcttcggaaaaacaaaatatgcacaaaacccgcgcctattacgatctctttacgcgactgaatacacttgttaaatcaggtgtaatggaagaacccacccggttaagactatatcagctgctagattcccactatatgcaatattctcgcttgtttgctcctgaagttcagggggataacaacggtagcgtagctgactttctcaggcgaaaataa

SEQ ID NO: 168381 - DNA, 1476 bp, Enterobacter cloacae
atgcctcgtcaacttttccgtaccggccatgtttctctgccgctggcaggaattcatacaactccgtcacatccagtgcagcaacaacatattgcagattgtccctttatgtactggccagatggtaagccctgcgagagcgttaatatgtattttttagatattgcttcctcaagtacgggaggctcactgaaaacgtacgcatctgaactaagtcatattgtacgctactgcggtgaaagacagttgagcatagtcgacctgagagatgaccatatttttgagttttcaaaaaaattgcaaaatgatgcatcggaaaaatatgccagcgcaagagccagaaataacaatacggtcaggacggtgttaagacgtacgctgattttcctcatgtggtaccagagcaaactggtacctttattacgtacacctctcgttggtgaggcatccaaatcaccccagataattatttcgttcaaaaaaaacaggcataaaaaaaatatatggagtgaaagtgccgttttccatgcggcaatgccctgttccgaaagcaaagaaccaaaacaccctataggtcatactgtaattgaagatattgagcgaagtattgacgcgctatgtttgatgaggcagccatcggcctcctggtcgtctgtcccgttgaaaatcgctgcctcgcatgggtacatacgttcacgacggcattttatgatatggctgatgaaacgtactgggttaagagctgctgaaatggtcgatatgaacgtaaaaaaacattcagacattttgcatattcaccggttgtatatacctacgcgtaaacggcgtcgtgaaattatccctgagcgaatttttcctgtaactttgcgggatgcgctcatttttcagcgctacctcacctcccgacaggcatttattcaaagtctctgtgacgaaaaatattactaccctgtcccggacgctatgtttcttggcactgatggcaaagcaatacaaaaaacttctctggagagagattttgcaaggttagttagttttgcgggatacacagatgttcaggtttgtatgagcatgttccgacatcggttcataacaattgaagtggttgttcatctgcgtgagtttatgagcggttcaggtaaatccggaaaaatgatgacttctgacgattacgagtcaattcttaaacgcgtaagcgctaaaactggccatgcctcggtacaaagcctgtggcattacatcgatctggcctggcgagaaatggatgtctgggggaatgtcgataaggccctttcccgggtgcgtgccacggattgcctgcacgaagatttacaggcgctgctatatgatgttgtcgctcagaaggaagtactgcccgacacccagcagatgttaaatgatatcatttcgcggcttcagagtattcttgctgatagtgtacaaaataatttaaaggatgaggataggggaaattga

SEQ ID NO: 168382 - DNA, 894 bp, Enterobacter cloacae
atgctctgtaaaattttgagaccaactcatatcaaagaacggctcatgctaaaaaatcaaaatctaccttttctggcggcctttgccggaatggtttcagtacaaactggcgctgctttcgccaaaacactgttcccggttgtaggcagcgaaggtgtggccgcgctgcgcctgggtatttcttccctcgttctgcttatgatttttcgtccgtggaccttacgcatcagtgagatttcatttggggcaatggctctttatggtatcgtactcgccatgatgaaccttcttatttatcgtgcgtttgcttatatccctgtcagtattgccatctccattgaggtgatgggccccctggttgccgccatgctgacgtcccggcaaaaaaaagatttgctgtgggccctgctgtcagttgttggcctgtttctgctcgccgcgggcgatattcataaagttattgatattcgcggcgtggcattttctgttgccgctgcgtttttctggggactttatgtcattgtgggtaaaagagtgtcgaacggaggaggacgctctgtcgcggcaggcatgaccgtcgcggccctgatcgctgttccactcgggacggctcaggccgggaactcgctatttttacccggcgtgcttcttacgggtctttgcgtggcgatcctgtcaagtatgctaccgtttctgctggatatatacgccatgcgctggcttccctcccgcgtgttcggggttttgttgagcggttctccagcggtcagcgcgcttgccggatggattatcctgaatgaaaagctgagcctgatgcagtgcggaggtattctgtccgttatggcagcctgtgcaggctgtgcgctgtttgcccgtccgcgaacgctatcctga

SEQ ID NO: 168383 - DNA, 501 bp, Enterobacter cloacae
atgagaaaaaaaattacacgaaatgaactggaccgttttgatttgtccatacttaacatcctgcagataaataaccgcctccctcattcggccatagctgaaaagattggactttcaacgccctccgtacagcgccgtattagccggctggaagaaaaaggtgtcatcagggccaatattgccgtcattgacccgtcacacgtcggtaatcctgtcacggcagtgattgaatcccgtctcgttgaggaccggagtatcgtgatggatagggctaaacgctattttcgtagcgttgacgaaatccaacagtgctatttcgtcaatggtggcgtgtcgtttattatcattatgattgcacgcgacctgcaacattttgagcgtcttgtcaggcagcactttgcggataaccaggacattctgacctaccggacacttatcgttctcgatacggtcaagacgggcatgaatgttccacttttcgatcctgaagccccgccctga

SEQ ID NO: 168384 - DNA, 558 bp, Enterobacter cloacae
atgtctcattcagtaaaacctcagacttctgccgatgccatcagtaatattcgtgaagccgtacgcaacgaaccagagcttggaaacatgtcatttcaggtaacagcccactcacatggcggacttgccgtccgtgctgaaaccggctcgtccttccagaacggtaaagaagaccgcagccgtgtgggaaaattttccaacattggcgatgagccaccgggtctgttgggaaccgacagagggatgagtccgactgaatacattctgcaggcactggctggctgctataccgcttcgctcactctgatggccgctgagaaaggggtcgaactggacctgatagaacttgatctttattttgatatcgacatgaaaggattccttggtctggacaaaaatgttcgtaaaggagccaaaggtatccgtgtggacgtgcgtctgaaaagcagcactgcgagccatgaacagctggaggaactggtccgtctcttacctgagaattcacctattcatgacacgcttgcaaacccggtaccgatcgaaacacgtctggtgtaa

SEQ ID NO: 168385 - DNA, 753 bp, Enterobacter cloacae
atgaaaaaagaaaagtttgtttttgaaaataaccaggggcaaaagctttctgctctgttagagatgcctgataaagtcagggcatttgccttatttgctcactgttttacctgtggcaaagatctgaaagcggcatcgcgtattgcccgagtactgacgcagcatggcatttctgttcttcggttcgattttaccggactaggtggcagtgacggcgacttttcaaataccaactttagttcgaacgttgaggatctcaggtcggctgctgcgcaccttagagataactttcaggcaccttcacttttaatcggccacagcctcggtggctcagccattctgtctgttgcaggtgatattccggaagcaaaagctgtcgtcacgatcggctcacccggagagatatcccatgtaaagcggctatttgaggatgacctgtacgccattgaaaaacttggcgcatttccagttcatcttgccggtcgtacgttcctaatccgacagcaactggttgatgacattcagcagcaaaaaatatcagaaaaagtgttcagaatgaataagcctcttcttgtttttcatgcgcctgaggatgatacggttctgattgaacaggctgaacatatatttaaatcagccagacacccgaaaagttttatttctctacacggagcagaccatcttctttctgataataaagactccgaatatgtaggtgaatgcatcgtgtcatggagttctcggtatctctaa

SEQ ID NO: 168386 - DNA, 834 bp, Enterobacter cloacae
atgtacagccgagtatttctggcaatggtggcttttgctgctaattcagtattgtgccgttttgcacttaaccagcagcatatagatcccgtctctttcagtgggctcaggataaccggtggtgcaatcatgcttggttttatgctcatgctgtcccgtccgcgacaaccttctgaactgagctggatcaactccttgctgctgtcagtgtacatattcgccttttctatggcttacgtggcaatggataccggaacaggtgccctgattttattcggtacggttcagctgattatgacggcctggggcctttatagcggcgaaaaaatgacgtcgataaaagcaacggggctggctctggctgtcacagggattgccattttgcttctacccggggccagagcgccatcattattcgctgctttactgatggcgatatccggcgtggcctgggcagcgtattgcataaccggaaaaaaagtcaggtatgcaaccaatgctactgccgccaattttattatggctgcgccctttgctgcgctattcatgctgctgtacaggcatgatctgcatgcggacagtgccggtattctcctggcggtcacatccggtgccattacgtctgcccttgcctacgtactctggtattcgatcctgcccagccttacatcgacaatggcctcaacagtgcagctcagcgttccgtgtcttgcggtactgggaggcatactgtttatgggagaggttctggatttccatatcattctgagcaccgtcatcatcctgggaggaattagcctggtgataggctctgaaaagtggcataagtcctga

SEQ ID NO: 168387 - DNA, 552 bp, Enterobacter cloacae
atgtacatatacatgaataatgccgtacctgaccccctgcttcatcagtcaggcagcagcacagatgaacaggttcccggaaaggcggtattcaacgttagtacgttctggcagggtggtctgaaaagtgagtctgtctgtaatgcatcaatcattaatggacaaacgcaggccggaagaggccataaactttcctctgatgaacccgaactgcttggcggcaatggttcggcacccggccctcaggagctcctgcttgcagctttcaatgcatgccttaccgcagcatatgtgacagcagcgcgagcggaaaatgtgcttatcgataagctgaatatcaccacgtcaggcgaacttgatgtgagtcgatttcttggactggattctggtgaggaacccataccagaaacgctgcgctatgtgatcaccgtaagcggttccggctctgtttgccagttcgagagaatacatcagtccgtcatagcaacatcgcctaatcgatggattatcggtaaagggatgctcatcgaaggtgatcagatcattgagtaa

SEQ ID NO: 168388 - DNA, 777 bp, Enterobacter cloacae
atgacagcactattttctggtaaaaaacttctggtcgttggcggcacaagcggtatgggctttgaaactgcccgtcaggttcttaaaaatggcggcagtgtggtgctggtggggaatcgtcaggataaagctgaggaggcacgccgtacgctgtcaaccgaaggacaggtctcgatcatcgtcgccgatcttatgaaagaagaaggcatgaaacacgtgactgacgttatcaaccgcgaacacaaagacatcagcttgatggttaacgcggccggagttttctttccaaaaccttttactgagcatgaagaagcggattacgacatgtatatgtccattaaccgtgcttcgttcttcattacccgtgatgtcgttcgtaatatggtaagcggaaatatcaaaggctctatcgtgaatatcggctccatgtgggcgcagcaggctattggcgcaacgccgtcatccgcctattcaatggcgaaagctggcctccatgccctgaccaaaaacctggccgtagaactgggtgaaaaagggatccgcgtaaatgccgtttcaccggcagtggttcatacgcctatttatgaaggatttattccaaaagatgacgttaaaagcgtcatgaatagcttcgacagcttccatccgattggccgtgtcggtactccgcaggatgttgccgaagctgtatgcttcctgctgtctgagaaagccggttgggttactggtgccgtttgggatgttgatggtggcgtaatggctggccgcaacgcctga

SEQ ID NO: 168389 - DNA, 927 bp, Enterobacter cloacae
atgcgatcacttaacagacttaaatggctacatgccttcgaagcaacggcgcgtcacggaagttttaaaggggcagctgacgagctgggcgtgacgcctgctgcggttggccagctggttcgggcgctggaagagtgggttggacatcctctcctgctgcgctcccgcagtggcaaatcacgtttaacactcgtaagtgaggcgcaggatgcattaaaggatatttcgcacggcctggatgagcttgaatcaggtctgaacaagctacgcggacgcagagcacgctccgttattgtattaacagcctcccaggtcctgctgatgaactggctgatggaacgcctcaaccgtttttcagagcaacatcagaatatcgacattcgtctggacgtgacggaaaggttatctgatgtgattcatggagaggccgatcttggggtcagatgtgggcccggggactggccgggcctgagcaaaacctggctcatggacgaggaagccgtcattgtctgcagtccccggcttctggcgtcaggagtcagccccacaccgcaatggctggcaaatgaaaaacgtatacaggacgatacgccacatccgggtgcaggatttccttcctgggagaccattttcaaacggatccaggcaccgccgtcagggagcacaaacttgcacatcaactcaacggcaacagtgataatgaccgctctcagcggacgaggcgtggcggttgtcagacgcgcgctggttcagcaactgattgacaccggccaactgatattacttttcccggaacatcgctggcccctgacgtggtcttattatcttgtcatgtcagagcaatcaagaatgcgtccggaagtaaaagtgctgcacgactggcttgttcaggacgtcagtgacagccttgtcagggattcaggttaa

SEQ ID NO: 168390 - DNA, 936 bp, Enterobacter cloacae
atgaaaatccctgtccatctcaatgcattgcgtgcgttcgaagccagcgcacgtcatcaaagtttttccctggcagcagaagagctacatgtcactccggcagcggtcggacaactcgtcagaacacttgaagatacggtgggctatccgctcttccagagaagtggcaaccgccgggcaggcctgattctgactgaatcggcattaggagccttgcctgatattcaggcgggttttgacagactgagtatgggcatgacacggctgcgggaaggcgctactgacggagtcctgaacgtaaccctgagccctgcgcttgcggcaaaatggttgctaccgcgtattgaggattttcagaatcgctggccagatattgacatccggctccatacctatttgaaactacttgattttaatacacaagccatcgatattggcatacgctatggaagcggtaaatgggaaggagtggagtccgaactgctgatgtcggaggatgtttttccggtatgctccccgtcactactgaaggccaatccggtggtgaactgcctgaccggcgtcacctctcagatccttattcatgacctatcaatggagagtcataaagattttctgacctgggaacactggctaaaccattttaacaagcatgaaatagcacgccgtcccggactacgaatcaatagttctgctgcagtactacaggcggcagctgaaggtcagggcattgcgcttgcgcgcagcatcatggttcaggatgatatcagaagtggacgcctggtacggttgtgtcccgaggtttgtctgacatcgccgctcgcatattatcttgtctatcgttccggttgtgaaaatctgcccaagatttcacttttcaggcagtggatgcatgagcaagccagggcggctataaatcttaacctgaatccctga

SEQ ID NO: 168391 - DNA, 282 bp, Enterobacter cloacae
atggcttatctgcaaattacgctcaatatcagtgaaaaaaaccgtgaagctgccgccgggatatatcagaaatacaaagcccctttcctgaaagacattgatggtgctgtttctaaggaacttctcgtgcgaaaagaagacgtccaggttttacatggctttaattctgaaaaacaggccgaagcttacctgacctcttcgctgttcacacacgatgtggttgaagggctgaaaccttatctcaacagtgccccggatattcgtatttacactgtcgcttaa

SEQ ID NO: 168392 - DNA, 345 bp, Enterobacter cloacae
atgcttttagactggaatggccaccgtgatgaactgctcggtgttgtaggcgaatacgcgaaactgcagccagagtttatgaaaggtctgatgaaaatggatgccggtgcttcggctatgggacatctggataagaaaactcatgagcttatcgcgctggccgtagcgatcaccactcgctgcgacggatgtctgtcagttcatgttaaagctgcggctaaacagggcgccactcgtgaagaaattgctgaggcactcgccgtcgcgatttctctgaataccggcgctgcactgacctatacggcacatgcgcttgatgcgtttgatgcattaccaaaagagtaa

SEQ ID NO: 168393 - DNA, 684 bp, Enterobacter cloacae
atgttagttaatcacgatttcgcccgccgggcttctgttagacccacagaatacgactgggtttcatccccccgggctggggtcgatcgtgtcatgcttgatcgaataggcgcagaaaaagcgcgtgcgaccagcatcgttaaatatcagcccgggtctcattttcctgaacatcatcatccggatggagaggaaattctggtgctttccggaattttttcagagggcaaggatcattatcctgcaggctggtatatgcgaaatccccctgattcagcacatcagccttcaagcagtgtcggtgcaatgatttttgtgaagctccggcagatggaccagggagagcacgcccacgtaaggctggacacgaacgacagtgataactggcataaagtcgcaagtggtgaagaatgtccgcttttcagcaatgcgcatgaaaaagtgatgctccgccgtcttcttcctcatagccccgtttcgatggacgcggttaccggaggtgcggaaattctggtgcttagcggtacgcttcatgaaaagagagtgatgtggcctgcaggcagctggctcaggtttccttcaggcgaccggactgaactgatgtccggagataccagcacgctaatttaccttaaaaccggccatctggaacacgacgcttatacggggcttcatcatgaataa

SEQ ID NO: 168394 - DNA, 834 bp, Enterobacter cloacae
atgctctatgagcgtacacatcatcagccaccctcccgtcatccgggctacgtctcctccccaccgtctatgcgagtagcaggtgggatgcgcctgcttacggaacggctggaagagcggataaactctgagcgtctttacactgatacgcgtgtagtacgcattgaaaaagcgggcagggagattcagattcatacgatttcatctgaagagatttgtcgggaatttacagtgggtaacgtcctgctggcccttccacccgcgcttgcagtaaatatcgaatactatccggcgctgcctgcccggttatcagaagagtgggctaacacgggaacctggatggccccgcatgccaaatatgtggctatttatcaggatgatttctggcatcaggcgggactgtcaggcgaagcccggagtgctgtggggcctatggccgagatccatgatgcttctgttcctggcagtgtttacgctctctttggattcttgggcgttccggcacgagcccgctggaccacaagtgaagaaaatcttaagtcattatgccgtgcacagttaacccgtctgttcggtgagaaagcatcagcgcccgttgctgaatattttaaagactgggcagacgatccttataccgcaacggcaaaggatttacttattcaggcagggcatacggtgcctgccgcttttcctgctatgggaccatgggcgggcagtttgtgtggaattgcaagtgaatggtcagaccaatttccgggataccttgcaggtgcagtagatgcttccctggaaggcgtcaggcaggtgcagcaaaaaatagtccaagataactga

SEQ ID NO: 168395 - DNA, 1356 bp, Enterobacter cloacae
atgacccgacattttgattacattgccattggcggcggcagcgcaggaatcgcctccgtaaatcgcgcggctgcacatggaaaaaaatgtgcccttattgaaaaaggccccattgggggcacctgtgtgaatgtgggatgtgtgccaaaaaaagttatgtggtatgccgcacaggtggcagatgcaatcagaacttatggtcccgattatggtttcagggtatccggatatgaattcgactgggccactcttgtcaggaatcgcagcgagtacattgaacggatccatggttcctacgatgcagtactcagcagaaacgctgttgaagtcattcatgggaaagcacgattcacaggccgtaaaagtattgaagtcaacggtgaaacgctaacggcagatcatattcttatcgccacgggggggcatcctgttcgtccttcagtacccggtgctgaactgggaattgattcggacgggttcttcgaactgaatgcattgccacgcaaagtggccgttattggcgctggctacattgcagttgaactcgctggcgttctgcaatctcttggctcggaaacacatcttcttgttcgtggtgataaacctcttcgtcattttgacccgatgctcggggattctctggctgcaatgatggatgagtcagggatccatcttcaccgacatgccattactgctgccctctcaaaagagcaggatggttcagtgacaattaccacagactccggagagaaaattgttgtggatgttgtgatatgggcaacaggccgcaaacctaatacgtccggcttaaatatcgaagcggcagaggttgctctcagtgaagagggttacatcattgtggataaataccagaatacatcggctgaaggcatctatgcagttggcgatattaccggtcagcttgagctaacccctgttgccgttgcggccggtcgtcgcctttccgaacgtctgttcaacagcaagcccgatgaacatcttgattaccataacgttcccactgtcgtattcagccaccctcccataggtacagttggactaactgagcctcaggcccgtgaaaaattcggtgatcaaaacgtcaaaatctacagtgcatcgttcacttccatgtttactgccattacccatcatcgtcaggctaccaggatgaaactggtatgcgtcgggctcgaagagaaaattgtgggcattcatggcattggagaaggaatggacgaaatccttcagggatttgcggtggcactgaaaatgggcgcaacaaagagggatttggataataccgtggccattcatccaaccgcagctgaagagtttgtcaccatgaagggctga

SEQ ID NO: 168396 - DNA, 753 bp, Enterobacter cloacae
atgagactactcaataaaacagccgttattacgggtgccaccagcggaatcgggcttgccaccgctgagatctttatcagagagggtgcacaagtgatccttatcggacgtaatcaagcacgtctggaatacctcaaaagaaagctcggtcaggccgcctcgattatttctgctgacgttaataacgatggagaccttatacgggcacgcgagttgattcaggatcagtttggtgaaaaaagcatcgacatatttttcattaatgctggcattgcctactcaacaccacttagcctgacggagcaacaaagttatcaggatctgatggatacgaatgtgaaaagcgttttttattcgatgcagaccttccttccacttctgaaggacggagcctcagtgatcctgaactcagcatggcttaatactgtaggaatgccaggtttttcagttttatccgcctctaaagccgcagtcagatcttttgcccgttcatggtctgcagaacttaaaagcagaaaaatcagggttaactgcgtcagtcccggggcaattgataccccgatttttgaactcgaaggtacagatgcacgacagatagcggaaacaaaaggtcatctggcatcaatgatccctgccgggcgcctgggcacggcgaatgacattgcttctgccgttctctttctggccagtgacgagtccaattatatgcttggcgctgaaatcgcggtcgatggaggtttcgcgcaaatctga

SEQ ID NO: 168397 - DNA, 1020 bp, Enterobacter cloacae
atgaagacgttcaaagcaatgcaggttaccgaacctggtaagatggaactggtagagcgtcctgtgccagtacctggttacggcgaagttctgcttaaggtcgaggcatgtggcatctgtggtgctgatgctggcgtggttgaaggccttgaaaaaaatacgaattatccgcgtatccctggacacgaagtggtgggtcgcatcatttcattgggggagggcgttccatcatatctttttacaggacaacgggtgggggtcggtcgcctcgggggacactgcaacgagtgcgaacagtgccgccagggacattataatctgtgcactaaccagcccgtcgttggcagctcacgggatggtggctatgcagaaatgatgctcgcgcgcgccacgggactggttctcattcccgatgaacttctcgcagcagaggctgctccactgctttgtgcaggaattgcaacctttaacgctcttgccaaatcagaagccaaacccggcgatacgatcgctattcagggcataggtggtctggggcatctggccatacagtatgcacaaaaaatgggatatcgggtcattgcagttggacgtggaagtgacattcgccaggatgtaattaacctgggtgcacatcaatatattgatacgttacaatctgatgcggttgcagaaattaaaaaggctggcggtgcacaggttattctgacgactatcaccaacagtgaagccgcttcagaactggtgaaagcactcgcaccacggggtaaatttatgattgtgggcgcaggcagctctccacttttatttatgcccggcacaatggtcggaaacgagctaacagctgaaggatccatcaccggtacgccctacgaaacggaacgcgcccttaagttcagtctactgaccaacgtacgcgcgcagattgaaaccatgccactgaccagggctcatgaagcttttcagcgtatgcgatcgggtgatgttaagttccgtatggtattgagtatggatctttaa

SEQ ID NO: 168398 - DNA, 237 bp, Enterobacter cloacae
atgcgtaatgcactgccgaacggccttaatcgccgctccctgaacgtgaactggcgcggtaacgttgggtttgcttatcgtcaggtggatcatggcgggggcgttcagctcttgctgactctctatttaggaagccgccttagcgacgtccatgacgtagaaaggagcagttttttggtgtgccgggcgattttcacgaaatacctctgggaaatagcggaaccggcttctctttga

SEQ ID NO: 168399 - DNA, 462 bp, Enterobacter cloacae
atgagcgttgaaaaagttaaagagtttctgcttctgcacgcacctgatattcaggtgatagaactcgaaaaatctacggcaacggtcagcgaagcggctgacgcttttggtgttgaaagcggtcagatagccaaatcactgacgtttaccgtcggtgaggacatcgtgctgctggtcatgcccggcgatcgtcgcctcgacaacaaaaagtttaaaagtttctttggggttaaagcccgcatgctgcccgctgatgaggttgaatatcataccggctttaaacccgggggcgtcagtcctctgggtgttgcagccgaagtgaaagtttactgcgacgtaggtctgcgccagtacgaggaagtgctgcctgctggcggttcagggcaatctggcgtgcgcataacgcccgaacgccttgctgatgtcaccatggccgaatgggtagatatgagcagcctctga

SEQ ID NO: 168400 - DNA, 387 bp, Enterobacter cloacae
atgaagaaaattattaaaagcgatcgtctggcggagcctgtcggcccgttttcagcaggcaccggttttgaacgcctgattttcgcctcaggacaggtgggacagctacccgaaagcggacaactcgcgggtgacgatctggaaagtcaggcacgccaggcgctgaaaaacctgctggcggtgattgaagcaggcggtggaaaccgggatacggtgcttaaggtaaactgctggctgctgaccatgaacgactttgcagcattcaacgcaatctacaaagagttctttgataatgaaggctttccggcgcgcacctgcatcgccgcggctgaacttccactgggagcaaaggttgaagttgaagccattgcgcaccgcatgaactga

SEQ ID NO: 168401 - DNA, 939 bp, Enterobacter cloacae
gtgccccatgaaaaagccgccccgttaccggctacgcgcagtcatcccttaacagcgctgattgcagtgtttaccctaccgcccctgctgtgggcaggcaattttatagttggtcgcgcggtacgggacgacatcccgccggtcacacttacactcgtacggtggctggttgcgcttgtcatcattctcccgtttgctctcccacacatcagacgtgactggcctcgctatctgcagcatgcgggacgaattgtggcgatctccttaagtggcattgcagcattcagtctactcgtgtatttcggtcttcaccacacgtcagggactaacgccctgttgctcaactcatgcgtaccggtgcttattttgctgttctcagccgtgttctggggagcccggctgaacatgaggcaggttacaggtctgctgctgtcctgcgctggtgtgctgaccattatctttcggggcgatccgcgaggactccttacgctggcattttcttcaggtgaccttcttctgctgggcgcgatgacctgcttcgcattttacaccctctggcttcgcgggctgcccgccgatattaatcgtctggggctgctgggcgttcaggtgatgatcacgctgatagccgtttcgctgctctggccgtgggaacacgcctcgggagaatccgcaaactggaagacatctacgcttgctgcagtgctgttcctgggcgcgggcccgtcatttgtttcctatcttctgtttggacgctgcgtggaaatgataggtgcagcacgcgcggggctcagtatccatctgattccggtttttggcgtggctctgtcgcttctttttcttggcgagccactgcatttatttcacctggtgggcattgtgaccatcctcatcggggtcagcttcgcaacctcagtaaaacaaggtaatcaaaaatga

SEQ ID NO: 168402 - DNA, 879 bp, Enterobacter cloacae
atgccgtcagttgattttaaacaggtcgatgtatttaccaaccgccctttcaaaggtaaccctgttgccgtcgtgcttgatgcatctcacctgaatggaaaagaaatgcagcagattgcaaactggacaaacctttctgaaacgacgttcgttttgccgccgcaggatgagaaagcacattatcgcgtgaggattttcacccccggcagcgaattgccttttgccggtcacccaactatcggcaccgctcacgctctgcttgaagccggcgttattacagctacagatggatgcgttattcaggagtgtgacgcaggattaataaaactcaccgtcacgccactgcctgaaggtggtcagagcatagcgtttgaacttcctgctcccactatccagcctctgtctccagaacaaaccgacaaactcgaacagatactgggctgcgaactggaccgtacgatcacgccagcgctggttgacgtaggtgcccgctgggttgtcgcgcgcgcagcggatgcccaggccgtactgaatacctgcccggattacgcactcctcgctgagcatgacgccaccctgaacgtcaccggcgtatgcctttttggtcaatatccgactgaagcagagatgaaaattgaagtacgctcttttgcaccggcgtgcggcgtgaacgaagacccggtctgtgggagcggaaatggaagcgtcgcggccttcctgcgacattacagcgtggagcttccggcagatggtcaaatcgtttcaacacagggacagattcttggacgcgatggcaggctgaatctgaccattgataaggacaaaatcctggtcggtggacaggcggttacctgcatctccggaaccattaccagttga

SEQ ID NO: 168403 - DNA, 1428 bp, Enterobacter cloacae
atgtatctatacgaaaggcttgccgatgaaattgccatggctatcagttccggacagcttcaaccgggaacgcgaattccatccgtccgggattatgccaatagccatcaggtaagcatcaactccgtgaaatcggcgtatcgaatccttgaagatcgtggactcatcacaccccgccctcagtctggctactttgtgagctcggttcttccagaattagcgcttttgccgcgtgaaatgagcgcccgcgaagacatttcccttacgggtgtgagcaaactccttgcggtaatacttgagtcgcagcaaaacagtgaatttatcgacctggcgatggcatgtccaacagggagcacgttttaccccactaagcgcctcaagaaactgaccatgcagattctacgtggcagcaaaaccagctgtggtatgtatgccatgccgccgggttcaaagcgcctcagatcacagatcgcccgaagagggctggcgctggggatgatgctctctgatgaagacatcatcattacgcatggtacgatggaagcgctaagccttgcagtcagagcttcaacccgggccggtgatactgtcgctgtagaatcccccactttttacaatctgtaccctatgctggaggaccttgggcgtcgaatcgtgaatattcccacccatcctcagagtggtatgtgtctggatactcttgaatctcttgcaaaacagcaaaaaatttctgcggtgattactatacccagtggccataacccgcttggatttgtcatgccatcagacaaccgtcagcggctggcccgcatggctgagacatgtgaattcgccgttattgagaatgcgatgtacgccgagctgcagtttggcgaaaaatggatacctaatatacggtcctttgaccgtaaagggtgggtgctggtatgtgccagttataccaaaacggtcgcgccggactttcgcattggctggctggaggcggggcgttttcgagatgtggccaggcaaatgaaatttacctctactgttgcagagtcagggttgctgagcgagagtctgggaatttttcttgagaacggcggatatgacctgcacctccgtcacctgagacgattgtatgagcgccagattgatatcgtgagggcctgcattgccgaaagtttcccgccaggcacccgtgttagtcgccctcaggctggctttattctatggattgagttgccagaaggcaccgacacgctggccgttttccatgctgctttggatgagaaaatactatgtatgcccggaattctgtgttcaggaagtagggtatttaatcactgccttcgcatggcggcatgctttgaaatcacggacattcatcgccaggctatatcaagactgggcgctctggtcgctgctcaattgaagaacacgaagtga

SEQ ID NO: 168404 - DNA, 336 bp, Enterobacter cloacae
atgactgacaaaacagcaacacactacacggaaagcaatttttctgacatagaacagtatgagggtgtttcgattattcggtttcatgcaccatggtgcggaccatgcagtagcagtgaacggttcttcgaccaggctattactcagatgccagccgaaattattgccgggaaagtgaatgtcattcaggctcccgttctcgcgtcaaagtatggtgtctggggattacccaacacacttatttttaagaacggacaagtgtttagcagcattgcgggcccacaacctgcagaagtctttcttaaagcggtacaaaaagctttagcagaaagctga

SEQ ID NO: 168405 - DNA, 903 bp, Enterobacter cloacae
atggatatcaaatccctacgctactttttgcaggtggcagagacactaaatttcaaccgcgcagcggaaagactaaatatctctcaacccgttgtcactcgcgtcatcgctcagcttgaacatgaagtgggttcaaaattattcgaacgtacaacacggcgagttgcactaacgccagcaggggcggtgctattgcgggaagtcaggcctttgattgcgcatgtcgaagcagtacagcaaactattcgtcattctgttgctgaaaaaagtgggcgatttaccgtcggttacacgactcttgctatgcaaacagtcacccctgaccttctcagaaaattcaaaagcgaatttcccgatatagagcttgaggtaaatgaaatgacaagccaggctcaggtcgaagcattactatcggctgaaattgatgtagggtttgtgctgaccccagtaattgatgaagcattaacaataacgccattacatcgggagcgtctaaagctagcagtaccagattatcatccccatgcttctggcgcaggagaaggaaacagagttcccctatcagcattcgcaaatgattactttattatcccatcaaaacagcaatttccggctgtctatgatgaaatcatacgcgcatgtgatggggcaggatttcgcccccgccttaaagaatgtggcgaaaatcaaacttgtgtaggcctggctcgcgctggcctgggagtcgtttttgtttccggacgtacaacagatatcccttctgaaggactggtatttgtcgaaattgatgatccggcgccagttatggagattgccgttgcgtggcgaaccagagacccttcaccactgctggcgttatttaagcaaaataccctcggtgatttaaaggttgatatcaaatga

SEQ ID NO: 168406 - DNA, 327 bp, Enterobacter cloacae
atgttagtgaaaaacgttgataaagatacttttgtaaaggaagtcttgcatagtgaaatcccagtgctggttgacttctgggctgcctggtgtgggccatgccgatcagtagccccggtactggatagcattgcagaagaaaatgagggttctctaaaagtcgtaaaagttaacattgatgagaatcctgaactggccagtgtttatggtattcgctcgataccagcttttaaggtgtttaataagggcgatgttgaactgcagtttgggggcgctttgcctaagagtcagtttgaagtcgcgctggctcctttcctgacggaataa

SEQ ID NO: 168407 - DNA, 1395 bp, Enterobacter cloacae
atgaatcagaatactcttccagagaaaataattgagcttataggtggaaaagagaatattgaaagcgtaatccattgtgcaactcgtttacgttttaaactgtatgatgaatcaatagcaaaagaggcggaactgaagaaaactcagggcatcatcgctgtagttaaaagtggcggtcagtttcaggttgtcattggcaatgatgtcagcagcctgtttaagctaattgaagcaagtatcgaagggcgaaagccagccatcgaagaaaccaaaaagacgaaaagtacacgctcctttgcgagtatattcatcgacgttatctctgcaattttcacaccgtttattagcgtaccggctgctgcggggataatgaaaggcttgctatccttgttgataaacgttgatctcattaaagctggtaccggtacctatgacgtcctttttgcagcgagtgacgccatattctatttcttccctttgtttattggttacacagcagggaaaaaattcggcggaaatccctttatctcaatggctatagggggagcactaacccatcctttgatgctgaaggcatttgaagcttcattactttcagggactccaacagccacgttcctaggtattcccattatcttcttcaattacagcttttcagtgataccaacaatccttgctgcctgggccagtagtcacctggaaaaacggatccaccctcttcttcacagttctatccgcaatttttttaccccccttatctgcctatgtaccatcgtaccactgacactactgctcataggccccataacgacatggcttagtcattccttagctatcgggtatttatggatatactctttcgccccatggttatcgggggcggtactcggcgcattctggcaagtctttgtgatttttgggctgcattgggcattcacaccgctgatgctcaacaatctggccgtgtttgggcatgacagcatgatccctattcttgtagcagcagtaattggacaagtgggtgctgtggcaggcgtcttcgttatatcacgtgatcctcagaccagaactctggctgcgtcagccttggttgcaggcatattcggcataacggaaccggcaatctatggtgtgacattaccgcgtagggtcccgttcatcatcggttgtatttcgggtgcttcaggaggagcaattattggtctcagcggtaccctggtcttttcattcggctttcctggccttctctctattccacaaatgttgccgcttgccggagcggatggcgcgttttggggaggagttaccggtgttgcgttgtcagcgatcatgtctttcttactaacagttttatccgcgaaggtttactggaaggcattgcctgtaagcgcataa

SEQ ID NO: 168408 - DNA, 1314 bp, Enterobacter cloacae
atgttaggtgtaaaaattgtcgttattggagcaggatccagctacacccctgagttaatcgagggtttgatcaatcgccatcatgaactgccacttcgggaactatggtttgtcgatattgacgaggggcgagagaagatggctatcgtagccaacctaacccgtcggatgttaaacaaagccggtatctcattaactgtgaacgaaacaaccaatcgccgcgacgcgttacgtgacgcagatttcgtatgttctcagttccgggcaggctgccttgatgcacgcatctcagatgaacggatctctctgaaatacggcttcattggtcaggaaaccaatgggctgggtggctttgcaaatgcctgtcgcactattcctatcgcgcttgaaattgccgaagatatggaagaattatgccccaatgcatggctactgaacttcactaacccatcaggtatggttactgaagccattcttcgccacagcaaggtcaaaactgtagggttatgtaatgtgccggtcattatgcagaaagggatagccaatgtccttacctgtgagaatgaacgtgactttgttatgcaggtggcgggtcttaaccactttatttatgtacggcaaattatgtataaaggtcgtgactatcttaatgatgtcattgaatctattactaaaggtccagacctgcttgtgccgaaaaatattcccccgtttaaatggcctgagcaccttatgaaaggtctgggtatgatcccttgcccgtatcatcgttactactatatgagcgatgacctgtataagcaggaagttggcgaagcgaaaggtgaaggtactcgcggtgaagtcgttaaagagattgagagagaacttttcgaaatctacagcaaccctaaccttgcagaaaaacccaaagccctggaaggccgtggcgggcaatactattcagatgctgcctgtgaattgatcagtgctatttacaacgataagcgcacagtcatgcacgtaaatacgcgcaacaacggtacgattgccggcttgccggatgactgtgcggttgaggttagctcaatgatcaccagcgcaggtcctatgccactgaatgttgctgcattcccggaagacacgctttgccagttgcaaatgatgaaaagctttgaaagactgacaatcgaagcagctatttcaggcgatcgccatactgcctggcgtgccctggcaatcaatcctttagtggaaagcggggaagtattagagaaagccctcgatgaaattattgaggtaaacaaacaattcctcactgcgttttataaataa

SEQ ID NO: 168409 - DNA, 933 bp, Enterobacter cloacae
ttgttaactcagcaaaatcagcttgcattacttcatacatttgaaatttctgcgaattacttgagttttacgcgtgcagcagagatcctgtgcattacccaaggcgcagttagccaccgcattcgtcatcttgaagaattactgggattcaggctattcatccgttctcctcgacagttggcactaacagatgagggaagcagactgctcagcgtactcagtcattcgttgcgccggatcaatgatgaaatagaagatatccgtgataaggaattaagaggtacgcttaatttgggattagccccaacgtttgcatcgctctggcttatgccgcgtctgcctgattttcataaagaatggcccggactgaatatcaatgtcagggttcgttctggcaagactgagttcagccttgaggatgttgatttagctttatattatctacgtcaggttgattctgaattgcatcatgagaagatttctagtgaaattctctttccggtatgctctcctgattactatcgcgaagtcgtgatgaaaaaaggtgtagaggagtgtgtttttattcatgcgacagaatcaactgattatcaggacatctattctgactggcgatactggtgccataaaaatgacttaaccatgccaattaaagaacggtttcttagctttaataactttcaaatgtcagtcgatgcagcgaagtatggagtggggatcgcgatgggcagaaagctaatgattcagcgttatattgacagcggtgagcttatcattccattcggtcatgacgtattgtctccttacagttataatattgtgtatccacgtgaaaatcttcaaaaagaaaaggttaaagtttttcttaactggtttaaaagcgcgcttgaaagagatgtgaacttttcatgttgcgatgtaacagcaccttaa

SEQ ID NO: 168410 - DNA, 210 bp, Enterobacter cloacae
atgaaaaacactcttatgacattactgctttcatctctaattatgtctttctccgttaacgcagagacagttactggatatggctattcaatcgactcagctgaaaatatgattaaagaaaaagcaaaagaaaaaggagttacaaattatgtaattacctcagcacacatgggtaattataccaccatgagcgcaaaattaattaaataa

SEQ ID NO: 168411 - DNA, 360 bp, Enterobacter cloacae
atgcttaacagtattgcgttcagacgtcctttaccacatttgctgaaaaccgataacggctctgagtttgcaggaaaaaagctggacaagagggagtatgaacgagggatccgtattgagttctcacgcccgggagccccaacggacaatgcgacggtggagtcgttcaacggcaggctgcggcaggagtgcttgaatgaaaactggttcatgtcgctggaagatgtccggtgcgaaattgaggcctggcgcatgcactttaaccggagacgtccccattctgcacttgtctggatgacgccgccagaaccagaatttgccgaaacttctgccggttgccagaatatgcagccagactga

SEQ ID NO: 168412 - DNA, 1395 bp, Enterobacter cloacae
atgctgagaaaatggcaaaaacagtgtgctgatagcgcgctaaataagtatggatcaggtgcctctcatttcctgtgtcaggccagcccgggttctggcaaaacggtcatggcagctgaagtcgcaagacgaatgctcagccagggaatgattgatctcattatctgtttcgcaccatcgtcagaagtggtttcctcgattgaaggaaccttttcaagcgtccttaaaagtaactttaccggcggactcggtgcggtggggggggcttacacttaccacaatctgatacacttcgataaagtcttttgggataccttagcaagacacagatttctggttatcttcgatgagatccatcattgctccggtgattcgaaggataatgcgaacatctggggaagtgaaattctgactcatattaaacaccgcgcaagatatacattggctttaactggaaccccatggagaacggataatttgcccatcgtcctttctggttacgccagcaccgatggcaaaatctgttgcgactatatatacagcatgcgcgatgctatagctgataaagtttgccgtaaaccaaaaattgttttaataaacagcgatagtcttgtgtactcgtcaaacgagagcactaaacacttcggctcgatatccgaattcctgagtgagaacctggtttcatatcgttcgttcctctggcatccagaggcgataaggtatgtcattaaagccggatgtgaaaagcttgacgaactacgaaaagaaaacccttctgcgggtggcctgatcgttgcgtcttctgtcgagcatgctttccagctgttgaacattctggaaaaggagtttgcgaagactgcaaccatggtgacataccacgataaacaggccatttctaaaatagaccatttcaggaacggaaccaccgagtggattgttagcgtgggcatgatcagtgaggggacagatatccctcgcttgcaggtctgctgtcatttgagtactgtgaaaacggagctctacttcagacagatcctagggcgtattgttcggataaaccgtttcaaaaatcaggaagcatggttgtttacgatagcgactcatgaattaacactttttgctgagcggttagcagaggaactgcctgaaaaatacagaattatacagaacgagaatacgttgcccgcaagagcgacgcacatacatgcatcagagcccgacgtcaggaagaaggaattccgtattatcgatactgaaaacggccattcctgcataagcatggatcttaacggaacaggtccaaaaaatgcctcttttgataaacccggcacctatttcacaattaacagccttcaccagcgcgtcatcaatgcttttttaccgactgatagttaa

SEQ ID NO: 168413 - DNA, 564 bp, Enterobacter cloacae
atgaagtcagcagtaaagattcatccctatacacataagcttttgaccgagaatgattttgtatttttcagcgttaatcaactcagggatgcgttactggaactgactaataaatctacgcataaagatgaagcaaggaggttcgtctgccgtcagttacagaggctggaagctttgggtttagtacgtaaaattgaaggtggcggcccgaaaaagagatacgagaaaactgatatttttgaacggactaaattcgtaactgggaagattccaaaaaactcatgtttaactcaaccttgtgaaaaagtgcagcccgcgaaatcagatgatggttttttcctcaatgacattaaaaaagataagagtatcaatgaagcaaaactcgctgtcgttcttggagaaatcgaagagtatcgttctcttatggatcgattcccacaaagaaaaaaatatcttatggatcttatgcatgaggccaaaaatcagtcagctgatttgcttggcagagtgactgcgctatctaaggtgctagagttgcttgataaagagattcaagtatgctga

SEQ ID NO: 168414 - DNA, 222 bp, Enterobacter cloacae
atggagccgggttcagcgagcagtcgcatgaaccactatgaaaaaggaaggcatgttcctgacattgataccctcaagcggatggccgacgagcttggcgtacctgtcaactatttcttttgtgaaaccgaaacgacagcggaactagctcgcctgatttccctaatgacagaagctcaacaagctgaacttatcaaactgctgacggaaaataaggagtaa

SEQ ID NO: 168415 - DNA, 435 bp, Enterobacter cloacae
atgaaaggctttacctgggtgaagctgaaccagaacgccgaactgcgcatcaacaaggcgatggccgagggtgaaatcaccgacttttacgacttcctcgatctgcttaacgccgagacgcgcatgaacggcggcaatcacacccgggccaatacagaagacctgttgattgccacccgcggcgccgggctggaacgaaagcacgcagggattaagcaggtggtctacagcccgctcggcgcgcacagcgaaaagccgtgggaagctcgccaccggctggaactgctctacggcgatgtgccacgaattgagttattcagccgcagcgcggcgccaggctggcatcactggggaaatcaggctgaatcaccggatgttgagctttttccaggtaacatccagcccatcttcaaagacggatggagggcagcttga

SEQ ID NO: 168416 - DNA, 606 bp, Enterobacter cloacae
atgggcacacgacatcttacatgcgttgttaaagacggtgactacaaggtcgctcagtacggtcaatgggatggttatccatcagggcaagggatggacattctcacttttctgcgtgaaaaacttaacctagatgtgttcctgactaatctttcacaggcctttcagcctacagaagaacagattaaagcgtggtggcttgaggttgggcacgacatggaaagcagtggcgggtttgtggatcacgcgattgctaagaaattcagtaaaaaccacccttctctatctcgcgatactggcggtgaaattctttccctgattcagagttcaggtgaaccgttgccggttcgcgtctataaggagtttgcagctgactcactattttgcgagtgggcatacgtagtggatttcgacaaaaacaccttcgaaatattcgaaggctttaaccatgcccctttagctgaaaatgagcgcttctacggcttgaagtgtgataacgcgaacaaggactaccaccctgtccgtcatcggaaaacttattcactcgattctctgccaacgaatgaagagtttttggctgagttagagacacaggaagaagaataa

SEQ ID NO: 168417 - DNA, 324 bp, Enterobacter cloacae
atgttcgtcatacaggaatcgggtggcgctgccgtcggcttcgataatggacgcgggaagcgcgcggtgctccagccaagtggtagtgcgggtattgccgtcggcgtcgttctcctgcacccggttgcccatgtcgtcatagacgaaggtaacggcattaccgagcggatcgatgcggcgcgtcaggagttcgttgtcatcccactcgtagcgccagttctcaccacgctcgtcaacgtagcgaacaatcaggttctgcgcattccagtagtgcttccgcgtctggccgtcgtagtgatcgacggtcgtcagcccggcggctaa

SEQ ID NO: 168418 - DNA, 528 bp, Enterobacter cloacae
atggttaatgatgcttacgcccctgagctgctgcgctctttatttcgatacgatgcggagactggccgcctgttccatgcagtagaccgaattggaatcaacaagcggatttatgctgaggccggggaactggctgacaccgcaacggacagcgccgggtatcggcgcgtgtctgtccgcatcgatggcaggacgcactcgatttatgcgcatcgcgtggccttcatcattgctaatggtggtatccctgacggtctgcaaatcgatcacattaacgctgtacgtgccgataatcgaccgggcaacctccgcgccgttacaccgcaggagaatcagcacaactaccgcaatgcgaagggatatagccgtcattcttgttctggtaaatgggaggcttacattcgcgttggcggtgtgcgccatcacctcggcttgttcaccactgaggcagcagcacgagccgcctatctccgagccaaacggcactatcacccatcaacgccagccgatttattgcaggctgcctaa

SEQ ID NO: 168419 - DNA, 207 bp, Enterobacter cloacae
atgcgtattgggtacgacacgagacaagtgctggagtgtggctttgaggggctttacgaacatatcgataatgctcttgaaaatgcactggcgtggagagactaccgggtcaaagagtgggcggctgagtctgatattgctgagctgaagttcttatgggaatggttccgagagagattgcctgcggattacgtgtcgccgtactag

SEQ ID NO: 168420 - DNA, 300 bp, Enterobacter cloacae
atgagtactaaatactatttgaacacgttgaatcagttacgccccattctgattggttttcgtaaagccaaaggtcttactcaaagagagctttctgaacgtttgggggtaacacagcaaacttatgcacgcttggaagcaaagccagcaactgcaagtttcgagcgcttgtttaaagtgtttgctctgttgggggttgagctcgtactttcatcaagggaaccattcgccgattcgaagtctccatttattacaaaccagcaggatgaagcgctgcctgccaggcgggagacatggtaa

SEQ ID NO: 168421 - DNA, 255 bp, Enterobacter cloacae
atgtcagattcagttgaaaagttggcgttgaaggatttgaataaccgtttagagcagcttgaaatggaaaagcacgcgttacaccaagtggtaatagcaatgcttgcaacgatgccaccagagcaagcccttgcgacgaaacaacatatcggtcaactcattcatgctctttctgttggtggctcagctgaagctcttgtgaggctggaaaagcagaaagcagtttttgaaaatattttctttgcagtgaagtag

SEQ ID NO: 168422 - DNA, 492 bp, Enterobacter cloacae
gtgggcttcgcggttattggtaccttcgtctccctctatttcatgagccgcggctgggcgatggcgggctttacgctgacggcctttggcggtgcgtttgtgttgatgcgtgtgctgtttggctggatgccggatcgctttggcggcgtgaaggtggccgtggcgtcgctggtaattgaaaccgtgggtctggtgctgctctggcaggcgccgtccgcattcgttgcgctgctgggcgcggcgttaaccggctgcggctgctcgctgatcttcccggcgctgggcgtggaggtggtgaagcgcgtggctccgcaggtgcgcggcacggcgctgggcggctacgcggcgtttcaggatatctcttacggcatcaccgggccgctggccgggctgcttgcaacgtcgtttggctatccttccgtattcctcgccggtgcagtttctgcggtggcggggattgtggtgacgctggtggcgtttcgcaagcggtag

SEQ ID NO: 168423 - DNA, 252 bp, Enterobacter cloacae
atgcgcgtaagcactttagtgaaaacagttaccatatccaactcaatagctggcgaacataagtttgagatttaccaatgcgaaaatgagttctatacagatatatcaaagaaaaaccccgatggcttttgggtggtaatcaaggatgagtatggcttaactcgcgctctggatgtcgatgacgcttcagagtgttgtattaagtatgtcgaaaatcttgaagtcgatatgaaatcctcacgaattctctga

SEQ ID NO: 168424 - DNA, 201 bp, Enterobacter cloacae
atgttaacagtaaaggtaatgtcaccaggtggtggtgaagagattcattgtggtttgagtgtgggtttcaaccccaggcagcagagtatcgcagtatctggtatggaccagaatatcttccttaaagagggagaggttgcctacgtgatgaaccagaacggaaagacagtttctcgttatgagcatgtggttcgtcagtaa

SEQ ID NO: 168425 - DNA, 369 bp, Enterobacter cloacae; identical to SEQ ID NO: 131013

SEQ ID NO: 168426 - DNA, 360 bp, Enterobacter cloacae
atgacaatcaataatttgaccgaggaaagccgtttcactaaagagcagttaattgagcacgtcacacgacagctcgacatgtttcacagacagataaagtcgcaaccacttgcggataacaactataacaggaaaacaattacggcactcgaaatcgcactgtcagcgctgaccgcgccagactacatcccgcctcacgtactggacgcgatgagcaatatgtgtgacgggggctttaacgcgcaaggaatttgggatttgtgccgggagtcaattttgccccctaaaccttgccctcgttgcgggacagtatcaagcagaccagacggtgctcattattgccatgccgctgatgcataa

SEQ ID NO: 168427 - DNA, 861 bp, Enterobacter cloacae
atgagtactgagcttgatgttcagtggcgtattggtgcaactaacggcgtgttagagcgcttgatgtctgcctatggagtcaagatgcaaaaggatttggcagacctgctaggcatcgccaaacacagcgttagtggctgggttcaacgcgatgctataccgggaaacgtcatagttaggtgttgtcttgacacgggtgccgatatcaattggttagtgaatggtgagcttgcaaattcaaattacgagcgaaccgtctgcaggttaaaaggcaaagagctttatgacgagataatgacaaatggcgggaaaaccgttttacgtaggattctcgatgcctatggctttagcatgcaaaaggagttgggtgatttgctcggcatttcctcaggcacaattagcacatgggtaaggcgcgattttttcccgggtgatgtagtcgttacatgtgctcttgatactgatgtgtcgcttgaatggttagcaactggcaaagggcaaatgcgcactaacaaggaaatagcccctgctgattcttcaatcgaaaaattccgccttgaatctggtgagctcaagaaggctggcgcatggcatcctgacccctcgatgatacccaatgaatcaggggaattgatttatgtagaaggtgttggtgcctcttggctggtcgaacgttctgcttcgaatataagcaacgggcgttggttaattgatattgacggcgctcttgatgtttttgatgtcatccgtcttcctggtgggaaagtcaggttgtctaataagtctgcgcagttcgaatgcaatattttagacatcaagcctgccgggtctgtagttcttacattggaaaaacacgtttaa

SEQ ID NO: 168428 - DNA, 1800 bp, Enterobacter cloacae; identical to SEQ ID NO: 95421

SEQ ID NO: 168429 - DNA, 852 bp, Enterobacter cloacae; identical to SEQ ID NO: 95420

SEQ ID NO: 168430 - DNA, 3183 bp, Enterobacter cloacae; identical to SEQ ID NO: 95419

SEQ ID NO: 168431 - DNA, 1038 bp, Enterobacter cloacae; identical to SEQ ID NO: 95418

SEQ ID NO: 168432 - DNA, 1362 bp, Enterobacter cloacae; identical to SEQ ID NO: 95417

SEQ ID NO: 168433 - DNA, 525 bp, Enterobacter cloacae; identical to SEQ ID NO: 95416

SEQ ID NO: 168434 - DNA, 2466 bp, Enterobacter cloacae
gtgattaatacaaaaggctctaaagccattgccactcataaccgtaaaaccgttaaagccgttgaaccgtttgcacctgaaatttcatacaagatgagtaaaacggtagagactcttggtaaggatacagcactggtttatatcactggtggggacgcagctaaggtgcttgcaaaatcagtaccggctaacgttgtccttacaactaaggttgaaggccaggacgctgaaactaaaacctacaagaataaatcaggtggtgatacgccggtaacttattctgagcgtataaaagtacctgcagcgccattgtggacgcaaacgaatgtaaacatcgaagcttcctacgaaaatgaagccagtataaagtcatccagtgtgctcaaagtttatactgttccaaacttcagtattcgtgcctatatgaaagttgcagagcgtaaatcagcaacgagtttgaaagtaccggtatcggtaaacatcggccaatggaataacagctgtaactgtacattgtacgatgcctccacaatggggcagtgggatgtggtggtttacaaagttacctctaaatgggttacggatgaagaaaccggtaaagatgtttcggtaactgagcgaactcctctgaccggtgatctgcccgttaactctgaggggattgcgaccggtgagctcaacatggacgatctgactctgggtagtcaccgcatcatcgcagtagctacggtacgcagtccgtttaaagattttgtactcaaacgtgagacatcaacaacaagtatcagggtgtataaaggggccaacctcgaaggtgggctgtctaaatcgcttattgtaggccgagttcctctgtcagcaatggtctcattcagaacgaaaagtaccgatgattatgattccctgagtccgactgaatggcagatgtccagtaacaatggatcaacctggaatacgcttgaagatatgaccggacttcgaagcgtaagcatcaaacaaaaagaagtaggtaagtggctttaccgcgccaaactgaccaacaaatacacaggtaaggtctcatataccgataatctcacggtggttgcttaccgggaacctaaacctgttatctcggttggaaaggttcttgaggggcacagcatcccggtgacactgactgataacaatgaagatgtacaaggtagtgcagttgaagtccagtggtcagaggatggagaggaatggactgaggggggggttaaatacatgattacgtcctcggaggtgcccaagtatatctttgcaaaagtacggtataccgaaaccgacgaaatggccgggaaatcggcatggaaagaaactcgtgctcgtgtcactgtcattaagcataagaaattgtcggttaaggttgaggggaactcgcaggtagaggtaggtaaaaaagttactttgcagggtacctacacgaaccctaatatcgagtactcatctgatgctaaagttgtccaggagtgggtgctccctgatggaagcgtaaaacagggggggctgcttgataccgtcctgaccgaagacatgttagatgaacgtgggtatgcaacgtttacgtatcaggcctacatgccggaggcaaaagacagaaccatagcaaaacggaaaatcagcgtaaaatcttgggtatacaaattcccggagccacgcctgaatacaaaactgaaatacaccatgataccttcggaactcaccgtatcagtctctggtgtggatgtttcttatcctggagttgtgttcacccaggactggcaatacgacaaaaatgtgatgacgctgtccagcgacaataacgggacgaaagtgttccaggtaacaaaatcgggtacacatacgttgacgtatgtcctgaaggataacaggaacaatgaagcccgggttgattacacttttatcgtgaacgaacagagtccgatggaaattagcgttactcccaaatactctaacaagttcatgagggccccgctggacctgtccttgaggtccagtgttaagctggcccactcggcagactcaattgacaatgtgacgtttaagctgaatggtaagcctgtcgatggtggcaaaaattactggtcacagacgtttgagaacatcatggaaggtagttataaactggaaatggacgttgtcagtacgcagggtcagagaggggttgttgtggttgattttgacgtgataccgaacacgcctcctacatgtaacctgacatacactgaaacgcaactgagctgggcatttactgcaaaatgcagtgatcctgacggcaagatttccagttatgtttggaaggtgaatgatcaggttcgtggtgtgttcggaagtactgcaacactgtccaaagctcaaaataagggtaagctggtggtgtctataactgcttacgatgacagcggtgattcagcgacaagtttcattacgttgaataactga

SEQ ID NO: 168435 - DNA, 405 bp, Enterobacter cloacae; identical to SEQ ID NO: 95520

SEQ ID NO: 168436 - DNA, 804 bp, Enterobacter cloacae; identical to SEQ ID NO: 95518

SEQ ID NO: 168437 - DNA, 435 bp, Enterobacter cloacae
atgatttgggtagaacctgggagtaacgtcatactaaaaattaaagaagctgaaaaactctacgatttcattccaatagtctacattacagggaaaaagaaaccaaatgtacttactgttttacccggtaaagcaattagtgctgcaaaagagacaaagctaattgaatataaagtttcaccaaatcaaaaaagaatgtcacatgatgacaaggttgttaagctatcaggctttggtaatataaataaactgaagaaaggtttttatgaagtacaggtcgacaaatttacttctgtgagctttgataaggaggcttttataattacccgaaataatatgcttgcgggatcacaatattacactaaaaatcttgttgcctatccacatgaaaaaataataatgaacattagcggagaaactcatgttgaaaaatag

SEQ ID NO: 168438 - DNA, 501 bp, Enterobacter cloacae; identical to SEQ ID NO: 95462

SEQ ID NO: 168439 - DNA, 2505 bp, Enterobacter cloacae
atgcaaatgacactggctgctttaccggatgtcaacatatcattgtcccgttggttacgtcgcagaggtaacaggatgggaggtagggataatgaaaaagcggatcttcttaccgtatactcactggattacctgacaaaaagtcaatatgagcctttgaaagaagctgatggcattaagatcacgcaagctgatgatttgaagcttaggaatttcgagttgtgggtaacggttaggatacctattaaaggtttttctcctaatgaatccgaatccatgcgactggatggcctttttaaagaccttctatctaaactagaaggtttaaccttgtcaccaattgttggtaatgctgacacatggttgtacagtgttgataaaatattaaaccccggaaaagactccagatggaaatatggtggacttgaagctagtacattaatgccattaaataatcaggtcaacattccaggaaggaaatatgaggtgggggaggattatttcgcgtcattgtctgctgatgatgatgagacagctcaacgatattttaagcatttgtcgatgacaaaattccctgaatatgtcaactttggtgctgtttacgagttggttgttgactggatgactggaagcaaaaccattttctctccttttattatcaacttctgtatacaattcccacatcaaaagaaaatacagaaagagtatcttcgttataaagcgataacagataatcagtcaaaaatacctattgttttaaaatatcttcctcgccttgccgatatggacaaggattactcggcattgactagagagttggaggataaagctaaactactacaaacttacatgacatttatcgtcatggataatacactggaaaaagtgaaaatagctgcaaaaagtctaattaactattacagcgagaaaaaaatcgttgtggccgatgatagttatatttgtttttcaggtgtcatgtcggctttacctttatgtaatgatccggcgacttttagagatatggatcgtggtgatgtaatgactaatacgggtgcggctcacctagctcctatctttggcccgtggaaaggaaactccacaaatccagtcattccatttgtaacccgcgagggacagttggttatgattgatattttcgaaacttcagccagttacaacgtatgcgttggggctacctcaggggcaggtaaatcatttgcagcaaacaacattattctcaactatctttgttctggcgagcatataaatccgctttatcattttgatgatattagagatctgcttacggcagataaatacgatccgcccctggacctgaatggcaaatttaatgcgtcaccagatggtgctcaggtgtttgttgttgatatcggacgttcatatcaagggcttgctgagcaatttgaggactctcaatttattgattttggagttgacgctaccttttctcttaaccctttcgctttcctggtgagaaaatatacaggagatgaatcattggagggattaacgggaaattcaggcgaagaaagtaaagaatcagacattattgctcaaacaatcatggttctgaatcaactaaaactaatggcttcaagtaatggtaacattagttctttacaggaagcagtaatgcttcgtcttattgctgaggaatcaaatagccctgaagatggatatcttccttcagttactggcttcgctaaaaaatgcatgaagcatgagaaacaagaaattaaagatataggcattcaacttggaccttggtgtgaaggcggcatttacggtaggaggtttacaacatcattgccacccattaattttaatagccgcttcattgtacttgaacttgaagaactcaaacctacaccacatcttcagtgggttgtgttaatgtcgataatccaggcagcacagcatgctatgtttattaaaaaggatggtcgtcgtcgtttgtttatacttgatgaggcctgggagtatatcggcgaaagtaatggtgatgatgctgctgttaacttttttactaaattccttgaagcagcatggcgtcgtttccgtaaaacaaactgtgcagggatctgtattacacagagcttcgaagacttctacaagtcgccaatcggtgtagcgatagccaacaactcaccatggaaatttattatgaagcagagcccagaggcgattgattcaatggagaaaaataaatatatttcagcatcagcatcagaatatgaacggatgaagatgatcaggactgtaaagtatgttttttcagagattatgattcgttttgagaacgtgcaacaaatcgtccgtctttatgttgatcgtaaaatggaactttgttttactacagacccgtctgaccgacgtaaaatatggaaccttgttaatgacggatatacgtatgccgaagcaattgacagggtttatgaagaagagctagtacagttaggcatgaaaacaaggcaggttgcttaa

SEQ ID NO: 168440 - DNA, 738 bp, Enterobacter cloacae; identical to SEQ ID NO: 95464

SEQ ID NO: 168441 - DNA, 858 bp, Enterobacter cloacae; identical to SEQ ID NO: 95465

SEQ ID NO: 168442 - DNA, 465 bp, Enterobacter cloacae; identical to SEQ ID NO: 95466

SEQ ID NO: 168443 - DNA, 1371 bp, Enterobacter cloacae
atgaaaactttgaagctgaaggaattgtgggaagaaaataaagcaattcgaattgcttttttgcttgtcctagcattagcggctcttgtgatggtaaccatcacgcttatgggcggagatgattcgagcaagaaagctaaaaaaattaagcctgtgactaacttgcttgacacttcttccatcgtcaatatggatgaagaaggtcagaaaaggtttttgcaaacagttcagcaggaaaaccgtaaagatcaacaaaacatgttggatcaggtaaagcaaatggaaaaatataaggccgaaaattccagtgagctgactgaacttaaaatccaaattaagcaactgaaccaacagatctctgatatgcagaatggaaagggacctgcgagcaatcgtagtcttgataaccgcgtaggccagccggtctatgaaaatcagcagcaaaatccagcctatcagctaaaccgtaatgcagaagggaatcgcaatcaggaaataccagttgcaggagggattgcgcctctacgcactcagttggtacgcactataaccagcaacagcattaccacggccaataacggtgttcttgaagtcacaccaattgttgaaaagaacattactaacgcgaatcaaaagcgggtcgttaaagctggacctggagctgctatcgcaggagatggtactaagccggttgatagcaatgctcgccactcaaagcgtgctgaagaccagtatttgcctgctacgtctcaactgtatgcagttctggtgacaggtgttgaagcgccgacctcattgtcgtctcaagaagaacctttgggagtaacgttcagggttaaacgcgatgtgtttttacccaataactacagaatggatctacgtgactgcaacctcttaggtactgctcgtggagatatggcttctgaacgagtctatatccgcacaactagtctgagctgtgttaattctaaaggcaaaagctttgatatcaaattggaggcatacgctgttagtgaaatcgatggtaaagccggtatcaaaggtacgcttatctccagaaacggtaacgccattatgggtagtgcttttgcaggtggacttagtgcgctggcgcagggactgagcccaagcaaagttagccagttgaatatcgaccctaactcacaagcacaataccagggacctaatattggtgctcttggcgctgtgggtgcaagcggtatggtctcaggaggattaaacaagctgacagactggtatacccacatgattgatcagcagtggccagttgtagagctttctccgggtattaatgcgacttttgtcgttcttagtggtgcatccatcccaaccaatttatcggcgaaataa

SEQ ID NO: 168444 - DNA, 519 bp, Enterobacter cloacae; identical to SEQ ID NO: 95475

SEQ ID NO: 168445 - DNA, 1170 bp, Enterobacter cloacae; identical to SEQ ID NO: 95476

SEQ ID NO: 168446 - DNA, 861 bp, Enterobacter cloacae; identical to SEQ ID NO: 95477

SEQ ID NO: 168447 - DNA, 369 bp, Enterobacter cloacae; identical to SEQ ID NO: 23366

SEQ ID NO: 168448 - DNA, 315 bp, Enterobacter cloacae; identical to SEQ ID NO: 95479

SEQ ID NO: 168449 - DNA, 669 bp, Enterobacter cloacae; identical to SEQ ID NO: 95480

SEQ ID NO: 168450 - DNA, 765 bp, Enterobacter cloacae; identical to SEQ ID NO: 95481

SEQ ID NO: 168451 - DNA, 1179 bp, Enterobacter cloacae
atgaaacaaacagctgacttttttatctctacagagcggaacgggaggctagtcaaaaatttgcgtgaatttagtgacgcaaatcctgacatttgccacaaagcggttaatggccaaccgtttatgatcgacccaagggcattagtgttagttccaaactggaactgccgtgagatgggtctgggagaggcatactacaaattacctaaacctgccgagcatattcagaatcttaaaaaagcatttctgaatggggcagacattgaccctataactgtagttattgttgacggtaaaccactggttcgacaggggaactgtcgtacaagagctgcgcttttggctcaacaagaatcaggtctccccatcctagttagattgcgtgagttccagggtgacgagatagaacaagaatggcattctctggatggggcgaaatctctccccctttgccccgtaggtcgcggcattgcctatagcagactggtaaatgatgccgggatgtctgttgagcaggttgcacaacgggaaaacatttctgaaatggcagttcgccaaatcatttctcttgcaaccatcgatgacgaattaaagacgttgattagtcaggatgtgatttcgtacacactctgtcttgaattaattcgtgatcttggtgaaaaggaagctcttgataaaattcgggccgacctaaacgccaagataatggttattaatagttccaccgggagtgatacccttcctctgaatgttgccgaaataattaagtctcatggtagtcctaaggctgtcagggtcactaaatcttcactgggagtgcaaccaattcctcgtaaactggcacaaaatctcgcagccagtactaaagaggtttgcaacagattacgagcctcccttccctcttcgtttgatctcaatcagattggacccaacgaaaaaataaatattgaagttgacagacatctaattgaacttatatttaattcagatgactctattcgtggccatgaagctaagctcgagcgtaaaacaacaaagggaaaactttctagttctgccccatcagtaacatcagaggtaaactctaatgcgctgccagctaatgatcctatggaggagcccgcttcagaaagtcaggaaaatgaattttcgctattgaatttacattccgcagtttga

SEQ ID NO: 168452 - DNA, 129 bp, Enterobacter cloacae; identical to SEQ ID NO: 95522

SEQ ID NO: 168453 - DNA, 522 bp, Enterobacter cloacae; identical to SEQ ID NO: 95523

SEQ ID NO: 168454 - DNA, 2439 bp, Enterobacter cloacae; identical to SEQ ID NO: 95524

SEQ ID NO: 168455 - DNA, 213 bp, Enterobacter cloacae
atgaggcttaaggtatctgactgcgaacaagggggttgttttcagctgctgcgcatcaggaatccgctgaggcttaagatatacgactgcgaacagggatcgtactgcatatgtggggcatcatcagaatttagaggcttccgggatgtagctgcgaataacgggatgattttattcatacaggtcttcatgagtaagttaagtcacaagtaa

SEQ ID NO: 168456 - DNA, 414 bp, Enterobacter cloacae; identical to SEQ ID NO: 102206

SEQ ID NO: 168457 - DNA, 792 bp, Enterobacter cloacae
ttgaatcatcctgtagagtcagtatatagcgctctgacgagtattttattgccctatatgggtgagcctgtgcctgtgcaacgaaattgctcatgctgcggcagagctccctcagagttcgacggggtaggcttcgagctggtcaacgcctacagggaacgtgttgtgcattgccgcccttgccagacattttttgtttctgctccagagctgatgggcgtggagaaccccaaaaaaccaacaaccggccagaaatttggcatgtggtctggtgttggggctgttattaacgttgaagacaattcttcggttcttttagcccctcagggagtggtcaataaactacctgagcattttttcgatcacgtagaagtcatcacggccaccagcggtcagcacctggaatacctgtttaacaccgaacttaaattcccgctgatttatattcaaaacttcggcgtgaaaacctacgagcttgttcgctcactgcgggtcagtctgagtgccgacgcaatttatacctgtgccgatcaactactgacccggcagaacgaagtcctttacatgctggatttaacaaaggctaaagaactccatcaggaaataaaaaactactccaaaaaagagatagacatctttatcagaacagtaaccctgctggcctattcgcggataactcctgaagctgcctcgaatgagtttaagaaaaacaacctcattccgttactgctgcttctgccgactgatccccatcaacgcctgagcattttgcacctcttgaaaaaggtataa

SEQ ID NO: 168458 - DNA, 567 bp, Enterobacter cloacae; identical to SEQ ID NO: 95512

SEQ ID NO: 168459 - DNA, 1875 bp, Enterobacter cloacae; identical to SEQ ID NO: 95513

SEQ ID NO: 168460 - DNA, 708 bp, Enterobacter cloacae; identical to SEQ ID NO: 23269

SEQ ID NO: 168461 - DNA, 1032 bp, Enterobacter cloacae; identical to SEQ ID NO: 95515

SEQ ID NO: 168462 - DNA, 423 bp, Enterobacter cloacae; identical to SEQ ID NO: 95440

SEQ ID NO: 168463 - DNA, 261 bp, Enterobacter cloacae
atgacactcactgcatattaccagctaaggaatacaaaagccgcaggtcttggtttcgaattgctgaccagtgaaccgggagcctttattgtgctggaagaatgcagttatgagaaaccgtatgaaattgcccgctatgggcataacgggagtgcaggcgatcgttcgaatgcgttcagctgcgcgatgaataaagcccgtagtctgcagaattacagtggagcaaaactggattacaacgtttacgaagaaactgcctga

SEQ ID NO: 168464 - DNA, 975 bp, Enterobacter cloacae
atgaaaactcaaaacacaccagccactcacagcgacattctttttacccatatcgtgaatacgctggtggaccttgctaaacatgaaggcactctaatgacgtttgaaggccttctgcggcacggtatcgaggtagatgaagagatgatggatagcatgctgggggtgagtcaggactcagctgctcagtgcgtggttcagctaagggattgtggtgccataacgagccctgcggtatatgaaatggttaaacacgttgagcaactggccatgcgtttagccccagactggtggaagcaaatcgtgccatggtcggtccagccgctgcgttattacaagaaagaggctatggcaaaacgcgaacgatttattgtccgtcatagggaacggcagtaccccttcctcgtatacgtaactggtcaggtagagtatccggaagatgacccgctgtatggcacgtacgttacagaaggtacgttcctggtaggtaaagcgaaaaccatacatgatgcccttgagtgcgcaaaagaagcttttacgcggggtgaatggattgtccaggatgaagaagggcgggatgagttcattgaccatctgacaggacgtgaccaggggccggtgagtttttccgaaaggactatagagatccgcgataagggtgacaggctggtgttaacaggcaatgcccgcacactggagtggcaccgccatgtaaccagtccttatgagatcgaaaagataaaagcacagcaaaaagacctctatcagaaagcaagctatgagagtggctgggacaactacgagactgcacgacagctgcggcggcaagctgaacagttatctctcggttttgttgaagaatgctggcgtaaccatccggaagtaattcaggcggtagagaagttcgagtatccggtgtttatagatgaggagatggctctttttaatgcagatcaggatgctggtattgactga

SEQ ID NO: 168465 - DNA, 378 bp, Enterobacter cloacae
atgtccaggttcctgaagggtgttggtttgggtatggcgggcattgtgttactgctgtgcggacttatcgcgctgtattattttgagtcgaaagcagcgctcagagctgatatcaaggcctgtcccacggttgcagctggtcaggcaaccgatgccgtcattcaggacatactcgtgaacagagagcgcattttctctaagccacagctggagcgtcgggacatagtgattgaagaactgaacgtccagataggctattcaggaacccttgtccctttcaggatcaacggtgtcgatgatcgccggttttttggcatgtcgggatgtgcctctctcgactctgttgaatatgccacagagtttttgacccagcattag

SEQ ID NO: 168466 - DNA, 297 bp, Enterobacter cloacae
atgaagataaatataaaggatgccccatccaggtcagaaaccataatccgcaatattgcttacgctgtaagagcaacggcgataatgacggaatattatctgcgctcattcccggtcgtgtttttttatgtactgataggatttgcattagcatttgattcctcggaggtacctttgactaccctgctgcaacaaggaatgttaactaacattctgacctgttcggttttgggtaacctcctctggctgggtgttaatttggcattaagaggggactccgttttcaaaaacctgtga

SEQ ID NO: 168467 - DNA, 1068 bp, Enterobacter cloacae; identical to SEQ ID NO: 95443

SEQ ID NO: 168468 - DNA, 348 bp, Enterobacter cloacae
atgtatagccgtttcatgaacgatccacttgatgaggaatacctgctttcccctggtattgtgggtttctatgctgatggtgaaatctcggcagaagagattgaggtaagggaggcggtaatacgattcaaagtcgcaggcgatcagatgttgtccatgaatctgttccacaggctgtttcattaccagcgttacagggaggttagggcatcattcaacaaaagcaggttagcgctggtggacatggttaatcgttccccattccacaaagcagcaatgcggcgtatctacagtgatttgccggagcaaagcattgcccgcagggttctgcttgattttattggatag

SEQ ID NO: 168469 - DNA, 261 bp, Enterobacter cloacae
atgaaaatagtatcatttgtaaaattagatagattcaatgaaaaattaaacgacggtaaagccgttatcctcgctggttcctgtaaagacgtgaaacctctgaacatagcgagaaacatcatcgtaaggtcaacgccgctcaatgagcaaatggcaggctggtctgatgaagaaaaaaataagattgcacttgctgtatacagcagggtcttccccgatcatggtgggaagactcagaacgccatattcagttttccatag

SEQ ID NO: 168470 - DNA, 267 bp, Enterobacter cloacae; identical to SEQ ID NO: 95497

SEQ ID NO: 168471 - DNA, 399 bp, Enterobacter cloacae; identical to SEQ ID NO: 95496

SEQ ID NO: 168472 - DNA, 819 bp, Enterobacter cloacae; identical to SEQ ID NO: 95495

SEQ ID NO: 168473 - DNA, 495 bp, Enterobacter cloacae; identical to SEQ ID NO: 95494

SEQ ID NO: 168474 - DNA, 1272 bp, Enterobacter cloacae
atgtctactgttaatgatgtgattgtatcttatggaggtgacagcaaaaggtattcaagagacttccagacaaaagaagaatttaaaaagagctggtacgccgtattgtcacgggtgcatgcttcggtagaagcgaaggtaagctgtgcctgtaaaggaaaaggaccaaaatcacttgccgtaaaatatcactcaggcggtgatacttatttcctggcacggtacccgaatacgggtagtcaacattcacctgactgtattttctttacgcttgataaagacaattcaggtctaaaatgctatacacaaggtgtcgtcaaagaccttaaagatggaggctacggaattaggttagacgtggcattagcctcatctgactcggagtcgacctcgatcgtaccgatagataacaggaataaatcaggtggtgtttctcagaatagcatgtcattgctgggtcttctccagttcctgtgggatgacagcggtctgaatcgttggtatccgaaaatggccgggaaacgtaatcctggcaaggtgttcaaccttataacccactctgcggaaaaaattaaagtcgcatcacatccgctgtccatgcatttacttgcaggtgcatatccttcgacacctcaggagacaaaaaacataaaaatgacatcagaggcgctgatgaataaagagcgtctgatttgcctcaatgtactatctaaatataaccctgaaagacactcgaatgcatcaaaacgacttccgataaagtttttttcaggtgttccagttgtgctgatgaatactgagaattgggcatcactggagaagagattcagctctgaaatagcaaactggcgttcaggaggtaacgtaatctgtatggctataggtgatctgggtaaatttaaggggaaagatacatactatcttaaaccacttcagatagcattgatgaatgttgatgaaaactggatcccggcagactcgagttatgagctgaccatgctaaattatcttcataagcatgagcggtcatttatcaaacccctgagatacgatgcttctaataatgatgttttcccagatttttgtctgacggatattggggggcatgaactgtttcctattgaggtatttggtatggatactgcttcatatttggcgcgtaaggcgatcaaagaaagttactataatgaacgatatggaaaggatggttgggcatcatgggttgcaccggctggccccctaccccatttgcccgataagggctgcagttaa

SEQ ID NO: 168475 - DNA, 519 bp, Enterobacter cloacae
atgagcaccggcagcggatccgtttacccgccagcgttgaggatgagcaccggcagcggccccgcttacccgccagcgttgaggatgagcaccggcagcggcccactttccccgccagcgttgaggatagccaccgacagcggccacgcttacccgccagcgttgaggatagccaccgtcagcggccccgtatgcccgccagcgttgaggatgagcaccggcaacggccacgtttacccgccagcgttgaggataagcaccgtcagcggccccgcttacccgccagcgttgaggatagctaccgtcagcggccacgcttacccgccagcgttgaggatgagcaccggcagcggccccgtttacccgccagcgttgaggatgagcaccgacagcagccccgtttgcccgccagcgttgaggatgagcacctgcagcggccccgcttacccgccagcgttgaggataaggggtctgacgctcagtggaacgaaaactcacgttaagggattttggtcatga

SEQ ID NO: 168476 - DNA, 885 bp, Enterobacter cloacae
atggccaatgataacaatcagttagcgctaatcatcactgaacaagataaaagttctggtgaagttatacatttggttcctaactcaaaacagagtattcaacccaaatcgctactgcgattgggggtctttgttccgacagtcaaggatggcagtgaccctatggcacgaggtcatgtcatcgatgcaacgactgagttgtgtcgtctttcttctatcgctggagaggggtacgaaaagataagtatttttgggcccaggcttgatatggatacggatttcaaagtctggctagggatcgtggacacactcgccaacacatttcttgagcctgatgggactgttagggtcaattttattgattttgctttcagttgtgggcttgctacaaaacgagttgattcaaggttaaggaaacgttttagcgactcactgacacggatccagcacacccatttccagttcatcaaaaactcaacagtagaagggaaaaaagtaaagatcgacatgagcctggtgtctacttcttactatgatgagggaaccgatgaggtcattatcaggccaaatccggatttgaatactctgtatcgtgtcgacgggaagacccgactttacttaaaaatattgaagaccctgtctcgaaaagaatcagcccaggcactgtatctttatctagttgaattacctgaccatttttatcgcattggattcgaccgcttaagagaacggttgcagctgacttcacacaaaggtgctcagaatgcgacgataaaaaaagcgttagagcaactggatgaagctggttttttaaaatacacgatagaaaaaaatcgtggggattatgtactggtcattcttagtcgaaacaaaaaagttacctga

SEQ ID NO: 168477 - DNA, 213 bp, Enterobacter cloacae; identical to SEQ ID NO: 95388

SEQ ID NO: 168478 - DNA, 279 bp, Enterobacter cloacae; identical to SEQ ID NO: 95387

SEQ ID NO: 168479 - DNA, 147 bp, Enterobacter cloacae; identical to SEQ ID NO: 94144

SEQ ID NO: 168480 - DNA, 483 bp, Enterobacter cloacae
atgcgtactcataaactgaacaagtcacgtaaactatatcgcagtgataatacaactacgcggcattattcaattaatccggggggggagtatcgctgggggcgaaaccgtaaaaaagccgaagacgagctgctggcaaagcgcgagacaatgcatggcaggcaaaagagaggccgtgactataccccattgttttactttctcgtcaaacagattggccaaccctgggataaggtattcagcgaagtatgtggtcgtcttgatacaacagagcctgttttctggttggtcgcgctgcatgagcatcagaaaagagatttggtacgtatcggtgacagcagcttttatccgggcctgtttgttgatggaaatggaatcttacaacaggtaaacccttcgattacgggaaaggacgttaaggtaacttgccgttgctgtacccacacctatatgggggagccagtcccagggaagtatgagtaa

SEQ ID NO: 168481 - DNA, 1500 bp, Enterobacter cloacae
atggcaaatataattacatgcaaaactaaggatggaaaaaccattcagtatgtcgatgaagtcatcggctctggctcaatgaaagacgtttatttttctccggataaatcatatgtcgtagccttctaccataaaccgcagaatgaacaggcccgggaacgtatcaacatgatcaccgggaggtaccggcagaatatttttgagcagacgggtggagattactggaaaggtctcttctgctggcccactgatgtggttgagcacgctgataaggtgggtattgttgtacctgcttaccagcagcatttcttcttccgatatggttccaaaaacaatgatttcctcgggatcaaaggacgagaaaaggaagggaaatggtttgccagcgcgaacaatcagaataaatttctggatccgcgtgaacgtggcaatacgcttaactatctgaaggtctgcatccttctaacgcgtgcagtcagacgaatgcatgctgcgggcctgtgtcatagtgacctgagttataaaaatgtgctgatagatccggaactaggccacgcatgcattattgatgttgatgggctggtggttccgggaaaatatcctccagacgtggttggtacacctgattttattgccccggaagtggtgaagacaagccatctccccaaagacgatccccgccgcgtattgccgagtatcgctactgaccggcatgcactttcggtactcatttacatgtatcttcttttccggcacccgttacggggagggaaaattcacgatatcgatgatgaggtcagggatgaggcgctttccatgggagagcgggcactttttatcgaacacccgactgacagaagcaatgcagttaaggttaatcaggtctcatcgttttcgctcccgtgggcagatcctcagaaaatcccgtacaccattatggggccctacctgaaacctctcttcgaccgggcttttattgacgggttgcatgatccgtcgaagcgcccgacagccgatgaatgggagagcgccctggtaaaaaccgttgatctcatccagccatgccagaacaatgattgtgaccagaaatggtacgttttcaatggcaagaccaaacccgtttgtccctattgcggtacaccgtacaaaggcaaactccccatcctgaatctgtattcgtcgagaaaggctggaactttcaggccagatgatcaccggcttatggtgtggagcggtcagtcattatatgcatggcacgtcaaccgactgattgctcctaacgaacgaaccaccgatgagcagaagaaaagggttggttatttcgtcttccataatgaccagtggtggctggttaacgaggggcttagcgggctcatatcacttcccgatcggaaaacggtcggcattggtgaaaagttgctgctggaggacaacacccagttcatcctttcttcagaggatggtggacggctggtagtggtacaactcgtggtgaattaa

SEQ ID NO: 168482 - DNA, 1734 bp, Enterobacter cloacae
atgagcgagttcattacacctgaacataaaattattgctctcattctggaggcatcaggggaaccgactgatgctgataaagtatgctgtcttggtaacatacctgatgttgcccttgctgtgcggcagctgagagaaacggtcattcaacactgtgcaagcgaagccataccggcggagaacactcaaacagtttcagaacgtcttacccagcctttttctgacaatatcctcccacctcaaaactctggtgaaagcgaagctgatcgacctgagattgaacccgtccatgccgctactgcacttcagggaaatgataagcaggaagcgcatagtgaaatggtggatgatacagcgtcagaaggcgttcagggacacactgaagaagttcctgatgcaaccggggtcttacagactgaggcttccgtcacggcgcaaccagaagacatggataaaaccagtccggttgtttctgacaacctttcagctgactccgcagtcagtgctttacggcccggggaagtacctcagagagtggagaataaaacatcccctgcccccggaaaagtgccggaggtgtttatcatgctgccaaatgcacgggcaggtgaaccctacgatgttcgactggaaatagcgaccgatacaggtgttgaggcagagatcacggaggttaacttctctcaggacatagggctgatatttgatatcaatgagcgacgcctacaggggacaccagggcagagcggagactttgaactgactgtgaaatggtcatgcagctcacatcgtgataatgaaaaaaagttactttttgtcgtgaaccctgatccgaaaagtctctggaaagtgattgacccgccttctgatgcaccattctacaagaagagtatcgaccaccagagtgtctgtcggtcaggtattcatattgccggagcaagccgtcgtggacgctcccatgaacatgtaggctcttttcgtgacgacgattattacctcaacttcagtgatgtatccggatggagtgtattactggtagctgatggcgcggggagcgctaaatattcccgggaaggctcccgtatcgtttctgaaaccgttggtaactatctcttcaaccagttcaagactgaaaaagggcttgagatcaaaaacagggtccttcgctggaacagtgaagatcagcgagcagtatgggagtttatgaaccaccacttccgacaggcagcggtactggccgtaaacaatatcagcagtgccgcaattttggctgaagataaagtaaagtcattctcaacaactttactcgcgaccgtcacttttcgcgacggtgccgatctgtttgccgcgtctttctggttaggtgacggtgcgatagctgcatatggacctgctggcaaagtcagagtgcttgggacaccggatagcggagagtatgcaggtcagacgcggtttctggatgccgatgccgtcagtgatgccggattcagtaaacgtatcagtatcggtaagtggaacgacatatcgcatctggttctgatgactgatggtgtttccgatccctggtttgagacggataacgggcttcagaatccacaaaaatgggacaggctgatggccgagctctctcccctactcacagaccctgaacatgcctcggcacaactggtggagtggcttaactttttctctccgggaaatcacgatgatcgcacaatcattgtgctctggtga

SEQ ID NO: 168483 - DNA, 1041 bp, Enterobacter cloacae
gtgagacgacttcccgttttttttgttctggactgttctgagtccatgattggtgaaaacctgaaaaggatgaatgatggcttgcagaagattgtgagcgatctgcgtaaggaccctcatgctctggagactgtctgggtgtcagtaattgcctttgccggtattgccagaacgattgtcccgttacatgacattgtgtctttttatccccctcgccttcctgttggtggaggaactaacctcgcgactgccttacgggaactgacaacacaaatagattctcaggtccgaaaaacgacgctggaagaaaaaggtgactggaagccagttgtctacttacttactgacggccgaccgacagatgacatttcagctgaggttaagcgctggaacgaattttacgcaaaaaaagtgaatatgattgctgtggggatcggaccatcagttgatctcagtgtactcaggcaactgactgaaaacgtcttatcgtttaccgaaaatcaggaaggcgatttttcgcggtttatccagtggatcacagcttcagtcacagctcacagtcgtagtgttggcgaggattctcagccgcccctgaaacaaactgactatatcgtcaagcttgccaaagatgacacagcccgtgcatacgatgaaaactgtgtggtattaaccgggcgttgcagtaaaacccgtcgaccctatctgattaagtatgagcgtccgccagccagggtatcgggcctcgctttcgatctaaaccttaacagcttcaacattgctggttgttatcctgtggatgaagattacttctcatggacggatatgtccgtagccggggcgcagataaacaccagtgaactccatggcgtaccagggtgcccacactgcggaaacagtagtgcttttgcgatgtgtacctgcggaaaacttctctgtattgatgggcctgatgatgtgaactgcccatggtgtgggaaaggtttgtcctttcagagcgagggtggaaattcagattttaacgttagcagaggacgcggctaa

SEQ ID NO: 168484 - DNA, 639 bp, Enterobacter cloacae
atgcgaagactacccgtatatctgctcatcgatacttccggctcaatgagaggagaatcgatacattcagtgaatgtgggtgtgcaggctatgctgagtgccctgagacaggacccttatgcgcttgaaagcgtccatatctcaataattacatacgataatgaagcccgggagtatgttcccctcactgccctggctgactttcagttttctgatatagaagtaccaagtgcgggcggcacctttaccggcgcggcgcttgaatgtctgatccagtgtgtcgaccgggatattcgccgctctgatggtgaacagaaaggcgactggagaccgctggtgtttctgatgacagatggtactccgtcagatgcctgggcttatggggaagctgttaaagaggttcagcggcgttcgtttggctccattatagcctgtgctgttggccctaaagcgggacacgaacatctgaaactactgactgacaaagttgtggctcttgaaacactggattcgaccgcattttcaggctttttcaaatgggtcagtgccagcgtggcttcaggaagctccagtgccggagtcactactgattcggacacacttccaccaccaccacccgaaatccagcttgttctgtaa

SEQ ID NO: 168485 - DNA, 642 bp, Enterobacter cloacae
atgactgtcagcttacggaaagggcaaggcgtcagcctgcgtaaaaatgagttcgatctttcctcagtcacgataggtcttggctgggacatcaatgaagagaaaaaagggttcctgggcggaatttttggcaaaaaagaggaagagtatgacctcgatgttattgcctttctctgcaacgcagccggtaaagtgactgaccttggcaatgttgaaaatggtaagccgacactggttaacggcgatatcgtcttcttcaacagtcttcgccataaatcagggcagatctggttgaccggcgataaccggacaggtgccggtgacggagacgatgagcaaattatcgtaaaactaaacagcatcgatccgaagtacgaaaaaattgtatttattgttcagatctacaacggcgaaaaattacagcagcactttggaaaagtgcaaaatgcatttatccgggcggtagacggaaaaaatgtggaaatggcacgctttgacctctccggcggtgtagcctttaatggtcagcgatcgatggtctttgctgagcttgtccgggaatccagtggctggaaactgaatgcgataggcgagccttccacctccgattcgttcgtaagccatctgaggaactatatctaa

SEQ ID NO: 168486 - DNA, 639 bp, Enterobacter cloacae
atgagaagacttcccgtctatctgcttctcgatacatcaggttcaatgcacggagagcctatagaggcagttaaaaatggtgtccagacactactgaccaccctgaagcaggatccttatgcactggaaactgcatatgtctctgtcattactttcgactctactgctcgtcaggccgtacctcttacagatctcctcagtttcaatctcccctctttttcggcaagcggaactaccgctctgggcgaagccttatccctgactgcaaaccgaattgatgcagaagttcagaaaacgacagcggagacaaaaggcgactggcgtccactcgttttcctgatgacggatggtggccctactgatgactggcgtaaaggacttaatgaattcaaagcagccaaaaaaggggtagttgtcgcatgtgctgccgggcatgatgccgatacggatgtgcttaaggagatcaccgaaattgttctccagctggacactgccgacagctcttccatcaaagcttttttcaaatgggtgtctgccagtgtttccgtaggtagccagaaagtcgatgccggtaaaaaagaagttatcggtcttgatgatttgcctccaccgccgccagaagtaaacgtggttttataa

SEQ ID NO: 168487 - DNA, 459 bp, Enterobacter cloacae
atgcaattaaacaccagacaggaaagagtttacaccctggctaacatacttggctcagggaagcctgtatcggcgcaatccatcaccgcgacgctggcctgttctgagccgacactaagccgggcgctcaaagagttgagggaaacttacgctgctgaaattaaatacagtaaggctggccactcctatcagatggtaaactccggattactggataagaaaacactaaagagaatgagtgaggcgctggaccttaattctgatttaaaaacacatgaccagggggcacgggtagtactggataaggatataaaaacttccgtttccctgtcgataagacgccgtgttcttcgcaaaattgacaaactggctgcgctaagcggtacatcaagaagcgaggcagtagaaaaattagtagagttaaaaattgatgaaattatcaatgaaatgaagaaatag

SEQ ID NO: 168488 - DNA, 1224 bp, Enterobacter cloacae
atgggattcagatttcgtaaatcgatcagcattatcccgggggtcagggttaacctgagtaacggggcccccagtctgagtattggcccccgtggagcttcgctgtcagtgggaaagaatggtacgtttgccaacctgggccttcccggaacgggactgagttaccgcacccggattgacagaacagcacgggaaagagtgaataccaggcatcaggcagatcccggtctgaggtctgaactggagctggtggtggaaaaactgatgtccaccgtaacagcgataaccaatatccatgaactctccccttccccaaagggagggaatacctgggccacgctcgagacacagtacctggcgctccgtcagggcagtttcactcttcctgcgccggtacgaccaaacaaacctgaatatataccacttccaccagaacctgatgagcatgccggtcgcggtttccttgggggatggtttgaatctgatgcagcccgacaggagcgacagaacgaaaatcttcggcggtggcaggcgtccgtcgctgatattgaacgtgaaaatgcgttgctgaaacagcgttatgagaaacagcgtatagcctgggctgagcagtacgcagaatggcaacatcagtaccaggagcatgaaaagaattacacgcagtctgtagccttagcgaaagagcaattccgctctgacgcccgcttctttgaacattgtcttgaggaagttttctcgcaaacagaatggccgcgagaaacgctggtgacgtttgaggtacggcctgaagaatcaacagtctggcttgatgttgatttacctgagattgaggatatgcctgataaagtgtatagcgtgaatgcccggggcactgatatcaatgaaaaagccatgacacagaaagcggtccgggaaagttacgctaaacacgttcacggatgcctgctgagattagcagcaatcgtttttcagacgcttccgtttgaacaggccgtcatttcaggcttcactcagcgggtgagtaaacgcactggatatcttgaagatgagtacattatttcctggcgggtacgccgctctgaaatcgagctaatcaacttcggaaatctgcgtggcgttgaccctattgaagcattgggtgatcgaggtctgatcaggaaaatgagttcaacttacatttttcagcctatagaaccactgacccagatggcaggtaccgactga

SEQ ID NO: 168489 - DNA, 957 bp, Enterobacter cloacae
atgaaaaaacaacccaccccatgggaactcggtgccacgctgtatatgcctgccacacgcaaggatatcgctgaggtcgttctggaaaggaaaataccggggctgcgctctctggttgtctgcctggaagatgcggtcagcgagcatgacatccctcttgcgattcagaatctttcactgtttttgaagcaattgagacacgcaagagccgtcaacgatgatgagaagtacccactggtatttatccgaccacgtcaccctgatatggggagatggttaacgactaatttggacctgagtgcagttgatggttttgtactgcccaaattcaccctttccacgctcccggtttggtgggacatcatggcaggaacatcattgatgatgatgccaacgcttgaaaccgaagaagtctatgatgttattaaaatgcaggcgctggcaaatgaactttcgagtcatgactgccgtgaccgcataatcgctttgcggatcggcggaaacgatctcatgaacgtggtgtctctgcgacggccacgggatctgaccctttatgacactcctatgggttatgtcataaaaatgcttgtgtcagtattcgctcctcgtgattttgcgcttaccgcaccagtatgcgaacacatcgacgatcacggcgttctgggacgagaactctctatggatatcgcccatgggctggtgggaaaaacggccattcatcctgaacagattagtgtgatagaggaggcgcttaaagtgtctcctggtgagcattcagatgcgttacgaattctgaattccacccaggcagtcttcaaatctcagggagcgatgtgtgaaccggccacccatcgccggtgggctcaggggatcctgggacggggacaggtatacggtctgactacggggcaaaatccggaaggaatcaggcttattccagtttctaagcagcactaa

SEQ ID NO: 168490 - DNA, 1080 bp, Enterobacter cloacae
atgtcgcattttgccccgttttctggttcctataaaccggacgatgttcactttttgctgaaacccattgtcatggagatgacaccggttgacctgaaggaagaactgattcagtcaggaaaaatgcattattccgacatgttaagccaggaaccagagccgacccgctggcacctggatcttttcacccgtgcgcttgactcgggagctgcacgtctggcacgggaggtatcttatcttgctcgtgaactggcccgtcgtgctggcgatgaacccattgtcctggtcagcctggtcagagctggtgttccactgggggtcatgctgcatcaggctctgcgtgcgatgggaaaaaagtctttccactacgggatcagcattatccgcgacagaggtattgatgctgcggcgcttgattttatcgaatcacgccatggtactggcggcatagtgtttgtcgacggctggacgggaaaaggagctattaccggcgaattatcccgcactctgaaggaccgtcccggttatccggagcagccccgactggttgtgctggctgacccctgcggatgtgcctggcttgctgccagtgacgatgactggcttatcccgttcggtatcatgggcgcgcctgtctcgggtctgatttcgcgctctgtctgggccgaagaaggcctgcatggctgtgtggtttgcgatcaccttcagtcttttgaatgcagccagatgctggtggatacggtagcaaatttccgtgaacagcttgacggtaaaccccttcccgcttccggctgggacgcagggaaaaatgccgcacgctggcagctgagcagaaaagttatccagagccttgctgcgcgttatgaggtggacagcattaaccgcattaagccgggtatcgctgaagcgacgcgggcggttctgcgtcgtgtacctgatcatgtttttgttcgccagatggatgacccggatgtttctcttctggttgggctggcaaaagagaaaggtatccaggtgacggaagccggggatacgctcggtcagtatcgtgcggttaccattatcaaaaaggtacgctga

SEQ ID NO: 168491 - DNA, 774 bp, Enterobacter cloacae; identical to SEQ ID NO: 94132

SEQ ID NO: 168492 - DNA, 1155 bp, Enterobacter cloacae
atggagacagatatgtcagcaattgatggtaatttcgtttatcaaaagacattatcctgtgggcgaattgaggtaagcagcgaggaaaccgattatcctcttactgatctctttgatatcgccgaacggcggaatccaaaacgcgcatttctgtttgtcagtaaagtgctgggtcgacatattcctgtctctcctctggtcatgcgcaatgtttatacacagctggcggagaagtttcccgggactctggacgggccggtggtatttatcgggatggctgagacggctgtcggcctcggggcgggagtgtttgatgaggtgcgcaagcatcaccctgactgtgtttatctgacatcaacccgccatccggtcgatgccgaactgttgtgcgagtttaaagaagagcacagccatgcaacagaccacctgatctactatccagtttctgctgccatgcggcaaaccgtagcggaggcacaaacattagtgctcgtggatgatgaagccacgacagggaaaacgttcctcaatcttctcgcctcattacgtgcatcgggtgcactccggaaggtacgacgggttattgctgtcacgctgactgactggagcggagaagcactcagtcagaacagccccctgcccctgcatacagtatcgctcatctccggcaactggcgctggacacccgaaccggatgccacgctgcctgtcatgccccaggtaaatgtgacctccagagggaacatcccgatcaccggcaaacaatcctgggggcgactcgggatgcagataccggcgagtgacctggctctccaggttcaggtttcgcacggtgaaaacattctggtactgggcaccggtgaatttgtctgggagccgttcctgctggctgagcgacttgaagcggcaggtgctcaggtcgtgttcagttcgacgacccgctcaccgatttccactggttatgctatccagtccgccattgctttcagcgataactacggactgggtattccgaattatgtctataacgttgctcatcagcagtttgaccggatcctgatttgttgcgaaacgccagcttccagcgtggacccccggctgcttgaggcgctttcctctgttgctcccaccgtagaggtgattacctatgaataa

SEQ ID NO: 168493 - DNA, 1059 bp, Enterobacter cloacae
atgaaaaagaaaatttggtttatggaagggctatcttcccagcgagacattatccttggagtgaaatcatttgcggaaaaggaaaatcatgatattgaaatcttttcttctcatcgcaacgagaggaaagagatcttgtctgtttccgatttttcaatgatcgaacctaacaacgaagaagaacgtctttcttttattcattccattactgacgctcatggtattaatgcgatacatactggtcgcaactgtaaatggtttgaaagccaccgggaaaacattcaacgttctggtgtccacctgactaccgggtcaacggggactcactggtttgaattagccgatgaaaaagttactttttccgagtttatggaaaaaaatggacttccggttgtcccgtcggttcgggtaaaaaatgtagacgagcttcgtactctgctgagtcatccccctttcccttctgattgcctctgcattaaacctgttacaggcatttatggcatgggattctggcgttttgatgacaatgtttccccggtagcttttctcaacaatcctgatagccgtgttatccacccatcacagtatctggctgctcatgcccggatggactgctttactccacaagtactgatgccctatttacccggaccagaatactctgtggatatggtggtaagtcaaggcacggtcctggccgctatcgggcggcgtaaagaaggtgtgcttcagtatctggaaaatgaaggggaagcgattgaacttgccatcaactgcgcccgcctaatgaacgcagacggcatggtcaatgtacagactcgccataatgccgaaggcaaaccactattgctggaaattaacatgcggccatcaggtggtatcggttatacgcagcacagtggcgtgaatcttccgggtctgtatgccttccatacacttgggctgatggatgatgatcaggtcaggcagtcagcgaaaactgatttttcacctgcagtcgtccgctctgttaccgatgtcattttctatccggcatcattgaccaacaggattgattaa

SEQ ID NO: 168494 - DNA, 585 bp, Enterobacter cloacae
atggtttctttaagtaaaaaccagacagtatcactcagcaaacaatccactgctctcagccagcttcagttcggactgggttgggatcctgttaagaaaaagggattatttggcagcatttttggtggcaatgattccatagacctggatgcaggttgcgttcttctggatgccgcaggtaataaaattgacaccatctggtttcgtaaactgaaatccagctgtgggtctgtcgtccactccggcgataacctgacgggtgagggggatggcgatgatgaaatcattcacgtcaacctcttaaaattgccggcaaatgtcgaatacctcgcttttactgtgaacagcttccgtggacagtccttcaacgacgtggataacgccttctgccgcgtcgtggatcagaccaataaggaacttgcccgctatcagctgacagaacaaggcccacataccggcatcattatcgcttcactgaggcgcaacaacggccactgggactttaccgcccacggtaaagcaagcggtggccgcacaatcgacgatatgcaattcgatatcgtcagtacggtggtaaaagcatga

SEQ ID NO: 168495 - DNA, 1152 bp, Enterobacter cloacae
atgaatctgacaccggggggcaatgcccccgtacctgctcaggaactccgcgttagagtcattgctggtggtcctgttgatgcctcggcgtttagattattcgctgatggaaaagttcggggtgacagcgatatggtcttttacgggcaaccccgtaatgaagatggttccgttagcttcagtactgaagggaccaatagcgttttcaccgttgatctgtcccgcctcaagcccgacgtgcagaaagtcgcgttcaccgttacctgtgacggcagtcatacagtttcctccctgaatcatctgtccatacaaattgaaagtggcaatacctcgctgatcagtggtcaggtagacctgaacggccgtcaggaagctgctctgatcctcggtgaaatctatcgcaggaatggtgactggaaatttcgttttatcgcccagggcttcaatggcggcctgaaacctctcgctgagtactatggcgtcaacgtcgcggatgatccagctccagtcactccgccaccagcgcctccggctccgcctaaagttagcctaagtaaagtttctctgaccaaagagaagcctgccatcagccttgccaaaaaagacaattttggtgaaatccgcatcaatctgaactggcatcgtggctcgggttcagggggcttgctgggcggtatgtttagttcgaacaaagcgattgacctggatcttggcgcattcgttgaactcgcagatggctataagtcagttgttcaggcactcggtaatgcttttggtaactatcactctgagccatatgttcaactgcagggtgatgatcgtaccggcgaggctctggatggggaatggctacacatcaatggccgcgaatggaaagaaattcgccaggtactgatttatgcctttatctatcagggcgtgcccagctgggacaaaaccgatggcgtggtgacattacatgttccggagcaaccaccgattgaaacgcgtctgactgaaggggataacaaacgcacgctgtgtgcgattgcccgcctggtcaacgagaacggttccattcgtgtggaacgtattaaccagtacttcagaggccaggaggaaatggaccgcgcttttggctgggggtttcgctggtccagaggttccaaataa

SEQ ID NO: 168496 - DNA, 1242 bp, Enterobacter cloacae
atgcaattacaatcaggacagaacattccgcttcacacagatacactgactctccggcttgattatccccccagtcctggatttcacagtacccctgagacttgcctgtttatgctgaatgctgagggaaaagtgacaggcgatgccgattttatcttttacaacaatctcagtgctgccggtggcagtgtgaaactcaacccaggtcaccagcacgcagtcgttcattttgcgcttgaccagataccggatacgattcagaagattgcaatcactatggtgatagatggcagtgatacgataagcggcctcgcgcaactgaaactttctgctgaaagtcaggccaccttttttgtcgatctcaatggccgcacagaaaaggctgtaattatgggggaagtttaccgataccagggcaactggaagctcagggcgcttgggcagggatttaatggcgggcttgagccactggcagtcagctatggtgtggacgtggaacctgcagcagaagttgtaccgcaacccgcccggatcagccttgaaaagaaactcgaaggtaaagcgcctgcgcttatcagcctggctaagaaagccagtatttcactggcaaaacacaaactggataccgtcgaagcacgagtcgcttttgttctcgatgcctcaggctctatgaccggccagtttaaaaaagggcatgtacaggccgttcttgaccgtatagctgtcctgtctgtccagttcgacgatgacggcacgatggatgtatggggctttgctgagcgtcacaagaaatatcctgatgtcacactggacaatcttgacggatacattgctgacattcagaacacgggtaaacgatcggcctgggaaatccttcccggccttggcgggacgaacaatgagccgccagtcatgaatgaggttatcgattatttcaaggacagcaccttacccgtttttgtcgtgtgcattacagatggcgggatcagcaaaacacgagaaattaaagaggccatccgccgctcagccaactatcctgtcttctggaagttcgtgggactgggcggatcaaattatgggattctggagaggctggacacctttagcgaccgtcgcgtagacaacagcaacttttttgcgatcgataattttgcccacataaaggacgaagagttgtatgaaaaacttctcgaagagttcaaagactggcttggactggcaaaaaaggaaggcattatctga

SEQ ID NO: 168497 - DNA, 648 bp, Enterobacter cloacae
atgaacgtcattcagccccgcatgctctctgtttttgattttgacggtacgttaacgcggcatgatagctttatcccttttctgcggtttgcctttggcaatcgggcgttttcgcgacgtatcgtcagcatggctctacccacgttacgctgcatgggtaagcagatgacgcgtgatgagctaaaagaaacgctcattacaacttttcttactggtgttgaggaaaagtgggtgtcttctaaagcagaggaattctgtcagctctactggcatcgcctcatgcgcccggcaggtttgattgctgtggcaaatgaagtcacttccggcgcgatcgtcaccttatgttctgcctcgccggaaattgtactcagaccctttgccgaaaaacttaggatcaaactgattggtacacaattagagacaaaagacggcattctgaccggcagaatcagtggtcataattgcaggtgctcacagaaaattgtccggcttgaaaaagaatatggacctctgactgactatcatcttcgggcatggggtgatacgcggggagattatgaactcctttccgcagcgactgagcctcactggcgtcacttccatcaaggtttccgtcgtaagcttccgtcgaagctaatcatcagataa

SEQ ID NO: 168498 - DNA, 393 bp, Enterobacter cloacae
atgacaaagcaaatattacccaatgaactggctgaaatcgtcaccggtcttcttattaaacctgaactgctgggtgagcttgactcccgtgaggcgcaccaggccttcatgctggatattggacgggttattgcttatcactgtggtggactggtcaacggtattacggatggtgacgtcgcaaaaccctatctttcagacattgagtgtacccccattctccacatcgaatctgatgaccgcctgccttcgactgaacgtaacgtatggtcaaattatcatgttgaagcctgggcagacgagggacaggaaactatcctcgacagggcgatccgaaactctgacagagctgccctgcaaactctccttattgtagctgcgcaaaaaggatga

SEQ ID NO: 168499 - DNA, 759 bp, Enterobacter cloacae
atggctgactattattcagaatgtgcttgtcttattgaagcaaatcctactcaaactgctatattacttgaagcaatgaatgaattgtttgaacctgacgataattttattcaaaaactcatttcatgtgataacacaaacggcctctcagaaatggagattattgtacgtcactgtgtcctgaaccatccattcagaactgttgcagatattcctgaagacctggactggcattttgacggggataaatgccctgaaggttttcttattaacagtgatctcggagatttcaattctgaacatgctgcgctgtttgctcaggcggcacttattgcatttgacagaaatgaattgatagagttcaaaattgcttttacatgcagtagctcaaaaagacctgacgggtttggaggcgctgcttgtgtcgtgagcaaggatttcatccggtggacaggtctacacaattttcttgaggctgaacgaacagctttcgccgagaagatgaaatacttcttttgtgaatttacagaggtcgtcggtgaatttgaatatccagtatcgtttatattgcgttgcccggacagcgttattgcagcgcatagatatgatgagatacagcttaactatcgcgatggtggggaaatagatgccgaaggaggaatacaatttagttctggctctgccattaaaaaatccagtatgaaaccaatcactccggatgagttccgggtgatgaaatcgtacctgaacgtcatgtga

SEQ ID NO: 168500 - DNA, 480 bp, Enterobacter cloacae
atgaatcttgataaaaacttacctgctttagtaatgaaaaatgttgaggataacatgggggttattaccaaatatctcaagcaaacagaagataacgctcttgtatttattattggagaaacagggtctggtaaatcctgtttggctgaacttgagtttccggatgctctctacccgactgctcaacaatttgaagaatgtgatcacatttcggaaatgttcacaggttttgatgtagtgattgatgacattttccgttttgatgctgacaaagtcctggagtgtattctggctgtgcatgcttctggccataaggttctggtcaccggacaaccgtcagaccatgaattgtgcattggtttaatgtcacgcttgccagtgggttatcgtactatgtacgtgactctgatgggccatcaagacctgcaagagatgtctggcgatggcaaggacggtgatgctgccaacttactgatttag

SEQ ID NO: 168501 - DNA, 408 bp, Enterobacter cloacae; identical to SEQ ID NO: 95503

SEQ ID NO: 168502 - DNA, 396 bp, Enterobacter cloacae; identical to SEQ ID NO: 95504

SEQ ID NO: 168503 - DNA, 183 bp, Enterobacter cloacae; identical to SEQ ID NO: 95505

SEQ ID NO: 168504 - DNA, 1242 bp, Enterobacter cloacae; identical to SEQ ID NO: 95506

SEQ ID NO: 168505 - DNA, 165 bp, Enterobacter cloacae; identical to SEQ ID NO: 23280

SEQ ID NO: 168506 - DNA, 456 bp, Enterobacter cloacae; identical to SEQ ID NO: 95508

SEQ ID NO: 168507 - DNA, 609 bp, Enterobacter cloacae; identical to SEQ ID NO: 23282

SEQ ID NO: 168508 - DNA, 450 bp, Enterobacter cloacae; identical to SEQ ID NO: 95510

SEQ ID NO: 168509 - DNA, 768 bp, Enterobacter cloacae; identical to SEQ ID NO: 23285

SEQ ID NO: 168510 - DNA, 525 bp, Enterobacter cloacae; identical to SEQ ID NO: 23286

SEQ ID NO: 168511 - DNA, 288 bp, Enterobacter cloacae; identical to SEQ ID NO: 23287

SEQ ID NO: 168512 - DNA, 177 bp, Enterobacter cloacae; identical to SEQ ID NO: 95457

SEQ ID NO: 168513 - DNA, 273 bp, Enterobacter cloacae; identical to SEQ ID NO: 23289

SEQ ID NO: 168514 - DNA, 207 bp, Enterobacter cloacae; identical to SEQ ID NO: 95455

SEQ ID NO: 168515 - DNA, 198 bp, Enterobacter cloacae; identical to SEQ ID NO: 23291

SEQ ID NO: 168516 - DNA, 969 bp, Enterobacter cloacae
atgataacctggtttacagtgacatgtttctacttttctaggtcgcacgttctcatacggaatataaccatgaacaattcatttgagtgcagcaagagaaccgatatcaccgaacaaccgcagagccatgatctactcatcgcaaacggaaatgaaacggccaatttgctacgccacctggcaaataacgagatcgactccgactattttgcagttgtctcggaatgcgaaagctacgggcaagaaactgacgcagagctatcaatcacggcgtttgcccttcgtgccgctggttactttgatgcgctggtagagtcactggagaaggccctgcagcgtattgctgagctggataaagactgcagagtatacgaaaataacgtaaaaaatcttcttgaacgtgccggttcagcagagtcctcgtgcgcagaggctgctcggattcttcaaagtggtgagcgcatggcattaactcgcgctatcactattctgctggcaaatggcatgaaggtggaggctgagccagtggcggtatgcactgtaaagggcggtcaaatgtgccctgatggtgtgcacgaacttttcgccgcccctcagccaacgctggtagtgccggaagaagctactccggacagtatcgagattcttgccagcgccaggcgtcgtgaccacgctgtattccagtgggatgaagaccagcgaaatgcggccgctgattcctggaacgctttccgggccgctatgctccaggcagtcaactctccggtaattggcattgaccaggcaacaggtgctgacagaacagtggaagttcgctacgtagcacctcctggttacgtgatgttaccgaaggaaccgacaaaagagatgattgatgccgggtggctgcactacatggccaccaagaacccttcatcaaaaggcacatacaaagccatgctcgcagccgccccacaggaggtgaaatga

SEQ ID NO: 168517 - DNA, 336 bp, Enterobacter cloacae; identical to SEQ ID NO: 95453

SEQ ID NO: 168518 - DNA, 387 bp, Enterobacter cloacae; identical to SEQ ID NO: 95452

SEQ ID NO: 168519 - DNA, 645 bp, Enterobacter cloacae; identical to SEQ ID NO: 95451

SEQ ID NO: 168520 - DNA, 498 bp, Enterobacter cloacae; identical to SEQ ID NO: 95449

SEQ ID NO: 168521 - DNA, 219 bp, Enterobacter cloacae; identical to SEQ ID NO: 23301

SEQ ID NO: 168522 - DNA, 252 bp, Enterobacter cloacae; identical to SEQ ID NO: 23302

SEQ ID NO: 168523 - DNA, 315 bp, Enterobacter cloacae; identical to SEQ ID NO: 95446

SEQ ID NO: 168524 - DNA, 321 bp, Enterobacter cloacae; identical to SEQ ID NO: 95445

SEQ ID NO: 168525 - DNA, 870 bp, Enterobacter cloacae; identical to SEQ ID NO: 95444

SEQ ID NO: 168526 - DNA, 582 bp, Enterobacter cloacae; identical to SEQ ID NO: 95530

SEQ ID NO: 168527 - DNA, 294 bp, Enterobacter cloacae; identical to SEQ ID NO: 95531

SEQ ID NO: 168528 - DNA, 537 bp, Enterobacter cloacae
atggtatacacaggcataaccgaccatgccagactcagacttatgcagcgttctcgacttcctctgcatgtactcactgatatgctcgataaaagggaatatgtcgacttgggttccaagcccgggatattaaaagaacaccttctgatttatagtcgtctggatgaaagatggtacgttctaatcagggacataacatcaggaagtatcgttacggtgttaccagagaactatcatgattcttcatttattaaaattaaagagtcagataagcaatcagcatatgatttagcaaataaaggcaggggttcgcgttcggaatttattagtataaatctatgttttaatgatttcgatggttaccggtactcaaagaaaatttattccattccagtttcgcaggttgatttgtcgcaagagtcttttttaaagtcaaaattcatcaaactacttaaaagaaagattagggaaaacagtgcacgggggctttcatttgatgacaagacgattggcctggttatacacctctcttcctga

SEQ ID NO: 168529 - DNA, 384 bp, Enterobacter cloacae; identical to SEQ ID NO: 23309

SEQ ID NO: 168530 - DNA, 480 bp, Enterobacter cloacae; identical to SEQ ID NO: 95534

SEQ ID NO: 168531 - DNA, 207 bp, Enterobacter cloacae; identical to SEQ ID NO: 95535

SEQ ID NO: 168532 - DNA, 531 bp, Enterobacter cloacae; identical to SEQ ID NO: 95536

SEQ ID NO: 168533 - DNA, 1248 bp, Enterobacter cloacae; identical to SEQ ID NO: 95353

SEQ ID NO: 168534 - DNA, 1011 bp, Enterobacter cloacae; identical to SEQ ID NO: 23317

SEQ ID NO: 168535 - DNA, 2406 bp, Enterobacter cloacae; identical to SEQ ID NO: 95355

SEQ ID NO: 168536 - DNA, 2406 bp, Enterobacter cloacae; identical to SEQ ID NO: 95356

SEQ ID NO: 168537 - DNA, 2406 bp, Enterobacter cloacae; identical to SEQ ID NO: 95357

SEQ ID NO: 168538 - DNA, 678 bp, Enterobacter cloacae; identical to SEQ ID NO: 23322

SEQ ID NO: 168539 - DNA, 420 bp, Enterobacter cloacae; identical to SEQ ID NO: 95359

SEQ ID NO: 168540 - DNA, 354 bp, Enterobacter cloacae; identical to SEQ ID NO: 95360

SEQ ID NO: 168541 - DNA, 507 bp, Enterobacter cloacae; identical to SEQ ID NO: 23325

SEQ ID NO: 168542 - DNA, 579 bp, Enterobacter cloacae; identical to SEQ ID NO: 23326

SEQ ID NO: 168543 - DNA, 315 bp, Enterobacter cloacae; identical to SEQ ID NO: 23327

SEQ ID NO: 168544 - DNA, 411 bp, Enterobacter cloacae; identical to SEQ ID NO: 95364

SEQ ID NO: 168545 - DNA, 360 bp, Enterobacter cloacae; identical to SEQ ID NO: 23329

SEQ ID NO: 168546 - DNA, 444 bp, Enterobacter cloacae; identical to SEQ ID NO: 23330

SEQ ID NO: 168547 - DNA, 204 bp, Enterobacter cloacae; identical to SEQ ID NO: 95367

SEQ ID NO: 168548 - DNA, 273 bp, Enterobacter cloacae; identical to SEQ ID NO: 95368

SEQ ID NO: 168549 - DNA, 435 bp, Enterobacter cloacae; identical to SEQ ID NO: 95369

SEQ ID NO: 168550 - DNA, 744 bp, Enterobacter cloacae; identical to SEQ ID NO: 95370

SEQ ID NO: 168551 - DNA, 1416 bp, Enterobacter cloacae; identical to SEQ ID NO: 95371

SEQ ID NO: 168552 - DNA, 1203 bp, Enterobacter cloacae; identical to SEQ ID NO: 95372

SEQ ID NO: 168553 - DNA, 423 bp, Enterobacter cloacae
atgatttatcggggggcacaattaaaggttatcggtagcggcaatgaaatcatcactggcgcagtcttgtcggcctctgtaccggtactcgtgagtcatacggaggaatataaggatactccactcccgggggccgcgactgaagatgaggaagctaaatggctctctgcatctaatgagggtgatgcttcggctaaaatcatggcagagaagtccctaaagtctttgatccctggggatatagacaggccacagcacaaggaattcgtaggaaaaatagacgaggttttgcgcaatttcgacgagaaaatactgtctcttgaccacgatcttgttatcaacagaacagctgaaaagaaaaatacctacgatgctcttcagcgttgcgggcttataaatatagatccacttaataaattgtaa

SEQ ID NO: 168554 - DNA, 762 bp, Enterobacter cloacae
atgactgagtctgtaagccgcgtaatcgagttaaaggcgcttgaagaaagttctaaactgaagcatttagttggttgtgaacgttctgtaatctacagcgttaatgtcggtgatgttttcattaaggagatcaacctcgatgaggctgaacaacttcttgaagagtttcccgatattccacgtgaaaaaacgctcgatgcttttttatcatctcttgatgaaaagtttattgagttgaatattagctccattgttacgtcagaaactcttaacttcggaaaagataagttgatgaaactaggagctgttaaagtaagcaaatggcttgatctggttattgatgaggtgcatgttttttataaacgtgagcactttgttgaaacagttgaatctcgtcatcatgacctcaatgatctgtatggtaaattgaagcctttgatgaaggagtttggccttaaagataagcattatgacttaacttttaaagaaatgatgattcacaaagttaatggatttgattttgtagttgctgatttaatgccacgattgcttaagcttgaagcatcattgaaagatgatgaattgaaagccaaagcagtcatggaaacaaatcaagcgcaagaaattaaaactgttgaaaataatagcattggaaagaggttagatgttacggtatcaagagtgctcaagggtgctgcttgtcttgcttttctctatatcggatttgccagtgttatgaatttcattagctattacagatga

SEQ ID NO: 168555 - DNA, 822 bp, Enterobacter cloacae; identical to SEQ ID NO: 95424

SEQ ID NO: 168556 - DNA, 1053 bp, Enterobacter cloacae; identical to SEQ ID NO: 95425

SEQ ID NO: 168557 - DNA, 1077 bp, Enterobacter cloacae; identical to SEQ ID NO: 95426

SEQ ID NO: 168558 - DNA, 390 bp, Enterobacter cloacae
atgactctgatgactctgacggtactgatgactctgacggctctgatgactctgacggctctgatgactctgacggctctgatgactctgatgactctgatgactctgatgactctgatgactctgatgactctgatgactctgacggctctgacggctctgatgactctgacggctctgatgactctgatggctctgatggttctgatggctctgatggctctgatggctctgatggctctgatggctctgatggctctgatggctctgatggctctgatggctctgatggctctgatggctctgacggttctgatggctctgatgaccctgacggctctgacggttctgatggctctgatgactctgacgtctctgatggttctgtaa

SEQ ID NO: 168559 - DNA, 231 bp, Enterobacter cloacae; identical to SEQ ID NO: 23431

SEQ ID NO: 168560 - DNA, 1245 bp, Enterobacter cloacae; identical to SEQ ID NO: 95429

SEQ ID NO: 168561 - DNA, 540 bp, Enterobacter cloacae; identical to SEQ ID NO: 95430

SEQ ID NO: 168562 - DNA, 219 bp, Enterobacter cloacae; identical to SEQ ID NO: 95431

SEQ ID NO: 168563 - DNA, 324 bp, Enterobacter cloacae
atgacttacgcgattttcttgttagtaactgctgtttgtgcattcggattaaattatctgacaaacaaaatctgttccggtacgggtatgattaaccagagtggaggctctaatgtacacgccttacggtgtatcacatcgttcctccttctccttgtctcactctggcttcctgtcaaacctgccgtgatcaatctggcagtagagtttgctgcactggtgaattttattgcatctgtcactctctataccgttgcaaatttccgggaaaaacggagattaaaaaaacaaagaaaagaagaaaaagctgctcaaaaaggataa

SEQ ID NO: 168564 - DNA, 1068 bp, Enterobacter cloacae
atgcgacgtaatgcacaaaaatggatcccgtttggatttgatacggattcaaataaaattgttgatatcgccagcgttgaaaatgggctttcgtgtaactgtatctgcctcatctgtgggacctccctgattgccaaacagggtcaaaataaaaaatggcattttagccacagcacagaagtaaaaggggtttgtagtgagctcacactacaacatataaaaaaatacataaaggtgaaaatacaggaaaaaaaataccttgctctccctcatcttctgcagggtaaggagaaagggatagttaacctcaaaaatctcgctggtggtgggattgtttgtggccttaatgctgacctcacagggatatgtaacgatacgactatcgggatatttattaatgatacgtcggaggatatccagccaaatccagacctgttagcgcaaacagaccagctggcgctcgtggagatcgatgccgttcggattgaaagtatcatcgctccatatcgtgagaatggggaaggcataaagatgatggatgcgatagaaaagttacttttcgtttctgaggaagcgaaaaaatggatctaccatcctatgatgaagaaggttaaacaccatactttacaccagtaccggcgtgagctgtctaccagtggaaatcagatccttgctttaattcctcatgaacttccgataagcatgaacgccctcccatcctccccggcacagcagtggcatcaccttcgagccacgattaaccttctttgtcgcctgagccgttctgatatccctcaaggcagtattgcctttgaagaactggtttattatatcccccggcttctggaagcatctgaatctatcaatgttgccgcctacgaacgatggtatgacttctatatacggaaaaaaggagagggtgtactgaatgaggctgaaattgaatttttgtcttttatagtgaaaatcattaactggaacttgtccatacataaccttcccaccttcgatagcaagcaggcctttcgggattggtttttgctaaatgatcctaacaagtcgctatag

SEQ ID NO: 168565 - DNA, 249 bp, Enterobacter cloacae; identical to SEQ ID NO: 95373

SEQ ID NO: 168566 - DNA, 318 bp, Enterobacter cloacae; identical to SEQ ID NO: 95374

SEQ ID NO: 168567 - DNA, 294 bp, Enterobacter cloacae; identical to SEQ ID NO: 95375

SEQ ID NO: 168568 - DNA, 663 bp, Enterobacter cloacae; identical to SEQ ID NO: 95376

SEQ ID NO: 168569 - DNA, 309 bp, Enterobacter cloacae; identical to SEQ ID NO: 95377

SEQ ID NO: 168570 - DNA, 435 bp, Enterobacter cloacae; identical to SEQ ID NO: 102267

SEQ ID NO: 168571 - DNA, 621 bp, Enterobacter cloacae; identical to SEQ ID NO: 95378

SEQ ID NO: 168572 - DNA, 219 bp, Enterobacter cloacae; identical to SEQ ID NO: 100647

SEQ ID NO: 168573 - DNA, 273 bp, Enterobacter cloacae; identical to SEQ ID NO: 100648

SEQ ID NO: 168574 - DNA, 312 bp, Enterobacter cloacae; identical to SEQ ID NO: 23408

SEQ ID NO: 168575 - DNA, 318 bp, Enterobacter cloacae; identical to SEQ ID NO: 100650

SEQ ID NO: 168576 - DNA, 390 bp, Enterobacter cloacae
atgttagagaaaatttattaccttgccctttttctgattgcgatttgcattattcgcggtttcgttttcgcatggagcagacgcagtccattggccctgacgttgaccatcagtgccttggtgatttgtctggctttccatactctgaataactccgtagcaacaagtatggatcagatattgtccggtaccagggactttacacagtgtgacttcattgaccagcaatcagctgaaatcagcggtcgtggctatccggtcattgtcctaatgtgcgatgacggtcaacaggttgttaatgctgacgtttattcacgacagctgatgcagaatcaggattgcaacacgttcaggtcggtgacaagttgtcacttactgccagaaaagtaa

SEQ ID NO: 168577 - DNA, 507 bp, Enterobacter cloacae
atggtgccttttaatcctgttaatttgcttcaaattatgtcatctcacaagatggagacagatgatgttgcgctaatcgccggtaccgattctgttgcagtggagtcctggttcaaggatggggtcgccagtgagacagcactgcacaacatcgcatgtgcggtcggggtatcgacggaatggattcggggctttgtctccggtaaggatgaaacccttaaggcaaacagtgaaggcctgacgaaagagttgcagaatcttccccctgaagaaatcgccgttctggcaaaaagcttcagtttgcgtttgaaagaaatcagcgaactcgataaccaccagcagagccctgccgggtcgatcgtctcacttaatgaggtttacaatagtgataccgaagagatccttgctacttatcggctactgcctgaaacagaaagacaaaatctatatcgtgtggtttgtttgagacacaaagaactagcacgactttacgaacaatatatttaa

SEQ ID NO: 168578 - DNA, 1245 bp, Enterobacter cloacae; identical to SEQ ID NO: 95380

SEQ ID NO: 168579 - DNA, 3381 bp, Enterobacter cloacae
atgcctgacattatcccgcaccaacaacagccggaacgtcttcataaatttcactccctcaagggagggcaatactggcgcgcaaaaaacgatattcctgagcaatgtattgaacaggatgaagtgttgctgattgagtcgctccgctgggttgataatgcactccatactgtgatcctccgcacccatccgtcaaaatacggcaaagactttgttttcaaatttaccgatgctgctggccgtagctgccgcaccacgaaatcgtttaaagagcatcgatttctgtttaatgactttctggataaatttgaatttgcagatgatgggcaggatatccggagccaggaactgcttgcagctcaaaaccgggttagccagctgactcagcaaatgaccgaaaccatgtctgatcctgaagcactgcgtacggaactcctcggcagggttgaagcaaagaaagccagttcatcgacgccaggcgatgacaaaaagcaacttcctatggttatggagctgtcttcatcaactgagatagcgtctcttggcacagctctgtcatcaggtatcgatgaagccaaaatagcacagctccagcaggctgttgagttcagacatgaaatcgcacaggcgcaaatcgactggattaaagaaaagaataatgcgatttcgagagccgtcatggctattactccctatctggaagagtcggctgccgcccagcttgccattgccgaagaaagtcgcgaaacgctgaataaactgatggacggtataaagtcccttgacctctacatcgggaaagatgtggtggtgaacactatcagggagggtgaatcagcaccgccacacattcccttgacgttcgtacagcgtaagctggccgtcgatgaggaaacggctgtttttctcgatataggagaatggtttgattttgaaaagttgccactttttttccatgcattaaacaaccatccagggctggtggagcagatcttcccgtcacagcgctgcgtggtatgtatgaccactacccgtcgctatattgattatcaggaccgttgggctaactgggagctcaatgcaaaaaaccagacggtctttctgatggttagggacggcgaacggctgttccaggtttactctggagtagagtctcacctcggcgctcatacactttttccaaccaccgatgaacagggaaatatctttcgaggcattgacggttcgcaggttacgttcaatgacgtgtcatacactgacaagcttaaagcgcatgagatggttgctctgcattattaccggtttcttatcctgtgctgcgggctcgaccaccggcttaagctgtttggcgagttctacgaccctcaggaccgcttaagtttcgtctctatggcgttccaggagaagtattgtcgattcatttatgatcatgatggtactggccttctggacgatcctgatgcgaaagtgcgcccctctattgaggagtatataacccaggccaatagccatttgcgctcaggttcaagggtgttctgcgagtggagagctgtttgtacaccaaataccgcgccgggcgttgtgaaagtcgatactggtaccagttaccgatcctattattttaccgccgatttcatcaatgatgagggaatggcggtggcctttacccgcaacaatgagatttgcgtggaggttccggtcaaaaaagatatctaccgtcgcactcgggctaatgatgtacgtgaatttaatgcgaaagtatccctcacgaattttcagcgtgatccgtgggatgacgccagcagcgtgggattcctctgtctggacgctgtaaaagccgatgatcttgattattacatccacagccgctccagtcgtaggaattttatgtactacataaagctcttcaaatgcctttcagctgtcctgagaacggaagaagtgcaggagatgccctatcggcaaaagctcatcagagcgctggtggatggcaatataggcactaaagctaaccgtgctgaaatcgtcgacaagacagtcatcacctggcgggcggacaaaaaaggtcagccgcttagtgaaggaatagacaacgagaaaagctggaaagcattacttggcatgatggacctgatcgcctggcgcggtttgagccataaagaggctgcagtggagatggctatctcccggggtagcaaaccgttacgtcttatagtcacgacaaatgccagactggctctgtatgttacccctacagccgaggaacgtgacgatcgcgtggaaaaacataagtgggccatgctgctgacctttaaaatgtcagcaaaagggctgactcttgattccagcaaacctgcgttgctaagcaaaaatagtgtttgcgaaacaaccctctatgaatggccggaggccaatgagtggaaagggttgaaatcagtgttctccagctttcacgaaaagcaaagagcgtttgaatatattgagacaggcaaagaggacctccgaaaactgtctccggctaacccctcagaattcgaggctggggtacgtgaatggatgacggcctactgcgaaatgaatgattaccgcaaaaccgggggccaggtgcagcagccgagattgatgataccggtaggcatctacattaaccggggagactggcagtatatctacgtcacaacagaaagtgaggccgctgggtatttttatcacaacagcagcgaacgcctgaaaaaggaactttatcaggaatatgtttcacgctttgctcacccggaaggaaagctcgaaaggcttgaaactcgggggaacaggctggcattgggcatgacgaacagaactcccgacatcggcatgttctgtgcagatcgcaatgttgaaatggatagcgtgaattatggacctttatcttacagcgcctacagtcagcttcagcgaattgaaaaccgattgttttttgtcctcgctgaagcggaacgtgggttacatcgcaggatttatattgccgataaccttaaaagcgataatggtgagtttatcatagataaactccttggttcttcacatctacaggtgcagtctgccgttgatgtattcgaagtcattctacctaagtcgttgtcagaagggccgctgccggtaatcaaatcgagtggtgaaatctaccgtattcaccactggtttgatatctgtccaaaaggcgctgaggctaatatttcattgagcaatatcgaggcaccagtaaataaggttaccagacacagtttcgatagcagggaggcggcaatcatgcatatcctgatgcagaaggaaaccgttaagaaaagtgtctccggagacagatccaacacgccagaaggcgttgtcgaaaggtggtattag

SEQ ID NO: 168580 - DNA, 354 bp, Enterobacter cloacae; identical to SEQ ID NO: 95382

SEQ ID NO: 168581 - DNA, 792 bp, Enterobacter cloacae; identical to SEQ ID NO: 95383

SEQ ID NO: 168582 - DNA, 1128 bp, Enterobacter cloacae
atgggattcaacattaacggtcgtatgtttaggataggaatgactgtgaacaagaaaacggaaaaaattaacaatgaaatcaaagaacaagccgcattctcattcaatgtcgtagggggtacgggtaaagttactaactttacccctggtaacaatggtaccgttcaacctgttgctttgttgaggcttggggtatttgtcccggcccctccgggcgtagcaaagaaaaacctcccagagggtttggttacgatggatgtgtcccgcgatttacagcatatgcagatcgcatccagtgaaggctacaaagaaatatcgctatccagccctcgtcttgatatggggacagatttccgtgtatggcttggtatagtccgttcattacatgaccacggccattactcaggaaggattaagcttccttttagcaccttccttaaaaattgtgggtttgacccctcgaggtcgaataagcccatgaaacaacgtatcgatgcttcgatgattaaactgaaaatggtcacttttcagttccgcaatgaagattcaaccctcacgaccggcctcattaactgggcacggtacaacataaaaaccaatgagattgagatagagggagatccccggattcaggagctctatcagattgactataaggtttatcttcgccttaaggctcttgataatctgcaaaggaaagagtccgcccaggccttgtatacctacctcgccagcctacctaaagaccctgcaccaatctcaatgaaacgctttcgcgaccgtttacggctaacgtccccagtagcctctcagaacatgatcattcgccgttcgttgaaggagcttgagcaaatcggttacttgcaatacagagaagagaagattggtcggtcaataaagttccacatacttaaacgaagtccctcgctggatgccaaaaagaccatcctggtcccggctgcacataacccagctgatgacgatgcactgatacataaacttaaaatgctgaaggctgcaggttactcagaaactgagattgctggcgttctggatgccctcgataagttgcagagggaaggaaaaccggaatccgaagtcgaagatgccgattttgaggagctttaa

SEQ ID NO: 168583 - DNA, 987 bp, Enterobacter cloacae
atggcgtttgcaatattaaccaaggtcagttcagccgcatcaatttggtcgccaatgatatccaccattatgataacagtcgcgataatcgttttggtagtgatgtcccttatagcgataaatatgctaatcatgttggtttctgcatgggtgttatgttatgcaggagttatattgcttggatttggtggttcgaaatggacctctgatatagcaattaattacttacgaactgttttatcgattggcattcaattattcacgatgacattaattattgggattggacaatcatttatagatcaatacttttctcttattaaagatgatgttcctgatcttaatagtcttatcgttttgcttctggcgtcaattatcctgttagtattaacgaataagctaccactgttgttatcaggtgttgtaggaggggcttctttacaagggattggtggatttggggcgggtatgattactggcgctgccgctactgccatcagcggtgctggagcaatggcaatgggggcatcagctcaagtcagcggcggagcctctgcattaaaggcagcgttcgagtctgcgcaagctgccatggccgaggaatctggttcaggcggtggaggcggttccggtggaggatttggcggcggggaagataccggttctgtagatacttctggaggccaaccctcaggcagttccggtggttcgtcagcatggagcagttcagttagcgccagcggaggaagtcaggggtttgcttcattctcacgagctggccgcatggcaagccatatgggaagcatcatggccaacggagctgctgagtaccagaaaatgaagcgaagtagcaattcttctcgtgtccaacaaactattggaggggagttggcgactcagatacgtaagcagacagctactcatcgggataaccgcgaacatgatgattttgccgatgatagcttatcgggtaataataaatcttga

SEQ ID NO: 168584 - DNA, 723 bp, Enterobacter cloacae
gtgctcaatggtgttgaccacatcgtcacccgccacggtatccacacgcagccccggcaggttagcgtcgatagcgatctcgcgttcgccggtgccggtgttgccgtgcccgttggtgacggtcgccgtcacgctcaggctgccgttgccgagtgcggtcagcacgtcagacggcacattcacggaccaggacagattgttctgcaccgttgcggtgtagctgtggccgccgatagtcacggtcacggtgttgcccgcttcggcattcgtcacggtgccgctcagggtctgacctgccgccacttccgccgcgttgatgacgttgtcgcccgccacggtgttgatggtgacgccaggcagcgcggtgtcgacaagcaggttcgcagaactgctcacgctgttgcccacgccgttggtggctgtcgcattcagggtgtaactggcctgaccgagaccggccagatccgcagccggaaccgtcaggctccaggtgccgtccgccgcagttgtcgccgtgtagtttttgccgttcagggtcacggtgaccacggtgccttccgccaggttggcgctggtgccgctgacgctcagatcctggcctttttctaccgcgttcaggacgttatcgccgctgatggcgttgaagctgaccgatggcagaccggtgtcaacggtcacattatgcgtgccgctgccggtgttgcccgccgcgtcggtgactga

SEQ ID NO: 168585 - DNA, 603 bp, Enterobacter cloacae; identical to SEQ ID NO: 95544

SEQ ID NO: 168586 - DNA, 312 bp, Enterobacter cloacae; identical to SEQ ID NO: 167908

SEQ ID NO: 168587 - DNA, 732 bp, Enterobacter cloacae
gtgcccgttgacggtcgcagttatggcgttaatctgcgtcgccgtggcctgctgataattcgaaaccgtctgactcagactgttgatggatgccgtattgccgttgacgttcgtctgcaggctcagcaatgcgcgtgccgttgcctccctgtctgtgacgatcacttcatcaatgcggtccagctgcgcgctgttgccggctaccgatgccgacagagttttacgcgtggccacctgggcgagattggcctggattatcgcaattgccgagttcttaacgcctcccgtcatgccgtccatcgatacagaaatctcgtctatcttcacttcggcctgcgccagcccgtcagcgttctcctggatgtctttcgcctgctgctccagctcgtcggcatgctttttgatgtcatccgccatgcctgcaactttttcattgctgtccaccgcgttctcgatcaggtctttgaacgtgtcggaatctttcatatcctccagaatgtcgttagttatttcactgacgtctatcgaggatgtgcccatgacccagtcggtccagtcaccggcattaccgatacgatcaatcaggcgcgcacgataccactggcggacgccggcaggcatggggccatgctgataatctgcggccgggtacggcaccagaaccagcagttcaggattggcaaagtcagaggttgtggcgcgctgaatctctgtataggccgtgtcgcctga

SEQ ID NO: 168588 - DNA, 726 bp, Enterobacter cloacae
atgatttccctgaaaaatgtttctaaatggtatgggcactttcaggtgctgaccgactgctcaacagaagtgaaaaaaggcgatgtggtggtggtatgcggcccgtccggctccggtaagtcgacgcttatcaaaaccgttaatgggctggaacctgtccagcagggcgagattgtcgttaacggcaccaaagtgaatgaccgcaaaaccaaccttgcccagcttcgctcccacgttgggatggtgttccagcattttgagctgttccctcacctctccatcattgagaacctgacgctggcgcaggtgaaagtgctgaagcgcgacaaaaaagcggcgcgtgaaaagggactgaagttgctggaacgcgtcgggctgtctgcgcatgcggataagttccctgcgcagctttcaggtggccaacagcagcgcgtggcaatcgcgcgtgcgctgtgcatggatccggtggcgatgctgtttgatgagccgacgtccgcgctcgatcctgagatgatcaacgaagtgctggacgttatggtggaactggcgcacgaagggatgaccatgatggtggtgacgcacgaaatgggcttcgcccgtaaagtggccaaccgtgtgatcttcatggatgaagggaaaattgttgaagactcacctaaagaagagttcttcgcaaatcctaaatctgaacgtgcaaaagacttcctcgccaaaatcctgcattaa

SEQ ID NO: 168589 - DNA, 441 bp, Enterobacter cloacae
atgcaaaccagtgaaaaaggcattgccctgatcaaacagttcgaaggctgtaaactaaccgcctatcaggacagcgtcggcatctggacgatcggctatggctggactcagcctgtcgacggcaaaccgatccgcgccgggatgacgattaagcaggaaacagcagaacgtctgctgaagaccggactggtcagctacgaaagtgacgtgtcccgcctggttaaagtcggcgtgactcaggggcaattcgacgccctggtgtcgttcacgtacaacctcggagcccgttcactgtcgacatcgacccttctgcgaaaactcaacgctggtgattacgctggtgcagccgatgagttcctgcgctggaataaagctggtgggaaggtgctgaatgggctgacacgtcggcgggaggcagagcgggctctgttcctatcatga

SEQ ID NO: 168590 - DNA, 285 bp, Enterobacter cloacae
atgtttaagcgtagtgggttatttgcaggttgtttcggtaaatgtattcgcacttacccagcgccagctgaaaggatatccagcccggtactgcgtctggttgttttgtttacgcacaccgtaaatctgaaccgtagtttcctgaccgccaacgattgcagtgccgctgcaaactggttcctgtttctcaattacgccagcgcatcctgtaagcatgacagcgcctgccatgcagataatcagttttctcattttgatagtatccagaggaattcagtatcttag

SEQ ID NO: 168591 - DNA, 657 bp, Enterobacter cloacae
atgcccattaaccgtggctgttatgccgtttatctgagtggccgtagcctgctggtagttggagaacgtctgattcaggctgttgatggatgccttgttgccgttcacgtcagtctgcaaactcagcagcgaacgcgccgttgcctccttctcgttgacgatcacctcatcaatgcggtccagctgcgcgctgttaccggcgaccgatgccgacagcgttttgcgcgcggccacctgcgccaggttgccctgaataatcgcgatggcggagttcttcactcctcccgtcataccgtccacagacacgctgatgttatcgatgcgctggctcaaggcggtatcagccgtcgccactgtctgctcaagctcagagagggaagacgacacttcaccgactgtgctcgaaagctcattaacgctggtctgaaccttcccgacgtcctgggcatttttggcgatatccttcgcctgctgctccagttcgtcgttggcctgtttgatgtcgtcagccataccagcaattttttcgttgctgtccaccgcgttctcgatcagatctttgaacgtatcggagtccttaatttcctccaggatcacgtctgtgatgtcggaaatatcgatgctggcctgtcctcgcacccattcggtgtaacctga

SEQ ID NO: 168592 - DNA, 303 bp, Enterobacter cloacae
atgacattgtgcaagcaacagttcacggtacagctcttcgtcacgatcacccgcgagtttcatttctaccaggcgcgctttgtccagcccaagtgcatcagccacttcaggcacatggtccagaacctcaaaaccgcctgccagcgtcgggtgagacagcatgcggaaaccgtgatcaagatagccgtgcagctccatatagcgaatagcgcaaaagcggttaaaccaggtgtaagcgatgtgctccaccagcacgtcatagccctgcttttctgcacgcttgaccagacgctcacggcgtga

SEQ ID NO: 168593 - DNA, 2598 bp, Enterobacter cloacae
atgcaatttaaagaactggaatccgggcttcgtcagaagtttaccgacaaccgtatcgtcttctggcacgacccagaacaacgtttcactgattcgctcaatgagttgaatctcgacaacgttgtgctgctgaatatgcgcggcgtttctgtgctcgcaacaaaaaaacgactcgaaatcgacgagcctgagcagaaatttttactctatttcaacagtgaggttcccgctctcgagcaggactggttgctggatattcgcctctatagcaccgaattccacgctgattatgcggcgatcaccctgaattcgctaggtatcccgcaacttggtttacgcgaacatattcaacttcgcaaagccttctttaccgtcaagcgaactcagatcctgaagggatgggttaccgagcgcgaaacggaaaactctctcgataagaaaatgcttgcggtgatggtcggagccagtacctttgaaaccaaagaaattttgtttgctctgattcagcaatttgccgcggcacggcagcaggatgatagcgcgctggagaacaccttcgccgtactgaagaaacttggcctggatgaggtgctttgggaaattcttcgccttgagctaggataccagtctgaaactccatcactggaaaacctgcttctgaaactgttctgtaccgatctctgggcgcagggtgatgaagcgcatcgtgactggttgagtaaaaatgtgctggctaccgcggctggtcgggcgtcgtcactggcctttatgggggcgtggcgcaacgatcgtcgctataaagccgaatacgattattgtgcagaggatttgcagcagacgctccagccaaaagagcattacaactacagctctccgtacgctctggtaaaatgcgaaacgttcgaggccattgaacaacttattatccgtggcctagtgactcagctacaggaagaaagcacgaccctggacagggacgcgtttaaagcactggtatctgagcgcagtgctaaatactggagccagacacgtccagagtatctttctatctggaatgctattcgtcaggcggaacgtttgctgaatttgcgtaaccgctacactgacgggtttaattttcccgatacaggcgcgttctggaaggcctactgcgacgaaatttatcgcttcgatcagacctatcggttgttcaatgaatatgccgcgccggtgcacagcaaaggggcgatgatcctgcatgaactggataaattcatcgaagagttatacagcaactggtatctggccgaactaagtcgtggctggaacaaactgctggaagcagaaaaacgtatgcagacctggcagtttagcggaataccactgcagcgcaatttctataaagagaatgttaaacgtcagtttgacacctctcaggtgaaacgcgtttttgtcgtgatctcggatgcactgcgctatgaagtggcggaagagctgggcaggcatattaaccatgagaagcacttcagcgcagagctgcgctcccagaccggagtgctcccaagctatacccaactgggcatggctgcactgttacctcatgagtcgttgagctatcttcctgataattctggcgtagtctacgccgatgggatgtccacttccgggtttgaaaaacgagccgctattcttgcgaaggtgaatggtgtagcgctgaaagcaaaggacttacagaacgccaataaccaggaagtgaacgagcaaatccgcaacgcttccgtagtttatatctggcacgacactatcgatgccatgggtgataaggctgcaacggaagataaaacgtttgaggcctgccgaagtgcaatcactgagctaaaagatctggtttcacgcctgcgtagccgatttaatgccagccgaatttttgttaccgccgatcatgggttcctgttccagcaacaggcgctggtggagcaggataaaacgaagctggaaagtaaagccaaagacacgattgaagcgaataagcgttttattgtaggtcatcaactgcctgaaagtgaattttgctggcacggtaaactggcagatactgcaggctcaagcgatgagagtgaattcctgttacccaaaggggtacagcgtttccacttcgtaggtggtgctcgtttcgttcatggcggagccatgctgcaggaggtgtgtgtccctgtgttgaagattcgcgcgcttgaaaagaaagcggctgagaagcaaccccagcggcagcccgtgtccgtcgttgcgcgggatcaggtgatcaaactggttaacagcattgataaagtcggttttattcagacttcggcagtaaatgagctaaatgagccgcgcacgctgaatatctttatcgtcgatgaaaacaaccaggtcgtctccggcacggaaacagtatgcttcgacagtgataacgacgatatgggtaaacgcacccgcgatgtaaccatgaaactcatggggactgcattcaatcgcaaaaacaagtatgttctgatcctggagaatgcggacagcgcaacagagtatggtcgctatccgatcacgatcgacctggcattccaggatgacttcttttaa

SEQ ID NO: 168594 - DNA, 834 bp, Enterobacter cloacae
atgaaggagtttgaatggcatatcaagaccatccttgagacaaaaatcactgaaggtaaacgagcgttgatcgttgaaggtaaaacggatgaacttgtttttacccagctcttaaaaaaagtcgatccccaatgggaaaccaactgggttcttgccgaagtcggcgggaaacgcaatgtggtagaaattttgtcaaaacaatctgattggttgggcattgttgatcgcgatgagtgggatgatgcccagttgagccaacggcaacaacaattgcctaacctgctagttttgcccagattttgcattgaaaactatcttgttgtcccgagtgagcttttacctggactgccacccaaacaaagagccaaactccccagtgagagcgcagcggcgatagaggctattacgtcatcgattaccgcaaatcttgaaagttggattcagtttggtaccgcatgggccattatcaacccgctttgggatgaactgcgattgctcggatttaaccgagaccttcttgatccgcaacaggtgattacagagcccgggtttttggcgcattgcgaacgttggcatgcacatctggatcctgcagtactgttacaaagataccagagcaaactggccgaaatccgcgatttgccagttgatgaacagttacgcaaaattgttcacggcaaaaaattttataaagccgttgtgacccctgcattcatgcagttacttacaattacgaaagcgatttcagttgatgtatggttcagggaaatgccggtgccaactgaccttgactttatatggcatgaaatgaatttgcctgtagaagaaaattaa

SEQ ID NO: 168595 - DNA, 1284 bp, Enterobacter cloacae
atgctttataacactggcaccatcgccattaacggaaataccgccaccgggacgggtacaaactggacggcgccagccagccaggttcgcgctggccagacgattatagtcctgtccagcccggttcaaattttccagatctcaagcgtggacagctccacctcgatgacggttacacctgctgccgctccggcactgagtggtcagaagtatggaatcctggtgtccgacaatatctctgtagacgggctggcacaggcgatgtcacagctcatcaaagattatgacgagaacattggtgcgtgggagacgttcgccaccacctcagccaatcagagcatcaccgtaaccatcaacggcgcctccgtaaccatccctggcatcggtaagctggcacagaaaggtagcaacggtgcgcttgctgtcgcagacggcggaaccgccgcaacaaatgccgcagacgctcgcacaaacctcggtttgggaagctctgcaacaaaaaacacaggaacaacgagcgacaatgtcatgcagcccggcatgtttgggcttggtcgtccggatggggcattaatattcaacacaactagccaggatgatcttcttgatggattgacagggtatgggcttacggttcttcgaaataatgcacagataccagaaccatggaatatatggaactattcaccgacaatatttgcccgtacaggtgatacgtatagccttttttcaatgccttttcagtcatctggcaaagttcgtatttttggtggtgcagcaggaactggatggaatcacagcagggtattatacgatgataaaaacacagtcgtggatagcaatggctttataaagcaggcatccccggtcgtcaaaatcttcactgatggtaagtatgaaactaacgacgaatcagaaggtgtcacggtaactcgtctggatgtcggacaataccttattgaaggctgcaaagcactcaactcagacgccgcatggggaggtatagacggaggatttgagattcccacagacaggaataagcaaccgcttatatggctggactacgaggttaacgcagacggctctgtgctggtaaaaacctatcaccgcgaacattcttctgcgccagcatttgccaggaatgagcgtgatggattggcagatggcgagccggttgacatcccggctcaccagttcgtcagcgttcgtgtagaaatgccagttgacagcatctggaatcagaaacaaacggaagaggctttaaagcaggagcagggctcgtaa

SEQ ID NO: 168596 - DNA, 969 bp, Enterobacter cloacae
  misc_feature (351)..(360): n is a, c, g, or t
  misc_feature (828)..(837): n is a, c, g, or t
atgacgaatgagttattagacattgaaacaaaaatcactaatagtttgctattggcctcccgcatagaattaactacaaaacaagatataaatgacattacgttatcacgaaattataatttcagatttaacggtttgaataatccggatattttattccggtgtaatactattattgagcttatatcctacactatcggttgccagttgggccgctactccctcgatcgcgatggcctagtctatgcccgcaaaggcaacaaaggctttgccgagttagttgccgaaggtgcttaccaaaccttccctgccgacgaagacggcatcctgccattaatggattccgattgnnnnnnnnnngaagagcatctgcaggaaaacctcgactttatcgccgaaagtctctgtttgtacgctatcaagccgaaaaaagccgaatcttcgctggatactattcgtcgctatctttccacacagttctggaaagatcatatgaaaatgtacaagaaacgcccaatttactggctgttcagctccggtaaagagaaagcgtttgagtgcctggtgtatctgcatcgttataatgaaggcacattgtcgcgtatgcgtaccgaatacgtagttccgctgctggcgcgctaccagggcaatatcgatttggttaacgatcagcttaagagtgctgaatcgggagctgctaccacgcgtctgaaaaaagaactggatgggctgaccaagaaattcaacgagctgcgtagcttcgatgaccgcttgcgtcactatgctgatagacgtatcactattgatctggatgacggcgttaaggtnnnnnnnnnngctgcttcgctctattgcaatgctttggggggcttttgggttctggctagagcaatccaagccgcttccatcatctcacgaatcccggaaatggctagaacgatggaacggtgtcgcgattgttatagatga

SEQ ID NO: 168597 - DNA, 207 bp, Enterobacter cloacae; identical to SEQ ID NO: 26487

SEQ ID NO: 168598 - DNA, 237 bp, Enterobacter cloacae; identical to SEQ ID NO: 162873

SEQ ID NO: 168599 - DNA, 882 bp, Enterobacter cloacae; identical to SEQ ID NO: 162874

SEQ ID NO: 168600 - DNA, 180 bp, Enterobacter cloacae
atgagtggctccggcaataagctccatatcactccagagctctttcactttgtctgcactgattcggtccagattatcaatgataaggatgaagcgatctccatgggaaatgacctctttggaggtaaatccctgcagagcttcagccagctcaatagctccgacctccttattaactag

SEQ ID NO: 168601 - DNA, 1359 bp, Enterobacter cloacae
atgaacgattataaaatgacgccaggcgagctacgcgcgacctggggtttagggactgtgttttcgctacggatgcttggcatgtttatggtcctgcctgttctgaccacgtacggcatggcgctacagggggccagcgaagcgctgattggccttgcgattggcatttacggtctggcgcaggccatttttcagatcccgtttgggctgctttccgatcgcgttgggcgtaaaccgctgattgtcggcgggctggcggtgtttatcatcggtagcgtcattgctgcgctttcagattctatctggggcattattcttggtcgcgcgcttcagggatcaggggcgattgccgccgccgtgatggcgctcctctcagatttaacccgcgagcaaaatcgaacgaaagcgatggcctttattggcgtcagttttggcatcaccttcgccattgccatggtattaggaccgattattactcatgcccttggcctcaacgccttgttctggatgattgccgttctcgccgccacaggcattgtcattaccctctgggtggtgccagacagcaagaatcatgttctgaaccgtgagtcgggcatggtcaaaggtagcttcagtaaagtactggctgagcccagactgctgaaactcaacgttggcattatgtgtctgcacattttgttgatgtctacctttgtcgcgctgcccggccagcttgccgctgcgggcctgtccgccgccgaacactggaaagtgtatctggtaacgatgctgatttcgtttgcttccgtagtgccgtttattatctatgccgaagttaagcgtcagatgaaacgggtattcctgggctgcgtgaccctgattgtgattgcagaaattattctctggggtgcgggctcacacttctgggaattgattatcggcgttcagctcttttttctggcgtttaatctgatggaagccctcctcccctcgcttatcagcaaagagtcaccggcaggatataaaggcacggcgatgggcgtttattccaccagccagtttctgggcgtcgcgattggcggctcgctgggtggctgggttgacgggatgtttgacggccagaccgtgtttctggttggcgcgctgctggcaatggtatggctggccgtggcaagcacgatgaaagagccgccttatgtcagcagcctgcgcgtggaaattccggaaggcgtggagataaacgccttgctgcaacagcgtctggaagcaaaagaaggggttagcgaggtctttattgtccctgaagagcgtagcgtctacgtcaaaattgacagtaaagtgaccaatcgctacgaagtcgaacaagccctggtttaa

SEQ ID NO: 168602 - DNA, 243 bp, Enterobacter cloacae
atgagtaagaaaaacgacggtggctacgccttccctatggaggcgacagatgccacagcttggagggattgcaatcagggaatgacgttgcgcgactacttcgcagcaaaggttttgcagggcgttatggcatccggaacttctatgagtattggcactaaccatgaagaagcgatgcttgatatggcaagagcattttactcgatggccgacgccatgattaaagcccgggagttgccatga

SEQ ID NO: 168603 - DNA, 603 bp, Enterobacter cloacae
atgtttatccttgaaacgctgaatttcgttgttgatattttaaaagtcccttcagtgctggtcgggttaattgccctgattggtcttgtggcgcagaaaaaagccttttcggatgtggtaaaaggcacaattaaaaccattctcggctttattgtgctgggcggcggcgcaaccgtgctggtgggctctttaaatcccctgggcggtatgtttgagcacgcttttaatattcagggcattattcccaataatgaagctattgtgtcgattgccctggaaaaatatggcgcttccaccgcgctcattatggccttcgggatggtggcaaatattattgtcgcgcgctttacccgcctgaagtacatcttcctcaccgggcaccacaccttctacatggcatgcatgattggcgtgatcctgacggtcgcaggcttcgagggggtagggttggtctttaccggttcgctgatcctcggcctgattatggccttcttcccggcgattgcgcagcgctatatgaagcgtattaccggcaacgatgagatcgccttcggtcatttcggtacgctgggggctttgttgaataaatcgaacttttgctga

SEQ ID NO: 168604 - DNA, 792 bp, Enterobacter cloacae
gtgctgataaagattgtattcataagcgccagcaacaacgggtgcagccagcgtcagctgggcttcggaactgccacctacgtttacaatttccattccgttaatggtttgagcgcctgcaccgccaatgttggagatgcttacgccggactgaccaaagctgctgccggtaatggtgaggtggtcggttggcgcattatcttcacccagggtgctgttcatcacaatctggctgccggcagaaccggtgtagtcgccgttaatcgtaaaattattgccaacgctattatcagccgcggcgagcagcagcgtgccgccgtttgtcacgttgccattcacggtatccaccccggccccgcgcagcgttgcgttaccctgaaccgcattccacgctgccagcgtaccgccggtaagaatagcaacgttgttgttcacttcacctgcggtggcaaaggtcgcgccgttttcaacggtaacggtggcgttactgccctcgacaccaagttgcgcgccgctggcgaccagcgtggtgccgccgtgcagaacggtatcccctgtgtagctattattgcccgtcagggtcagagtgttggcgtctactttttcgacgttaccgctaccggtcatatcggtggcaaacgtgaaatcactgccctgattaaaaatgacggtaccgttgttagtcagtccaccgctgagcgttgcggttttttcgccatcacccagttgcagagaggcatctttggcaacgcgtgtattaccggtgttggataccgcacccgacagggttaa

SEQ ID NO: 168605 - DNA, 369 bp, Enterobacter cloacae; identical to SEQ ID NO: 131013

SEQ ID NO: 168606 - DNA, 894 bp, Enterobacter cloacae
atgcgtgatctgatccttcaactcagcaaaagttcgatttattcaacaaagcccaatggtggtcaaccggagacttatctttcccaagataaaggaaagctaactccaacattaaatgataatcttttccttttaccgggacatttaagcgtctctgatcttgattcgcaaatcagtgtttcccttaagatcgctgcaggtatcccagcaacaagaaacattcctggcaaccttcctaaactgttgcaacttgtagctgcgcataatgaagttgattatattttgtacgaccttagcccgaatgttggcggtttaaatgaagtaatgcttatgtctagtgattactttattgtccctactgctcctgacttcttctgttggcaagctgtaagttcactttcgactaatatactcaaatggtatcgtgaaatccgtaatttcaaagaacaaaatgaatcgcatgcaagcgcagctaggtcgatcggaaacagtcctaaattcttagggacgatccagcaaagatatcgacctcgtaacggttctccagcgaagtcctttgagaaatggattgataacattagccaagccgtggataagatcttggttcctcaattaacagatttaaactgtgttatgccaagagagaaagtacaagaggcgttaactcagactgaatcagaattagcggcctataatctggcccatatttctgacttcaactcgttaatagctattagccaacgtttatcaacacctgtattctcattaacgaatcaacaaattgccgaagcgggtcaatttggtcatgcattaaacaccatgcgggaaagccgtgaccaatttgcttatcagttcgacaagttagccgaccgtattcttattctcaccgcataa

SEQ ID NO: 168607 - DNA, 1962 bp, Enterobacter cloacae
ttgctttgccacggaacggtctgcgttgtcgggaagatacgtgatctgatccttcaactcagcaaaagttcgatttattcaacaaagccgctgcgtacttacaatattgcctggtggggcaataactactacgacgtcaacgagctgggtcacatcagtgtctgcccggatccggacgtcccggaagcgcgcgtggatctcgctaaactggtgaaagcccgtgaagcgcagggccagcgcttgcctgcactgttctgcttcccgcagatcctgcaacatcgcctgcgttctattaacgccgcgtttaaacgcgcgcgcgaatcgtatggttataacggcgactatttcctcgtttacccgatcaaggtaaaccagcaccgccgcgtaattgagtccctgatccactccggcgaaccgctgggcctggaagcaggctctaaagcggagctgatggcggtcctggcccacgcgggcatgacccggtcggtgatcgtctgtaacggctataaggaccgcgaatacattcgtctggcgctgattggcgagaagatgggccataaggtctatctggtgatcgagaagatgaccgaaatcgcgatcgtgctggaagaggccgagcgtctgaacgtgatcccacgccttggcgtacgtgcgcgtctggcctcgcaggggtccggtaagtggcagtcttccggcggtgaaaaatccaagttcggcctcgcggcgaaccaggtgctgcaactggtggaaatcctgcgcgagcgcggtcgtctggacagcattcagctgctgcacttccacctcggctcgcagatggccaatatccgcgacatcgccaccggcgtgcgtgaatccgcgcgtttctacgttgagctgcataagcttggcgtgaatattcagtgctttgacgtgggcggcggcctgggcgtggactacgaagggacccgctcacagtctgactgctcggtcaactacggcctgaacgaatacgccaataacatcatctgggcgattggcgatgcctgcgaagagcacggcctgccgcatccgacggtgatcaccgaatctggacgcgcggttaccgcgcaccatacggtgctggtttctaacatcatcggcgttgagcgtagcgaaatcaccgaagccacgcctccggcagacgatgccccgcgttctctgcaaagcatgtgggaaacctggcaggagatgcacgagccgggcacgcgccgttccctgcgcgaatggctacacgacagccagatggacctgcacgatattcacgtcggctattcttcgggcacctttagcctgcaagagcgcgcatgggccgagcagctctatctgaatatgtgccatgaggtgcagaagcagctcgacccgagcaaccgtgcgcaccgtccgattatcgacgagttgcaggagcgtatggcggacaaaatgtacgtcaacttctccctgttccagtcgatgccggatgcctggggtatcgaccagctgttcccggttctgccgctggaagggctgaatcatgcgccggaacgtcgcgcggtgctgctggacatcacctgtgactccgatggcgcgattgaccactacgtcgacggtgacggtattgcgacgaccatgccgatgccggagtacgatccagagaacccgccaatgctgggcttctttatggtgggggcgtatcaggagatcctgggcaatatgcacaacctgttcggcgataccgaagcggttgacgtgtttgtcttccctgacggcagcgtggaggttgagctgtccgacgaaggggacacggtggcagacatgctcgaatacgttcagctggatccgaaaaaactgctcacccagttccgcgatcaggtcaaaaacaccggtctggacgatgccttgcagcagcagttcctcgaagagtttgaagcgggtctgtacgggtacacctacctggaagacgagtaa

SEQ ID NO: 168608 - DNA, 414 bp, Enterobacter cloacae
atgtataaaccaaatatttacaatgccgatatgagaaaagaagaacccaacttagtattggtggatcgcctcacagaaatcactaaccgaggcatcaccaaagcagatatggcgcgcatagccggagtcactcctcaggccgttaacggctggttcaaaaaaggcgtaattagtaaaaaatccgcacttgctatagcagattcagtaggagtatccgttgcctggctcctcggcgaggacgtcggcgaaaaaaatggcatcaaacctgacgaacaacgattgcttgagctctatcgccaactgcctgaagaagaaaagcaaaatatgcttcgcatctttgcgcttcgtctaaaagaacttgatgaattgtatgagaagtatatgaaaggccgtttaagaaataatggagagtga

SEQ ID NO: 168609 - DNA, 297 bp, Enterobacter cloacae
atggctacacagcgtacttctggagatgtgactttgcctaagtcaatttgttttttcaaccacaagggtggagtaagtaaaacgactacaaccttcaatcttggatggagcattgcaagcaaaggcaagaaagtcttaatggttgatttggattctcagtgcaacctaagtggaatggttcttggttttgagaagatggacgaaggccttgaaagcttttacgagagtcgtgaaaacttgacgatggggccaattgtcgattaccttatcaatggtggggctttgttgaataaataa

SEQ ID NO: 168610 - DNA, 966 bp, Enterobacter cloacae
atggtaacatacaaaaaggttaacgaagaaaacctacattatcgacttacagttattagcgactatatatcatggatttatgactcgttttatagaggttctgtgtatgaaacaaattcattgctaaaattcattaaatccaactttcaaaagcataaacctaagataacttcatattcttatatgagcgataatttcaaatctttagaaaaagaaactgtagaagctctactggaatgtgtcagtcctgaaagcgaatacaatccatttgagaggaattgtcggaaaagaaatcaacttgctatattaatactttatgaaactggaatgcgaggaggggagcttttaaacttaaagatatcagattttaaaagaaagcaaagatatctgaaaatatccaaaagaataaatgacccagaagatcccagagtatttcaaccactcgtaaaaacggttgagagagagattaatatcagtgaaaggttatgtatgcagataagttcatatattgaaggtgagagatcatatcatgctaaatgtaagaatcatgattatctattggttactcacaaatccggagttacagagggattaccattaaccataagtgcatataacaaaattatgagaaaaataaaagaaattgaacatgaaggaagctctttcagacacttcactggacattgtttacgacatacatggaactatatatacagcttaaagtatataggtgtaacagacccatataaattaaacgagttagatagaatccggtgcattagaatgggttggaaagtaaactcaaaatcagttctgatttataataatagatttataagcgaagaggcttccagggctttccaggaagcagatttactgaaagaagaaaaaataaataataataaaggaggagtgaatggagaaatcgattttagaaaaactctcggtattaaaagtaaaagatag

SEQ ID NO: 168611 - DNA, 978 bp, Enterobacter cloacae
atggaatttaaagatattgatttaaaaaaaagacaacattatgtaccgcagttttacttatctcattggctcggtcgagaaggtatattggtgcggaataatatatctaaaaagtcttaccccaaaaaaaacaccatagagattgctgaagaaaaccttttctatggtataaagatggacgatgtcgtatgggatctgttgttatataaatactctgatgacattgattccaatccatatcttaaaaatttattcaatgatttagcattgttaaaagatgctgatgccgttatcaataaaggatggttagtagttaatgatgacgaagaactcatgaagttcgccaaaaggaatctcgatatattgaataaagttttccttgaaaataaatactctgatattgaaggtgctatttctgaaataataaaagaaatgataaaagaacaagagtctaaaatcattacaccgatcaatgacaagatgtacttaaatcttttgattttttacagcctgcaattattcagaacaaaaaaaatgatatcagcggctcaagaaaatattgagaagttgactttggtacgagggaatgtagaaatagtattagataattgtcaaaaggaaaccttccttaaatgtatgctatatataatgtctttccaatttgctcttaaaatagagaaagaatgcttcagtatcaaaatacacaaaaatcatactaaaattaactatataacatcagattcgcctgcaatatatcacaatgatggttctattgctgcgatgccactttcacctcgtttatttgtaaacttcagtttgaataaaaatacagaagcaatcccaccgacaagaatacaatttgagattgtagacatctacgatcctgaaaaaataaaaatcacaaatagactcgtccatgaattttctaataattttttgtttgctaagaagaatgtagacttgaagtttgatctttaa

SEQ ID NO: 168612 - DNA, 324 bp, Enterobacter cloacae
atgaagatcattgagacactgagagaattatcggaagtctggaagctattcggtgatatgcctgacgatacgacactgaatgttgaattaacggccctttacctgggaatcagtgttaagaccttagcaagatatcgccaaaatggtgatggaccaccttacattcaatatccaacaggtaacagtaaggctcgaaatcagcgagtaaattatttgctgggtgatttaaggatttggaggaatgatgaaagcggcgcaagttcgtggattggcattcaattcactgatcgacttcacgatcccgcaaccattctggcaaattaa

SEQ ID NO: 168613 - DNA, 666 bp, Enterobacter cloacae
gtggaaattgaaggtgaactggacatacttaaagatgaacagtttttctttgaggaacaaggaaaaccctttatcagacatgatgagctgaaggcactacagcgccgttatgaaatacagcaagcagaagcagatgagtatacgaaagactggattgcgtgttttgaacttattaacaaaatcattcgtgtcgaagaactcaggaaagacggcgacctcaaagataaattgattgcggttggctcagagcaggacgtttgtcatgctctgaagtttatcgaaactgactcggaattattgcatctgtccttattgtgcgaggatgctgagttctatccagatttgctggatgaacttcgcaaaacaccggtcattcaaaagcgttctgtgcagctgagtcgggtattaatgaaaaaaggttttgagcctgttttcatggaaatggacgataaacagcagcttattgctgccaacgcaatgctgcgccagatggctaaaatagctgatcctgacgataaacttgaaggataccgcaaggtggtcggttatattgaggcaggtgaatacctgactaataacaaccttttttctgaggggattcaggcccttaccagcaaagccattcaccttagtcacattgccctgcctgacttactggagaactaa

SEQ ID NO: 168614 - DNA, 282 bp, Enterobacter cloacae
atgatattaaattcaaactctggcctgccgttatactatcaaaatatatatcttggtttgcttgggcgacagaaaaataagtcgttcaatactatattgagaaacgcctatgttttgatcctttttgaaaaatacttgattaaggaaaatataagtatactcgaaagagtaagtaacaagacttttttaagctatacagagttatattcattatcagagtttcttagagtgaaaaggaagaaacgtaaaataattgatatggtaacaggctttgttgaataa

SEQ ID NO: 168615 - DNA, 192 bp, Enterobacter cloacae
atgaaaaaaatcgcactattaatattcattataataaatattatttctgtacttcatttgttaagtgaaggttccttatatgtaactgactttcagggggtattatcctcactgatacttgcgttttcagcagcttatttcccaataattgtttttataagcattgatgaccacgagcaaaaaaaagcctga

SEQ ID NO: 168616 - DNA, 165 bp, Enterobacter cloacae
atgatttatcggggggcacaattaaaggttatcggtagcggcaatgaaatcatcactggcgcagtcttgtcggcctctgtaccggtactcgtgagtcatacggaggaatataaggatactccactcccgggggccgcgactgaagatgaggaagggctttgttga

SEQ ID NO: 168617 - DNA, 579 bp, Enterobacter cloacae
atgctgaattcaacattcaaaccagaaccgacatcaaccggcatccgccttgggaatcgaattattggatattccgccgccgtaaggcaactcgacaatggtcactatgacaaacagattccagatggaatggaattgttggcttgcattatggaagcggttgaaagtggctggttcgtaccaagcgaagaaaagctgctgattttatggcgttggctcgtggtcgccgttttcataaccgaacaactacaaaagaacggcactgttgacgttccgaataacgatgggggtgttgataccgctgttatttactccagcaatagcggctcgatcagcgtttacccaggaccggaacgattcgcccttgcgagttaccttgaaggtggggctatagagaaatacgggacggaactaggccagcagatggcgcttggtatgtatagagacatggttgaaatggacgctgaaaacgggctcaggttatcgattttcggccgtgatggtttcggtctgcttcatgacagcttcatagagcagattcaggcagagggtatgccatccaatcctgttattcactga

SEQ ID NO: 168618 - DNA, 207 bp, Enterobacter cloacae
atgtctacccctgcaaacttcaacggtgcacgtcccgttattgacgtcaatgatgccgttatgctgcttatcgatcaccagagcggattgttccagactgttggagacatgccaatgcctgagctgcgcgctcgtgcagcagcgctggcaaagatcgcctcgctggcgaagatcccggtgatcaccacggcgtcggttccacagtga

SEQ ID NO: 168619 - DNA, 483 bp, Enterobacter cloacae
atgaaattctcgatcaccactcagtcattttacgcggaaggcctgcaatttggtgcatcgcttccgggcgatgccgtcgagattgagcagagcacagccgacgagttgtttcaggccattaataatggtgcacgcgtatactctgaatctggtgtattgaaaacgtctgaaccacgaccagaccagtaccatacgtgggattcgtattcactgtcctgggtcataacggatgaaaatgcagagactcaaaaaaatgatcagcgagaacaggctgaagcagaaaaacaagaacgcataaaacaggccaatgagtacataaacagcaagcagtggcctggtaaagcagtcatggggcgcatcagtgatgcagaaaaaaatcagtacaatgagtggctggattatctggacgcactggaggcggttgatacctccagcgctccagatatcacatggcctactgcaccggtgtctcaggccagctaa

SEQ ID NO: 168620 - DNA, 597 bp, Enterobacter cloacae
atgacttcagcagtgctggataataccaaaatcgccaccgtggcagggagcgtcaccgtttataacttctctgcacaaaccggcgaatttactggttcaagcgacgagtacctgttaattggcgttggcctccctgcacattcaactgacattgcgccaggcgcagtggatactggctatgtgtcagtgttcaccggcacagagtgggagccaaaagaagatcatcgcggtcaaacagtctggtcaacgacaaatcgcgccgcgtcagtaattgattatatcggcgcgattaaagatggttttacacgtatcgcgcccgtctccgaatatgacacctgggatggctcggcctgggttacggataccgccgcacaacatgcagcagatgtcgccgctgctgcactgcacgcgcagcagctcgttgatgcggcaatgtcatccatcagcgtgattcagctaaaattacaagctggcagagcactgactaatgcggaaactacaaagctgaatacaacactggactatatcgacgcagtaaatgctgtagataaatccaccgcgcccgatgttagctggcctgagacaccggtgcagtag

SEQ ID NO: 168621 - DNA, 330 bp, Enterobacter cloacae
atgaataagacagcggcgaccgaacgtaaatccggctatctatttgggatcaggatgggggagaaaaacaagatctatacactgagcgtggatgccagttgcttatcagaagctatctcggagttaaaagccgcgctggcggctatagaagaaggccgaagccaattcgccagcggcgataataacatcatgatgatcggcaatgtggcagcaacattgcgcactaagccggtgacggctccatcggttccggcacacgatgaccaaacacgacaggtagcggaatcagcagttcccagaacggtttttcctcttccttacctttcttaa

SEQ ID NO: 168622 - DNA, 168 bp, Enterobacter cloacae
atgaaagtctgggtaataaaattattgaatctggcgatgcttacagttacgggcgctatggatttagtcggcaaattactttactggtctctttttgctacagctgtcggtgccggactgactttcggttctctgttagcgttctgttatgtcatttacgggagttaa

SEQ ID NO: 168623 - DNA, 228 bp, Enterobacter cloacae; identical to SEQ ID NO: 75723

SEQ ID NO: 168624 - DNA, 207 bp, Enterobacter cloacae
atgacaatgaattcaaatggagagggccagaaagcaggtatctctaaacattcaaaatccatcgcagaacatgcaaaacaaattggtaaaatcattgaagatgctggtgacagagacttaacagatgctgaaattgacagaatcaatgagtttaacgatgacattaaaaagcgttctaatgaaataaatcgcgcgtcaaaaggctga

SEQ ID NO: 168625 - DNA, 318 bp, Enterobacter cloacae
atggctaaacgtatgcaagataaagagagcattgccgggttgtcctggattgtcgttcttgtgctcgcctgttggggcggccttgtgcgctacctgatagacgtgaaacagaacaaggcgacatggagctggataaatgcgcttgctcagatcgttgtctccggattcaccggtgttatcggtgggctagtcagcgttgaaggcgggttgagtttctacatgattctggcggcgtctggtatcagtggtgcgatgggttccgtggcactgacttacttctgggaacgcctgacggggatgaagaatgcaaacaattaa

SEQ ID NO: 168626 - DNA, 480 bp, Enterobacter cloacae
atgaatacggtcattatctcattggtgaaaaagctttggctgcctgctgtcatcttggttgtaattgccgtgctgtcgtggaaggttaaccactaccgcgacaacgccatcgcctacaaagaacagcgcgataaagccactgagaaactaaccctggcgaatgccaccatcaaagacatgcagacccgccagcgcgatgccgctgcactggatgccaaatacaccggagaactggctgatgccaaagctactatcgatcagcttgagcgcgatgttgcttctggcaagcgtcggctgcagctcaatgcaacctgtcccgcgaacggagcgaccggcaccggcggcatgggcgatgcttccggccccagacttaatgactccgctgaacgggattatttcaccctcagagagcgaatcgtcacagtgacgaagcaggtcggctatctgcaggactatatcggcactcagtgcctgaaatga

SEQ ID NO: 168627 - DNA, 276 bp, Enterobacter cloacae
atggcttctgaaatcgcaatcatcaaaatcccgtcccctgtagtcacgcttcagcaatttgcggaacttgagggtgtttccgaacgtactgcctatcgctggacgacaggtgacaccccacgtgttccaatcgaaaaacgagtcatccgtaaaggtcgtaagaaagcaggtggccctatccggatttattacgctcgctggaaagaagaacagttgcgtaaagctttgggtcacgcacgttttcagctcattattgagaatccatattcactttaa

SEQ ID NO: 168628 - DNA, 321 bp, Enterobacter cloacae
gtgggcggctcgctctacctgcgcggcaccagcatcaccgcgctgccggacaatctgaccgtgggcggctcgctctacctgcgcccggagaagatcgcgaacgtttcttaccgtgagaactgcggttactccagccgcaccatcttcgctgtgtggaccggtaaagagtaccggatcgcggcgggttgcttcttcggaacgattggcgagttcgaagctgctgttgaccgaaaatataacggtgcggcagccgaaacatacaaaaaggccgggcgcgattgcgtggctgaactgactgaaaatctcaacccgaaagactga

SEQ ID NO: 168629 - DNA, 309 bp, Enterobacter cloacae
atgagtaaatgggttagagcagaaattatgatcattcgtcagtgtgccggaaccatgaccgttgagagcattggtcgcttgattggcagaacgggagcagcggtcagggcaaaagcacgcgagctacacatcaaactgtatctgcgcggggatcatcatcagtcagcaaaataccgccaggccgatattgagctggcgcgtgggcttcactgcgaaggcgtcagtcgccgggatatttccgaaaagctggaaatgccgatcagtgctgtaaaccagtatgtttattttgaacggagagttgcccaatga

SEQ ID NO: 168630 - DNA, 1116 bp, Enterobacter cloacae
atgacatttaagaaatctgtttttatatggatgctttgtagctttatttcaggatgtggtttagctcagagaactcaaattaataacgagtatcaaaagcagcaggctgaaattgtacattctaaagctggggtgcaagcccttaattacgttctagaggacgataaactaactgcgaatgagggcggggaatcactatgccctaaaggttgtacatttcaagatgtggtggaaaaggccaatactagtccaattggtataactgcgctttatctgtcaattcatgattatgcagggcagccaccatcgacttataaaatagaagataaatcggttagatactcaactgttgctgatattttgaataaatactcacttatctttggatctagtgcattatcagatcctaaccacgtttctaaagtgtatagcgactttttaaaagaacgcgattatttcggccttaacagcattagcgagcaagactttaaacagtcagttggtgatttatataaaagaaggagtgaaatcgtaatcaaaattagctctatgagggcgcaaattttgtcgaagtcaagtcagattgaaaaagaaaaagccatcgcgcaggataaagcaaacccagagatgccagtcgttgggcttggtgatgttttttccagtaaaaaagcaccggctcttagggatgcgtatagtaagctttcatttgtaacaaggtcacccagcaccaataaccccatgaaagtttatatacacgttgggaaatataacttgactttatatcgaataaatctatcagtaaaagaacaattgtctgaatgtcagcgtatctctgcatactcaggctacgatatagaagctcagtgctttgaccaggttggtagaggtctaagcaattttgctaaaatggtaaaagaccctaatacgccagacatgacaaaagttgcagctctcgacgaggcttcatttggtaataattatatcgattttgatcatgccgctaggcttgcagtaatgcataacgcaatgtgtaaaaaacaaggcgatgacggttatgtagagatggtgactgtagctgtaccatgtaagaattataaaggagctggtatgaactga

SEQ ID NO: 168631 - DNA, 399 bp, Enterobacter cloacae
atggcatcagatagaaaagccaggtacgattctatcgaactttacgttccagaagacctaaggcaaaaattcatagatggttttgatgaagtgggtttgcatgctggagtggtacgttgtttctccgccaagccatcaaccgtaaaagaatttcttagcgtactatatgaacgtggtaaaacctatgcaccattagtactgaaggcacttgaaatgttacagagaaaaaatagcattaaaatagaaatttgctcagatcgaagaatcattgatttaaaaggtttttcaactgaggatgctcttgaaattatcaaggcctcaaatgcaattaaagtttctcatatagagagtatcgaagaacaaagcgacacatctggattcaaaaattcaaaagaataa

SEQ ID NO: 168632 - DNA, 642 bp, Enterobacter cloacae
atgtcaatgaattttgacatttttatggaagtttcaggattcacattcgaccctaaaacattcgaaaaaatcatgcttggcaataataaattagctagctgcttaacaactcacttagctattgaacgctttcttgaggcgtggatatgctcttacgttggaattaaagaccttttcgttaacgactccaaagacaaaagcaaggttcgattttctatgaattttatgggtaaagccaagcttgcccagcgcatgggtttaccattgcctgcataccgcatcattgaaaagctgaacaacattagaaacaactttgcacatcaacacgactatgaaggggcgactcacagtgaatttattgaaattattgaaaacgttgacaagcttccttcatatgaccacaaggctttaggagatgtagattacatggttttcattgatgacggccaacatcagcaaaaacataatctatcttcggaaacatgccctcatgaactgcgttatgcggccatcacttatggcttgcttgttagatgcatgcttcacatgattaacgagctacctattaccagaagcaataattacggcgttgctgctggatatcaaggttcatcaattaccttcaaaggttcaactctctga

SEQ ID NO: 168633 - DNA, 198 bp, Enterobacter cloacae
atgatgctaatgctgaacctgagtatcggttcgagtccgatcgccacacacagaacccactacctgggacccttcggccatagagtcgaaattgccttacctcatattgccagcctgtcgctggcttttttattttcaggctccgggaaccattctcgacatgccttcttgttaaatcgtcccgagggcctgacctaa

SEQ ID NO: 168634 - DNA, 606 bp, Enterobacter cloacae
atgggcacacgacatcttacatgcgttgttaaagacggtgactacaaggtcgctcagtacggtcaatgggatggttatccatcaggacagggggtggatattctttcgtttctacgagagaaacttaatcgtgaaatattcctggtaaatcttgcgcagacatttgagccaactgacgagcagatcaaggagtggtggcttgaggttggtcacgacattgataaaagcgatggctgggtaggatgtgacatttcaagaaagtacggtgaaaaacatccttcgcttcatcgggatactggcggtgatattttggatcttatccaagatgctagcagccctgttccaataagtaaaaacttggatttcgcggccgattcattgttttgcgaatgggcatatgtgattgatttcgataaaaacacattcgaagtgttccaaggtttcaatcagttgccactcgaacaatgtgagcgttttcacttcctttcggaaaaatgcagcaataactatcaacccgtaaggcattcgaaaacatatcagttatgcgaactacctgatgaagaaaaattcttgactgatttagagccaggagaggaagaagaatag

SEQ ID NO: 168635 - DNA, 798 bp, Enterobacter cloacae
atgtcagaaccttcaatcgtcccttacgtaaaaaccactcccaaaccttttggtgtggacgtcgaatggaaatggccgggtggctgcgcggtgctagaactgcaatgccttcatgaagatggccgacttatgaaaaaacgcatcttctggccagctaccgtatgccttatttccggcctcaaagctggtgagagattgcaggtgcgcctgcgtccaattgcagaagatggctcagcacgagattggcgagccggtgactggatcgaaggggtttcttctgtcgataccgaagagattattgaggcgctggacgaagagatccgtaacagctgcgcacttcatggccttaaaggtggctggtttgttgataaaaccggcaaggcttacatccacgaggcgctgatcggcaatggcacattgtctacgaactacagcgtgaagatgaacgtggattatggtggcaaacggtacgcagctggcatgaccatcggagttgaagatggccagagcaacgttgagtttatggctgatcgctatacggtgcatgaagccgtttcatccatcatcggaaacgccgtcgtaacaaacgcgaagatgaatatcaggcttggcgatgaaacgaagcaggccgtcattgatgccgtgcgtgagagtgatttgtttaagtcgctgcaggcttcacttgatgctcagttttctgctcagttagcagcgcagctgaacattaatgaagccgtgaaccgcgccatccgtaacgcgctacaacccggcggtctgttatatcagaaagggcgttaa

SEQ ID NO: 168636 - DNA, 234 bp, Enterobacter cloacae
atgcgcataactgtactcgatgatgatccgggtgaacgcatcatcccagggcgagagcgcatcaccgtttatctgaacggggaagaagttaaacattgccttaccgcggatgatgttactggtgaggtagtgagcattgaaaccgatggtaagggcagggtgctggcgcaaaacggtgaggtgaaacgacaaactcgtcgtggacttgtggtgattgagcgccaacagcgttaa

SEQ ID NO: 168637 - DNA, 195 bp, Enterobacter cloacae
atgatgttctacaaaccattatttcttatctcaatcccgatatattggaagtgtttgaatttatatcgtgaggataaggataatttttctattgtggggttatggataaaaacaacgtggattcataagttcctgtgtggcgatgatgccgaatatctttgcgacgattacactgaaaaggaaaactggaaatga

SEQ ID NO: 168638 - DNA, 222 bp, Enterobacter cloacae
atgaccgggaccgacttcacgcagcgccacgcgctccagagtttcgccccgtttacgaatattgctcggcatttcgtcctgcaacagcacgcgctgggcgtgacgatgctcaggatcggcaaccggtacggcggccatcagcttgcgggtgtacggatgctgcgggttttcaaataccgcccgactgaagtgaaccccgaaagttggacatccaacgattag

SEQ ID NO: 168639 - DNA, 450 bp, Enterobacter cloacae
atgaccatgaaagttttttctccctcggtaccccatactcagccacgggatctctggaatgttgttggcctggaggaacatagcggcatagcgctgatggataaaattaatcaggggctggaaggcgaagtcgctaagcgtatttctgcctgggcacagatcacaccggctgaactgaggaaaatgtcgggcatccccaacaccgcatttaaccgtagcatcagggatcggtttacagccgaccagagtgagcggatcgttcgcgtcatccgggtcttaacccatgcagttaaattgttcgaaggagacaaggatgcagctcagcactggcttaacgaaaataacagggctctgagctggcaaaaacctgctgacgttctggcgtcagaaactggagcactggaagtgatgcgtctcatcacccgtattgaacacggcgtctattcatga

SEQ ID NO: 168640 - DNA, 348 bp, Enterobacter cloacae
atgatcctctacaggctgaccaaaacgcgctgtcagatgtcggcatggcccgaaccaggcgcgaaagaggcaggtgtccgcaggaatagcgtgggtactgaaatggtctacctgtctggagcagcatcattgatgatgctgggaacactggtgcatctgaacgcgtcgcagttgaacgatgattttaccctcacaggaagcactgaagtccttgatagccaggtaatggcgtttgatatagacatgttccatctgggtaggatgagacgttgttttagtcgtcgtaaaacaatgcgccctgcatttcccgagcgccagggcgggactgcatggcaagatggattatag

SEQ ID NO: 168641 - DNA, 453 bp, Enterobacter cloacae
atggcaaagaaaaatatgaatggcattcttacctggcagcgcgggcgtattgaaaacagtgtatcgctggttgaaggcgcgattgatgaactattggcaggaaagcagaggattagcctcactaccattgcacaagcatcaaaagacatagatcctgcgggtaaaggtgtgtccgcttctactatactgaggaacaagcaatgtcatgcactatataaaaaacactctttatcaaaaaatggtagtcacaaaaaacatatttcattaagcaaggctcttaatgacccgaccgcatcagaactacggcgggctcaccttcttgccagtaaggacaaaacagcccttattacaaccattattctgattgaacgggaactgaaaaagcttgaagaacagaactgcaatttgcgggagaaaatactatcgtttcatctgccaaattcgacgtattga

SEQ ID NO: 168642 - DNA, 2934 bp, Enterobacter cloacae
atgaacggcgaaaatttatccgtcacattgcaccaccatactttattctccgagcttatcaagcgtcaggaatttggagtatggttcagagttgaagacttacccggggtgcgtaccggacgatttgaactgaaaaaaaatgtaatgccctatattgaaaacatagttgctaaactcctctacgccccggccgtatgtaatcaatcatttcttgcatgggaacgagactatctgacattcgaatttttcatacgaagcagcagatacgccctggaaataaagtaccgctacataatttattgcatcgaggatgggcttagaaatggcaatgaaaattatatacaaaaaataaaatcgcaatgcagttccaacgaagagcaaatttttattctaacggaaaaaataaaatgtgcgaaaccttcttttgatttgtctcaattatccacatctgtgttacagttgtcacaacaagaacgtaaaaaacacatttaccggctatacgatttttgtaagtttcagggtgaagaatttaaaacatctgaaatttcagaacgctataatgttgatttgcatatcatatcaaaatatgggcattcttatgcaaacgaactggctataagtttgcttgacgaggatgtctccgatgaccttgcctactttgaatggaacagaacagtaaccactttccgatatcctcttcaaaattcgaagaaatcacgagaaataagagcaaaaaaagttactctggtcattgaatatttagttagaaacaaatgtgaagtaactcattcagatataacaaatttaattaacctggattatcggttagtaaaagagatggtcaataaatgggaggaaagcaataatactaaaattgccagaagaaggatctggaaaaccatcccattaagcgaacttatatccacagtccatccacatcttcataccataccgctaacatttttagattcatctacaacgggtaaaccgttgactgactcgcaggtacgtatgatttatgaaattaaacaaccgagactcaggaatactgcatttttcattatggcaacttgttacagtaacagagtgaatgacataacctttttctattatatgtccagatttctctatgcaatggggctgaatgatatagacaaacttgactatgagtctttttttaaagcataccatcagggagagttaattcctgaagacaatgccggacagcgggcacgaataattcagacttattttcgattgttagtcaagcaaggtgattatctaagcaaactcagtgaaaatcagcgggaaatatttttaccttttactctgccgcgtctgtcagatgatctattctggaaaaaatccacattgcacagagaggtctcgcaggaacaaaaacataaaaggaagtctaaaacagctgttttacatcagaagttttattttcttcgggattttgtggaaaggcgaaagttacagattaatcggcttcaacaggagattgacaaggcttttatactgtttgaacaatctgcaaaaaatgtcccccttttatttgagtatacagaatctgttattatggaaaatcgggcagagcagacatatacccacaggtttaaagtctgggatgcgatgttactgagacaagcacatgaaccggttgcagcaaaaaaaacctattcatggcgcgatattgatccctctcacaccattcacaacaaagatgctaagtttgtcacttttgagggaagttatgataaacatcatcagcctgttgaagggctttggttcatcgaactcatcactcttgctgcgttatcaggttctccctcatctgaaatcactagccgatatggtgtctcaaagaggtcttttcagggaccaataacgacgccatacggccccacgaccagtcgatggcaatatttattgagtaaagatttaggtctgatatttatccctattgaaattttaatgacagacgctctgcttgcgcattctgccgtgcagataatgtcaaagactggcgctcgggcgcatgagttcctgcagataaggctggtacctgagcatctttatcgattgaatctgacagagaataaagaatgtatattatttaatgcagtacctaaagggagaacaaaagaggagcctttttatattgataataaatgcatggaaagtttgtatgaatggtggcgttatcagataagcagaatgcagaaattttctgtaattaaagcagccgcatgtctggggccaaaattaaaaaacgccagctacctctggcaaaatgatgaaaaacactttactcaaaaaaatatcaatggcgcactttccttcatgttacacggtctttcgctaaaaacttcagccggagagaatataaaggtcaccagtcatctgctccggcatagttttgcaactgaaatgcgcacgctgaatacaccgctggatgttctggcgcagttgatgaagcaaaaagatgtcaacgtcactgagtattatgcaagacatacaccatctcaactgattgaactacaacaacaaatcttcacacaacgccatgattataccaagagtcatatacgcactaaagatgagatatctcagcaacttacagaagccgtgggtaaagttggtgcattaataccggttatcggtggatgctgtactatcgctaacgcatgcccggccaagtttgcctgcattggttgtgcagggaacgccccggacccagccaaacgcagtgatgttttaatttacagagaggcctggtcaaagatggcttctctgtccagagaacagaaattaccggcggaagagagaaaagcgcgagaaattattggaagttgtaacgacatgctggaagaaatggatctgattgagcaggttgactccatcagacgtcatttacagcccccattttaa

SEQ ID NO: 168643 - DNA, 1338 bp, Enterobacter cloacae
atgtttcggttacatcgaggtagcagcaattttccctttcatatcactaactctctgggactcccacacacagagttaacgctctacgcatgccatgcaggaaaatatcactcggccaacactgttaaagtttacgttcgttatcttttagtgtttttttcatgggcagagcagaacgaggtagtaaggcgtcaacagtgggatttattgggtaacagcgctcaggttcgcgctgtacttgaatatttcctcacaagtcagttgcactgtaccttattttttgggaaaggtctttcaggtgaggatattcgcaaagtgcaggttacctggggaaaaacctaccgtataaatcatctcctggcggctctgcgctcgttctatcagcttttaatcgcgatacagcgctatacctatccgcatccccttgatctacctgaggccaaaaatattatttcagggatccgtgaacggcagcttaatgagtttgtgaaacttaatcagcgtttaccgatgccatcaaacagcggtgttgaccattggcgtcccttacgactggcctcttcgtattacagaatcaaagataatgaatggactccagaatatttagacgatccagggctgatgggacgcgtgctaaaggctggtgaatcggggggctggagcctgcaggacacagccattgttagaataatttttgatactggctgcaggatacatgaggcctgctctttgacgctacaggactggcagatcagtggatttcgcaacacattcattgcgttaaacaaaggaagtcgtggaaaacgagtcaagaatattatcattaccgataaaacgttaaagatcctgctgcgctatatccgaaatgacagacctgaattgcaggcttatctcagcggtcgtattgatttaccgtctcgcaatattcagccgttaccaattttcgtgacaaaaagggggcacccgttaacttcagattatttcagacgatacagatggacaccagtgctcacagctgccggactcaatatccgaacgcatcagatacggcattggtttgtcactatggcattaaatgaaattcaccgcagcgctgagtcagaagctgatttgctgcaaaagcgtggtgctctgcaggtattaatgggatggcggtcggatatgcttccagcctacgatcaagcccggcaacgtcatgatttaccgctattggccagcacaatccatgcatctatcgaaagcaaacagcttgaggcgccgaccatttctaacttatctgatcataaggaaagtcatgtttcgttaatgctaaaggaaatgtttggagaaaaattatga

SEQ ID NO: 168644 - DNA, 141 bp, Enterobacter cloacae; identical to SEQ ID NO: 36145

SEQ ID NO: 168645 - DNA, 429 bp, Enterobacter cloacae
atgacggagttcttcgacacgggcctgctgctgggccagcagccgctcgcgcaagatcgtcggcggtgtgggtggcatgccgccgtcgaatgggctttcccggcgcagatgggcgatgtgggcggcgcggatcatgatcttggacggcacacaaccgacgttgacgcaggtgccgccgatggtgccgcgctcaatcagcgtgacctgcgcgccttgctcgacggccttcagtgctgccgccatcgcggctccaccgctaccaatgacgacgacctgcaacgggcgttcgttgccactgggcttatcagcggcccctatccagccgcgcatcttgtcgagcaggccggcgcggttgtccgtcggtggcgcatcggcaagcgttgcctcgtagcccagtccggccacggcggtagtcagcgcatccgatga

SEQ ID NO: 168646 - DNA, 249 bp, Enterobacter cloacae
atgggcgatatgggcagcgcggatcatgatcttggacggcacgcagccgacattgacgcaagtaccgccgatggtgccgcgctcgatcagcgtgacgttcgcaccttgctcgacggccttcagcgccgccgccatcgcggctccgccgctgccaataacggcgacgtgcagtccgtccccatcaccaccagccttgtcgccaccgcccagccatcccagcgccttgccaagcagtctgccccgcgctga

SEQ ID NO: 168647 - DNA, 474 bp, Enterobacter cloacae
atgtacatgcacgttgatattaacggagcctatgcggcatttgagtgtgcgatggatcccaagctgtcaaaaaagccgctcatcatagccagcaataacgattcgtccgtcattgcaatgaataaactggctaaaagcgttggtattaagcgtgggaccccaatttttaagtgcagggatttgattcagcaacaccggatcgaagtccggagctctaactttactttgtatgaagactactcaaatcgcttccatgaaacgctggaaagcttcgcgcctcaatcgagtcgatatagcatagatgaaaatttcatgttattgaaaaacatgaacaagataatagattatgaagattacggccggttgatcagaagtacacttcttcataatctgtcccttacctgtggtgtgggttgttcaagcaccaaaaccctcgctttatacagtgatcaagttttttgtgattttttttga

SEQ ID NO: 168648 - DNA, 819 bp, Enterobacter cloacae
atgacttatcgtgaaatgcttagtcagcatattattgcaatatctacatcagatagcccagatatgcctgtattggggttaagtaaacagcatttatatgacgcgatgacagaaattgcgcgtcatttattagccttgggagccaggattgtttatggcggagatctacgtgctaatggttttactgaactgttatttgagttagtagcacgccatagaagagatgccgatgagggggatgaacgttccagtatattgaactatcttgcatggccggtgcatatgcaaaaagatgccagtgacttggaaaggctcagtgcggacctgaaaggaatggcaagacttgttttgttcaatcgcgatggcgagccgttaccaatggcagaacgagcccattacatagcaactattccttctgatgaagattgggcaataggtttgacagcaatgcgacatgctatgttacaagacacacatgcccgtattattcttggcgggcaggttgataagtataagggggcaatgcccggtatagcagaagaggctgtattatcacttcgtgctaaacaacccctttttattatgggaggctttggtggatgtgcaaaagatatcacggagtctctgaatattgtggcatctgacggaatgcagcaacgcaactggagagggcgggaagaatttgccggtttttcttacaaggatctgaacaatggacttactgagttggaaaatgttgtgctagcacagactcctcatgtagatcaggctatcgctatgattttgagagggctttttcgattagtaaaacgtggctga

SEQ ID NO: 168649 - DNA, 312 bp, Enterobacter cloacae
ttgcagttcgcgtggaacgcgacgtttcgtaacctgtcgcttggcatcagtgcccagcgtagctctggcctgtacgacaacaagaaagacaatatcctcgcgttgtccctgtcggtgccgctgggtaacccggcgctgtcgacccgtctccgttttaccgctacccatgcggatcccgctggcaccaccgccagtaccggtgtcagtggttatctgccggggcaggagaatcttttctatagcgtcaaccagcgctacagcgcgcagcagcactacggcggcgatgccgcgctgcaatacgagggcgcgtga

SEQ ID NO: 168650 - DNA, 222 bp, Enterobacter cloacae
atgacgcgtattcaacggatcataaatgatgatatcaaagagttgttcactcatagcaagttcttcgatatgggtaaatccatggaaaataacgtcgtgtttttcatcaggctcacgctttccaagcgattgcaggccaatcatcgtgaattcgcagctgtcaacaacggcaacgtgaattgtttttttattttgcattggcattctcctttcgctgagtaa

SEQ ID NO: 168651 - DNA, 129 bp, Enterobacter cloacae; identical to SEQ ID NO: 71826

SEQ ID NO: 168652 - DNA, 183 bp, Enterobacter cloacae
atgagtaaagcaatctccgggcagggcaattttatggtcccgggcagcacgggaagcggtaagacggttttctgcgctcagatagtacaggcgcttctgtcaggaaagcgttctgacagcgggtgcaaacgcattgagaaaaaagacaacgattcaggagagcgccatgacaaccagggataa

SEQ ID NO: 168653 - DNA, 297 bp, Enterobacter cloacae
atgacaaccagggataacggtggtccggggaaaacccgtcaccttaacgatattgcggcctgctgcgaggcgcaggggatgcgtgtcatctgtgttaatgccgcagagtgcgactcaggttccgatatgggcgtaacaaaacagcatatgacccgggttttcctggcgaagtctgacgtcagccggattaaagcgctgtacagcggagaggacggggagaggctggcggaggctatcagacacaactgcagcgtctggtttccgctgaatcccggaggtaacgggaatgatgcttaa

SEQ ID NO: 168654 - DNA, 906 bp, Enterobacter cloacae
atgctgctgaccgactacattgacagcgtgtacggaacggcgcgcggaaaccgggcgcgtttcctgaaggacaatccggatatccttccccaggagctgagccgctggcttaaggcaggcctgaaaatcagaccagagaccggcgaaatctacaagcccgtatcacgccgcgtcagaataccgtcagcggtggcagccggggcgggcgtctttctctctgacgacctgcgtgaacgtgttgcgtcactggccaccgcgcagaacgtgacaagtgatgccatgctgaatgccctggtggagcgcgaggaactgtgtcgtaaactgtcccttcagacggagaatggtgacgccgtaccggaacagcagattgccggcattgtcagccggtccttttcagcgctgtctgagcgcagtgaaaccggggcctggcacagggcgctggaggtgctggtccgggaactgacggaatctggcctgctgtcattccataccggtaatattgccgagagccgtcgcctgaacatcccccgcaccgcgtattactggtacggcggtttcgtggcaaaacgcgtggccatgatgctgggctgctacgatatctacctgtggaacgaaatgatgcgcccggacagcgatgtggtctttgtgggggatgcgcgcaacgtcgtcgcctgctacttcatctgccagcagatgtgccgcctgctgaaagccgtgcggctgagctggcgtaagcagcagggcgcgtgggggagtcgggctgagctggatgaggctgcgcaccggtatacgcagcggctggcggaggggataatggataacggtatttttattggtggcgacgagcagaactcttaccggctgtacgattatgcggaaaaacattatgcatgggccatgcgctga

SEQ ID NO: 168655 - DNA, 591 bp, Enterobacter cloacae
atgttgttgttcctgccgggccgtggttttgtttttattcagcaacaggagtgcagcatggaggttaacatcagccttgaagacctgttcggcgacagcatcagagagatgcgggagcgggataaagcgtttttacctgaaccagaatggttctccaggattgagacagacctggacacctttatgcagacctatatgacgaagtatccctttacgtcctttgaggccatcccccgggacgagtcgggcctcacgttcccggcttttgaggacctgcagttttatctgccgcagccgcttcgccatcagccgatgaagattgttgaagtagacggactggcctttctcagcgttcttggtgacggtgcattctgcattgacccgcgccggtggcacaggatcaaaacctacatcgcgaaaggcacagttgaatacccgcaggtttcagtcacacactctggcgtatcggacggccgccatcgcacattgttgctgatgcagctgtacaaccgcagaacaatcccggtcgtcgtcccagaaagccatcacgggacgtttatggctgaggcgaaaaacatgggtgcgatttaa

SEQ ID NO: 168656 - DNA, 249 bp, Enterobacter cloacae
atgacaaataaaattggcccaacagtttataagttagtttatgagtattcgaatcaatccgaacaccctcttaacgagagcgacaatgatgcaatggctgaatactttaacgatctcgtcaagcgccttgtcggtggtgatgcgatagatacagatacaatgctgagacttgctaaggaatacaatattgacgttctacgcgtaccagaaatagcccgtttccttagcaagtgggggcttgatgaataa

SEQ ID NO: 168657 - DNA, 201 bp, Enterobacter cloacae
atgaaactgaaactcttatccacagttgcgttaattaccaccttcttaattacaggatgtgacggagaggacaagacagattgtaagaaagatccaaccgcaaaaggatgtccgcactatagcggtaatatcaccaactcaggaaataaaagctgggatatgaataaggaagaaaacaactcttccaaagaggacaagtaa

SEQ ID NO: 168658 - DNA, 1581 bp, Enterobacter cloacae
atgatctcagtattaaacagagagaatataaaaccattcactttattaatactggtgatggttttattttcctattcatcgtttgcgtcagctgcgatgaatagtaatgttatggatgaagtgttagataaatatcaggccgctgcttctgcatggagcggtgtcatgatcaaatatgggacatggctgttttggtctttagcattgattagcatggtatggaccttcggcatgatggctatgcagggcgatggtattaacacggccctagccgaaattgttcggttttttgttgtaataggtttcttttggtatttactgtccaatggaccagctattgcaatggctatcatcaaatcaatgtggcaaatcggtgcagaggccatagggcaaaatgccgctttcactccgggaggcgttacacagatcgggtttgatattttctttaaggttcttgatcagtcatcagtctggtctcctgtagacagtacagctggtattattcttgggataattattctcggtatacttgctctcgttggtgtaaacctcttgcttctttttatttcggcttgggtgcttgtttacggagggatatttttccttgggttcggcggttctcgctggacttcggatatggctatcaatttcttcaaaaccgtcctatcaaccggtgcgcagcttatgtcaatggtccttattattggcataggtaagtcaattcttgatagctattacacaggtatgagcagttcaattagcctcaaggaaatgggtgttatttttgttgtagcattggctcttctttatttgagcaacaaaatcccggctttaattgggggacttgccggaggtagcactggtgggattggttcctttggcgcaggtgctcttgttggagcagctgcttctgcagctgctattgcagcaacaggtggcgctttagccgcagcaggtgccgcaaacgctgccgggggcgcatcagccctcaaagcggcgtttgaatcagcacaagcggcgatggcagaagaatcaggttccggtggttccggtggttccggtggttccggtggttccggtggaggatttggcggcggggaagataccggttccgtagatacttctggaggccaaccatctggcggttccggtggttcgtctgcaggaagcagttcaggtagcgccagcggaggaagtcaggggtttgcttcatctttctcacgagctggccgcatggcttctcacatggcgagtagtctggctgacggcatggccgcacgcaatgcggccaagcatgactcaaaaatcagcgcggcaaaagacactattgcacagactgcaggtggtcagcttgcttctcaaatccgtgcgcaaacagctgcgcgtcagtctggtccgatggtttcagatgacacggctatgcagggtgctttcgccagtaacgataacgccagcacaaatcagtttagtggtgacggtctgagtggaagccagccagatacaggcaatggttctggagagtcacaggctccacaaggcagtgatgaatatgaacagttcaaaaacaaacaaaacttctaa

SEQ ID NO: 168659 - DNA, 252 bp, Enterobacter cloacae
atggaaaataacaatactcaagtaactaagcggagagtggctatcagcttcttcttgttcatgattatttttttaatgtttttaacaactcttcctgggttttataatattgaatatctttctactcctatgattgtagggaaatttacaataggttttctatgcttattattagtcgcttataacggggctagttttatttataaactcttaagttactttgagtgtttgaaaaataagggaagtgattaa

SEQ ID NO: 168660 - DNA, 504 bp, Enterobacter cloacae
atggaaaaaacagatccagtttttcaattaatagataactactgccggagttataacaaggcaaacaaaaaggaaatttattttcactgttattacataccattatttttcgcggctgctgctgttatgtattggaacattggtataaatggcttttggtgcttaatggttgctggttggggtttgttgcttacagccgccatgattatgaacaggagaatgtctttagccaagctaaggatggagtattcctattttaaaaatgatggacatgtaatgggtgtgattagtgatgactttctatcacttctggccgattctggaagcattgataattacgccaaaagaaggcttgcagaaaagcagcaagaagaatgtggtgtgctcagatggagtgatttgtttgaggttagagaagaagtcctgaaattgaaagaacgcgataagcgtttaataggtaagggagctgaaaaattacagcggtataatcaacaagataaatga

SEQ ID NO: 168661 - DNA, 285 bp, Enterobacter cloacae
atgaaaatcaacgaagtaaattggatggttgaatggttcgcagatctattacgggaacatgcttctatcgaaattgatagcgccaaaaaggaggatttacgaagcatcatcgcaggtctgccaaaaggggcaagtttgggtgatctgataaatgcaattaaagattatgagactgagcaaaatgcgatagaccgtatagggttcgtcatggaaattatagtaaaccagcctatagagatagaaaacaaaaggaaggttttatttgaaagtgaggatgaaatctaa

SEQ ID NO: 168662 - DNA, 819 bp, Enterobacter cloacae; identical to SEQ ID NO: 32842

SEQ ID NO: 168663 - DNA, 171 bp, Enterobacter cloacae
atgaaaaccgaacaacgtcatgatctttttgaagatactgaggtatttggcgtatccttgtctctgttgatttccagagcgaatgagaagtctgttacaatgccctctggtctgactagggagcagagaagggaatgggcgataaaaacggcacgcaaagttcaatcgtaa

SEQ ID NO: 168664 - DNA, 435 bp, Enterobacter cloacae
ttgtcccgtctctaccgtgctgcacttcctgaagattacgtccataaccctgaaacaggtctttgggaactttcattcgatcagcgccccgtagcaggaacgcgcgcagcttctcctgaagaaggcgctgctcagtacaatgctgcccgcgaaaagtttaagtcggctgtgtctgccgtccgtcagcgtccggaaccggtattttcttttaccgaaatgacggagtgggttgtggaacatggcacgccggagcaatgtcaggccgtccgtcttatgtttgatgcacgtgataaaaatgagtttgatattgcggtgcgtgaaggtctgaaagtgctgccccggcatctcgattttgcctacttctttggtcgcttttccgatcggatgcgtgtgtctgttccgctgcgggaacgactcagtctgcgtctgtcctga

SEQ ID NO: 168665 - DNA, 2742 bp, Enterobacter cloacae
atgaaaatcgaagttgctgttgatgctactgcaacaacgaaagagaaaggtgatcttcttgaaaatctttcttctaaactcctttctgctcaatcatattcagttattaaagaaataagacttaccgctgttgaacttgatttgctctgtaaaaatcaaataaacggtaaggagatatatgtagagtgtaaggcttataggggaaatatagatgcaaatatacttaaaaatttgttgggaacacttcatttaaaggagtattctgaggcttggctaattagtactggagagtttgggaaagaagcgagagggtttattgaggaatggaaaaagaagccaattgaactggctagtaaattaagtttttttggtccagaccagctcatagaggcacttatatcttcagggataattaaaagagcccctgaggataaagctgttgattttttaggaagtgttaatttattaggtcagtggattttacttgtcactaagtttggtaatttctgggttgcttcagtattatccggaggtatccctagtggagtcatctgttattatgcatctaataatgagttagttgaggatgacgctcttcttgcaaagattgctgatactgatagtagttttaataatcttcctttcgatgttcctgctaaatttaagcattataaagttgatgtgactacaactccatttactgacgttgtagaagttcagactggacaaagttggagtgactatcgtccagccaggcctgaagattttgttggccgcgttaaagatataaataacatttttgacttttttaaaaacataaaagaaggtgttacaaataccagagtattcgctataacaggtaattctggtatggggaaaagttctcttatcgctaagttgcgagaaaaagctaataacttacacaataaaaacaaatattttgtatttcctgtcgatgtccgagctgcaacaggccctgaatacatttattcctcagtgttaacagcacttaaattagctcagaaaaatggttttggtgaccctcatataaatttaatagtaacaaatgttagtagcccgctaagttctgatagcatcaaatattatcttgaatccctgattaagaaaaaacagataatatgtgtcatttttgatcagttcgaagagctgtactccaagcaagagctttatgaagtatttgaaagagcaaaggaattgctgctaaatgctgctgccttacaacttaatttttgtctgggttttgcatggaaaactgatagcactactcatagcgagcatccagcttatttcttttggcatcaattatccgattataggattacaagaaaacttagcccgttcacagatattgaatcaggtgtggcaataagtatatttgaaaaggaaattaatcagaaattgcatatggacttgaaacataatttgattgtaagtagccaaggttacccttggttattgaaaaagttatgtatacatctttacgaaaaaatagaaaatggtgttgcgcaaaaggatcttttggagaataagcttgatgtgtcatccttatttaaagaggatatggatgagttgagcccggcagaaaatacatgcttgaaattaattgctcagagggcgccagctgattggtttgaagtagttgatatttctggcccagccacgcttgaatcattaataaataaaagatttgtgattcgaagtggcgatagattaaatatatattgggatatatttagagagtatatactgacttctacagttcctgtaattgctttgcgctatttgccttcgacagagttttcttctatttataaagtggctaagcatctaaatcacactgagaaatttttggtgcaagatttagttgataaaacaaagttgtctgagggtacagttcagaacattggcactgatttaattaactttggcgttgcggtcagagaagccggatattactctctcagtactgatgtcgtgaaatgtgatgaaatggccgttcttcgcttaattcgagataagtttaataggcattctcttactttagcattgaaagaaaaggctgcggtaatgactctatcatcacttatagacatgttgaaacatatctatccgaataataattacgctgataaaacatggcgaacttatacggtaaggctgtgtcggtggttggaactgtgtggctttattgtgcagtcaagtaatggttggctgtatcgtgatataggtgatgtagtatttgatgcatcagatactaaaagaagacggctgaaaagtggtgtttttaccgcaccatcatccccagaaattgtactccaaacattgcattggcttgtagataaaggcagtttgttgaaatcagaggataaaccaaaaggttacagaaacgccttaactgttttgaacaggtttgagttgatatctatcgttgaagataactatattattaatttagaaaaactggaaaaatattccggttacgaggaagcaatttggatttctgcatcttctgaagcgaccatgttggaagcgttgaggattgtatcaagaaatccaaacattaccggagtggagttaggttcatatatcgcagacaaatttagtatggagtggacccaatcttccatgctaagaaacggaagttcaataaaaaaatgggttacttggattaatgatgtgaaaaataaagcctatagtaaaaacatcaaaggtgtaaattaa

SEQ ID NO: 168666 - DNA, 651 bp, Enterobacter cloacae
atgagtaattccgccatcgagattttgcaagtagcgcgtagcatcgctaatcatgcgaaaaatcaaggcgcactctttgaggtaaggtcccctcgtgatatctgtgatcacctcggagccgttctcgcggactcagtgctccaggctggacttaattatatgacggttgtgcatcctcgggtgcagactatcctgcggatacatccgaatcacgtcacaatttcctcattggtctcgctagttcagagcggagaaacaggtacatttttgaactggcgccatcatgagaaggttagccgtttcgaggcactagtagctttcttacaaagagctggaattgaggacgtacaggatctacgtatgagtctggcatccaatgaattctgcgatgcaattcaaactataaatggtatcggcccgaagacggtcgattatatgggatgtcttgtcggcattgactccatcgcggttgatcggcatgttcgcacattcgcgaaagcaattggtgtcaaaaatgatgactatcacttcttgcgtgagtctttttgcttcgccgcagaccttctctctctttcgcgtcgagaattcgacgcttggctttggcgtcgagctgcaatgccaactcaagtacagatgtctctcgcaatctag

SEQ ID NO: 168667 - DNA, 624 bp, Enterobacter cloacae
gtgataaataaggtgctccttttagcttcgggtggcctagactcaacaactgttgcataccagcttgcagcagaaggtatcgaagttgtaccgatttttttcaactatgggcaacattgtgtagaaactgaatggactagggtaaatgaagtcctgccttccgaaatgcaacgacctgagcgctttgatatatctgatatcttccgcggctcgcaatcgcggctaattcgcgaagcagatctttggactgaggatatcaaggacgacgatttgtacatcccatatcggacaatgctttttttcgctgctgctgcggcacgcgcacagattgtcggcatcttgaatgtctataccggattcatcaatagcaaccacgccaaagaaattgactgtactgctgcatttatgaacaatctcgacgaacttacatcaactatcggtcccgttcgctttcattcgccattccgctattcgtccaaagctgatgtagctagggttgctgctgagcttggtgttcctatcggacgaacttattcatgccaggcgtccgcacagtttccttgcggtgcttgcccgaactgtgtagaacgcctgagtgcattaaaagaggcaaagttagtatga

SEQ ID NO: 168668 - DNA, 1329 bp, Enterobacter cloacae
atgaattgcaaagatacagttttaattgttggggagcttgttatcgactatacgcttgctcagcgtggtgtaatgtgcaagcttcgtttgggaggaattgctcatgcggcaagggggatgtgggcggcagggctaaaatattcagtggcggctttctgtcctcaataccttgttgatgaagccagtcactatctggatgagtttgggtgtgaagagttcatctggcttggtgatgtcataggtgctccgaacgttatccttattggcgacgtgacagaagtttcgcatcaaggctacgaagacctaatgagcgatactaaagtagtgaaagttaatgacccgttgccatgtctcgaagcttataagaaaatcgtagtcttccctggtcgattcgatatcaatgtactcgctaacgcatttactgaagacgcacaattttcgttcgatatagcgtatgaccttgtggatctatcttcacttaaagagttctgtgggcgcgtgcaagctgtcattatctcgacatcgtccccattgtttatgaaacttggaaaagacgatatcagtggacttctaaatgaagtgagggcactttcggcagacgtatttctgcttaaagaaaatcgtggcggtagtcgactttttgatttgcgtaataacggtgtcgaagaaataccagcaacgttgggcaataccgtaaactcagtcggcgttggagatgtttattcgagcgttatggttggcctctctcaaaaggggtggattgaagctgcatggcgtggatgccaagctgcgacggcatactcacagtcgacgtttcctgacgacatcaaacgagatttgcaacgcggattccggctttcgctggatgtactgcaagctctccaagggacagtgctcccatggcatgaccggcagagttactcaatttaccttgctggtccagatttctcatacgttgaaaaacaggaactcgaccatgctgttgaaagtctggtgtatcacaatttcaaagtgcgtcgtcccgttcttgaaaatggagagttgaagcgacccgcaagtaatggtgagctgcgctgtacatatcacatggattaccatctactaaaggaatgtgacgcaatcttcgctgtccctctcgaccgagaccctggcacgcttgtggaaatcggtatggcaatcgcgatgggtaagccggttatcacttatgatccgcggcatgagaatgagaacacgatggtagttgtcggaagttcagtatattcttctgaccttgatacgtgcctcaacggtatgtttagtgtcattgctgaattgagggccaaatcgtga

SEQ ID NO: 168669 - DNA, 150 bp, Enterobacter cloacae
atgagtacgacacgcaagctgcgactggggccgcagcccgataccacaagtgtcaagctgacgttcacctgtccggttagcctcaaggctgatctcgaacgttacgctgcccagcagagcaaacttacggcgaagccgttgatgcggtga

SEQ ID NO: 168670 - DNA, 132 bp, Enterobacter cloacae
atggcttggttgagatgccgaattctgttactcgtcatcttcctcgacaggctccagcgcatcaagtggtacttgcaccatcgcgatagaaccaatgcggataaaagcatcttctccatctatatcggttaa

SEQ ID NO: 168671 - DNA, 1716 bp, Enterobacter cloacae
atgaacacgctgacatcctctttgattacgctggcaaatatattgctaaaagcccgcacgatacgcgtgctgatactgtccactttcagcctttactggctggtgctactacatatcccctggcctaacaacggagattacggcatgaacctgccgatgaacctgctgagctggggcattatctcactgctgggtttgatggtttggctattacagcgggaaaaaacggtgcgcttcacccctaccggtttgctgatgctggctagcgcgatgctgtttaccgttccggctttctggtcaccgcacgaggccttacccatcgctctaccgaggcttgtcggcatctggggcggagcgttggtttatatcacgcttctgcagcaacccattcgcgaaaatgaaaccgttgccctcttttacctgttggccgccgcagctgttattgagtgcaccctctctctggccgggttttactgtccgcaatatttgccttttcccctcaattcgctggcggaaatatatgacgggtacgcgcccggcgtctttcaacagctcaacgtgaccgcctcgtttctcgcgaccgggcttgccgccctgctctatcttcttgccgatacgcggcgcgcgctttatctgccgcaagccgagcgtgtgcggttcgtggctatcagcgtcgccattatcgtgataacggcgacgctggtgctcttccattcccgtattggctggattggcgggttaacgtcgatagtctgcgcatcggtgctgttcgcacaggcacgttttcgacaccgcactacacgctggcggcgcacgctgataatcctgcagccggtgctcggcggtctgctcggcacggcgatacttcagcagtcggttgtggaatcgctcctgcatgaaggctctaaccaacagcgctggctgaccctggcgtacacgctgcgcatgatcggcgtccacccctggcagggctgggggctggggatgttcgaatcagcatttcagcactttatggccgcattacccggtgacaacccgagccgcgaaatgatgcaacacccacacaatgagacgctgtttatctgggcggagggcggcgtgatggcgctggcgggcgggctgtgtctcctgtggggctggataattcttttcctgaggcgaaaaagcctgtggcagtgggcggcactgctcaccaccttgccgattttgctgcacactcaggtggaatttccactctattattccgtggcgcactattttgccattctgattttaatggcatcggcagacggaaaactccgcacacttcaggttcgcagtacgcgattatgttggccgctggtgctcatcgcactgtatggcttagtgctttctgcacagctttttttcgccagcgttgtgctgggtaattttgagacgggcagacttgctttccctgagagcattaccggtttacacgtgccgggactcatgcagatgcgctatcagcgtgaccttagccaactccatttgtggcatttcaaccaggcgggcgatattgatgaactggaaagatatgccacagaaaatggcgagtggattagatggcatatggaagaagatgcctggaacgatgaggttaatatcttattatttttagatcgtaagattgaggcagataaattaaaaaaacaggcgcatcggttaatgccgtgggacgatcgctttaaaccatag

SEQ ID NO: 168672 - DNA, 999 bp, Enterobacter cloacae
atgtgtaaatttaattggtgtgttatgagtatatatctaaaatctctggcgttacttttaatcatgatgtcaacatattcatatggttgtagcgcatacgtagctagtagtccgaatgaaaccataaaatttaaccctacgattacagttcaacgtgatactcccgttggaagtgtaattacttctgcgaaaggaacattgacgggcgatccacattactttttaagtaatggttgtagtgtgtatgtggtaatgctctataatggtgcacaagcttctggagttgataacgtttataaaacaaatgttccaggggtaggtattcgtataagattaaatagttggaatcatggcggagcttacgcagcaccatccccaggcggtttcgtgttcactgcctctgaacccgggggatttggtttttctgaagccaacgctgaattaattaaaactgaaaatataacatctggtgtattgctgaccggagaggcagttaaatatgaagctgctgataatgaaaatactgatgcaaactctcatgtaacatggagcattgtttcatcatctactattaaccaagttgcatgctctattgtctccggagaatcacttgcatttccaataggtgatgttatggctggccaatttattgctccaggcactgtttcaaaggaagcaaggactgtaaatcttgggcttgattgtgatgctggagctaatgttaacattactttaaacggcgtacagtccaatgaaacaagtgatagtagtgtattgagtctcacaacggatggtggacaagagggtattgccgaaggtgttggagttcaacttctatacaataacgagccattaaaattaaatagtagaattgtgctcaagcaatcccagggaggacaagaaagcttccctatcaccgcgcgttatattcagactaaagataaggttaaaccgggcattgcaaatgctactgcggtacttaacctgacgtaccagtaa

SEQ ID NO: 168673 - DNA, 531 bp, Enterobacter cloacae
atgttaaacctgaaggttttttatctatttgcatttttgttttgtggggtatgtttttgcaatgcaaatgcacatgatggtgtagtgagtatatcaggcacaattgaggataacacctgtgaaatttccagcgaatcacaagataaatttgtttacatgggagctgtacctgtcaaagaattcacgattgcaggtacgcgatctaatgcaattccttttatcatcaatcttaaaaattgtggccctgcagcgagtgaggtaagtataactttttctggagaggtaaattctcttaatgctgattatttttcggttgattcagaaacagaatcatcaaaaggaatcgctttaggtatttatgatgataaagatgttttaataccgccaaataaaaaaagcaatggatatctaattcatccggagcaagattctattgatttaaatttctcggctcgttatatatctgtttccaatgttgtttctggaggtagtgccaatgttattgcaacctttgttttgaactattcttaa

SEQ ID NO: 168674 - DNA, 540 bp, Enterobacter cloacae
atgaaactatatttgaaatatcttaacgtcgtgacgctgacgcttttgggtaatcttttttttgttccacttgcattgacagccgattcgacgctatcgattgcgggtagtattactgccagtggttgtactgttcgatctccggatcaatctataatgatcggtgcattttctgggaaagattttcctacggtaggaagcacctcttcattcaaagcgatgaatattgatttagaaaattgctatccaaaattaaagaatgtccaggtgagtttttcaggtaaaacggacagtgataatcctacactattggcaataaccgatactgggaagggcaaactgttagcaacgggattaggaatagagttactggataacagttttaaaatattgccttttgatagtgtgaaacctttaatctatgaactggatggggaaacaaatacgctgtcatttttaatgagatacaagtctactaaagccgtggtaactcctggagaagcctctgctgttatgtattttgatttgacttatcagtga

SEQ ID NO: 168675 - DNA, 1437 bp, Enterobacter cloacae
atgaatacgtcagttgtttcaccgggccgcgctggcctgatattgctgctaaccggccagatgctgccgatgattgatacctcaatcaccaacgtcgcgctggacgccatcacccattcgctgaacgccaccgccaccgagctggagctgattgtcgccctctacggcgtggccttcgccgtctgcctcgcgctcggcagcaagctgggggacaactttggccgtcggcatctgttcatgtggggcgtcgcgagctttggcctggcctcgctgctgtgcgggatggcggggaacattgaacagctgctgaccgcgcgcatcgtccagggggcgggagccgcgctgatcgtgccgcaaattcttgccacgctgcacgtgacgctgaaaggtacggcgcacgctaaggccatcagcctgtttggcggcatcggtgggattgcgtttatcgtcggccagatgggcggcggctggctggtgtcggcggatatcgccgggctgggctggcgtaacgccttctttatcaacgtgccgatctgtctggtggtgctggcgctgagtcgccatttcgtacccgaaacccgtcgcgagacgccgtcacgcatcgactggaccggaaccgtgctgctggcgatcattctttgctgcctgctgttcccgatggcgctcggcccccagtggcactggtcgtggccgctgaaggttatgcttctcgccattattccgctgggttggctgacggcgctgaatgcgcgcaaaaaggagcgtgagaatgcccatccgctgatcccgccgcgcctgctgcagcttcgcagcgttcgctttggcattctgattgcgatgctctttttcagcgtctggtccgggtttatgttctgtatggcgctgaccatgcaaaccggtctggggatggcaccgtggcagtccggaaacagttttatcgcgctgggcgtaacttactttatttcggcgtggttcgcgccgcgtctgattgctcgctacagcaccagtaccattctgctgacgggtctggcgatccagattgccggcctgctggcgctgatcgccacgttccgcgtctggggaatggagaataccgccctgacgctggcacccgcgaccgggctggtcggctacgggcaggcgctgatcgtgaacagcttctaccgcatcgggatgcgcgatattcagcctgacgacgcgggggctgcgagcgccattctcagcacgctgcagcaggccgcgctggggcttggcccggccatttttggcgcgattttgctgcacgcgctgcaaaaccatcacggggattacacccatgcggttaacgtcttcctgatggtggaaacggcgatgatggtggtgcttgccctggcgacgctgcgcatccgccatagcctgtgcctgccggtggtgaaggtctgccaggccaccaaataa

SEQ ID NO: 168676 - DNA, 333 bp, Enterobacter cloacae
atgttttccatggcttgggcgattaaccactaccgcggcaacgccatcgcctacaaagaccagcgcgatagggcgatggtccgtgcagaaacatcggaggcgatcaccagcaacgtgatcaccacgatgaacgtcatccgtgaaatttcacaggctacccagaatgcaaagaacgaactggctcaaaagggcgagacgcgcattgtctacatcagacaggcgcttgaaggcgatccgtgcgctaacaagcttgttccttctgccgctgctgacagcctgcgggaattcgcagacagtttacgtgccagccccagtggtgccgataagcgctga

SEQ ID NO: 168677 - DNA, 228 bp, Enterobacter cloacae
atggagagcctgaaggggcctacttcgaaactgttgatgggatacatggacatcaccgactcaaccgcaacgccgtatcagctgagcgttgtgaagaatgcgacgaaccaattcccgagccgcggcgcgctgccgttcccggctgccaaacgtgcgccagttgccaggctgatctggagcttatacgcaagcaaagggggtcttgatggattacgccatgctaactga

SEQ ID NO: 168678 - DNA, 1986 bp, Enterobacter cloacae
atggccagcacaaaaagaacaactaaaaatactgggcaaagtgttcttagtcagttggagaatctttccacgagcaaagctctgtgtgagtatgtttggaatgcatttgatgctggtgcaaaaacaatccacatcaattcgaaaccaaatgggcttagtggtctttcagaaatatctatatccgatgatggattaggaattgtttattctgagctggatcagacatttggtaagtttctcgactctcaaaaaaaacaaaaatgctcacctattacgagaggacgaaaaggaaaggggcgtttttcttttgtaaaatttgcacaaagagcactgtggacaacttttgatggaaaaggtacagagtttacgatagatcttaaagctagccatattaatgaatatgtggtcagcgcaccgatagtaatgccacagaatcaaagaggaacagtagtatcattttcacctatcaccataggtgaagacgagttcaacaatcaaatgattggatatattcagaatgatatatcatggttgttgcttgctgatcctaatattcaagtttatataaatcagctaaaagttaaacccattgattatttgtctcataattatgacaaagaattgaatgggtataagtttgatatcaaaacgactcaatggtcgcagcgaccggtcaaagaaaaatcattcatttattttataaatagctcaggaatcatagtccataaagagttatctgagcttaatggtaagaaattttattgttcagcatatgtctcttcatcatttttcgattcgttcgacatacatgcggacttattaggttctcatgaaaacaatactaaatctgaagagtatagatttatagtttcagaagtaaaaaaaatactcaaggaagaataccgaatctgtaagagtagcgtggccgatcaacttattcaggaatatctttctcaaggtatattacctgagtatcccggagataatgtcgcttacaatgaatttagaaggaatcaactcattgaaactattaaggtgatttacgaggctgaaccattgcttttctccaagacactaaatattaaacaaaagaaaatttttgttaagttactagataggattgttgagacgaatagtttagcaaatctctttgatatctttgaagggatcgtcgagttaagcgatcaagaagttgataaattatctaatgtcattaaaagaacctctctgtcgaatattacaaaaaccatctcatttattaatgatagattggatatactcgaatatttccaagctttgataaaagatcctgagaaagatacttacgaagtcaaacacatacaaaaatcagtggaagataatttatggttgtttggtgaacaatatactttattggcctctgaagaggataagtttgataaagcacttagagtgtttttaaaagaagtgaagggttttgatgaagaacacttcgataagtattccgtagaccatcctgacagtaaaaaggaaatggatatttttgcagccttaaaaggaaagagatacgatgatgctggtaaagaatattttcactgtgtagtgattgaattgaaacgaccgagtgttaaattgacggataaggaatacgaacaagtcaaaaagtataagaatgtaataagttctaatgctgaatttactaatgataatacccgttgggattttattttagtagggaatgatatatccgacaatcaaaacaatactgctaatattcgtgatgaacttgaaagtaataaacatcatggagaatatgggttgcttcaaaagagcggaagtaagcgtatatacattaaaacatggaagcaaattattaatgaatttgaattgcgatatcatgatttaacagacaaactacgtttaaaagaattggtgataaatcaagaaacacccgatgagttaacatctagaatactcgagatcaatagagaaggaactgctgcataa

SEQ ID NO: 168679 - DNA, 897 bp, Enterobacter cloacae
atgaaagctagtgaagtcatgaaggctgcaaaatcatggttcaagctaagtaactatgatgtgttgcaggagatcactgtcaacgatctgaagagggaagtgattgcccggttagaaatggctgagcacaattttgctgttgagattgatgaaagcgactggatgtaccgtcaaatccatctggataacgaaaccaagattttatctgggcaaccattgctggcaagcccacgtgataaaccagctccagtttacggtaaagattacccattaagacaagccgttgaaaacccgcttgcagatgctaaaaggcatatcaggcacatgactgtatttgatgtggcgaaatatgcacataggttgagtgatataaagatacttacccgtgtgggacctaacgatggtggtgctctttcgcctaaatcagcaaatgtagggcagtggcggttgaccgatattgaaaagcttaattcttatacaccgctgtatcttgaacttaacctcagagcgctcacagatgaagaggtgatagagcatatgaagcgtatgcttcctgaatggcgtaggactcatgatctccctgaacctcaagcgttcgggatttcaacaatcaaaaaattgattaacttccaaaccatccctatgttggacttgctgttctgggcaaagagagaaaacgtcaaaatttcgtatgagatgttggctcgtcttctacatccagattcatcagagtcgatcagaggtggttccaatatcaaagatactgataaaccgtttgccgataaagtgcttaaccgtgagttcgaaaaggcctttaacgtctacttaagtaaaaacgatgacatgatcaatacaaaagttgctgatgttatgagaatgaatgaaaaagaggagtga

SEQ ID NO: 168680 - DNA, 837 bp, Enterobacter cloacae
atgttgttctggttaaagtttctctgccctgaagcgattcataagcagacggccactggcaataaaccactcagtaaccagagcagacagatgttgaaatttaaatttgtaaagaaaaggccctacgctttttacgcactcgtactatcactgtcatttttctcagaaatttcagtggctaatatgagcgtgtacccgatggaactgaatgtagatagctccggaacagcgcaaataacagtggcgtcgaagagcgatgatattcagttcattcgggtgaagcaaaagaaaattcttaatcccggaacaccgctggaaaaagagatcgatgttcccgcatggcaggaaggtggcattgtcgtcacccctgaaaagtttgccctttcagcgggcgccatgcgcgtggttcgactggtgtctctggttcctccctcaaaagagagtacctggcgcatctatttcgaaggggtcaaccagccagacagcattgccctcagagaacagggtcactctgctgccttagcgaaaataggggtaaatattatctggggtgcgttggtgcacatcgcgcccgcggaaaatcacatctcattggcactggatagaactcacggctccttaataaataagggcaccctgcgcgtaccgctaaaagaaatcggtatatgtgatgaaaaagataaatgccactggcttaaagaagaggcaacaatttatccggagacggagcgaaacttaaaaagtttttcgcaaccacagggcattaagtacaaattccgctacttcaactggataaacaaaaccactgaagaagctgagttacccgtcgtggaataa

SEQ ID NO: 168681 - DNA, 495 bp, Enterobacter cloacae
atgcataagtttattaaacctctgatgatcgttgcctcgatgacagcatctctgaacgcaatggccattcagaaagatattactatcaatgctagcgtcgattcgcagctggatatgactcaggccgacaacacaccacttccgtccagtatcgatatgcagtatctgcctggcagcgggttggtaagttaccgtttaaataccaaaatctggtctaactccgccaccagcaacgtcaaggttcgtcttgtcagcgcagccaaactgaccaataccgatggtaaccagaacattccgatgaccgttattcttggcgataaaacgctcaatacgactgacacggtgtttaccggtacggagcttttcccgggcactgctgaaaacggttcagccgtattaccgctgactctttctcaaacgacgaaaggtatgctgaaaagcgggcagtatagcggcgttgtgagcctgatgttaacgcaggcaactacagcataa

SEQ ID NO: 168682 - DNA, 2718 bp, Enterobacter cloacae
atggcttttcacagaagtactctcctttttgtttctctattacccgcatcaattcaacttgcctgtgcagaaatggcaatcccatctgggtttgaggatctggcaaaaactcagcgtctgtggacggaagtcagcctgtatggagaatcacttggtctttttgaaatagatactaatcttgagacggtcacctttatcagaccgcaggcgcttatcgccgccgttaaacgtcaatttaatgacgatccagcgcttcttgcctccgtaagcaatacgctggctgcaccgctgcctcgcaacggcaacctcgcctgcagtagcaacggttcagcgccaggatgtgattatatcaatacccgccgcgcggcaattatctatgacgaaaataacgcacgcataaatctattttttgataagcagtatttgccaaaacgcacagcgggaagtcaatggtatcagccgacgcacggcagcgaaaacgcacttattcatcagcaaaatattaactttgttgcggacagagtttatcagtcggccaccgttcaaggtagtggtgcgctggcggttacagatgacggttatttcaatctcgactgggcctggcttgggcaacgatcccaccatcagcaacagcagaatgtcaccgtcaacaatgcctggtatcgtcaggacataggccgtgaacactatattcaactgggggagatggacacccgcgatttattcagcaacaccgggggaaatatttctctcagccagcttcctttggggaaaatacgtgggcttcgcgcgggttcgacccgggcatggatcaatccggttcagctttcgcacggcacgccactcaccgttcttttgtcccatgacgcccgcatagacgcacgtcggggagagcagttgctggccagcttttacctgaacgccggggcgcaaacactggatacccgttcgttcccggagggcagctacaccgtcactctggcaatctatgaaaataaccgtctaacacgcactgaacaagttccctttactcgtaccggtataaccccgtttgatcgcatcgaatggtttatgcagggtggtgaaactaataacgatgggccagatgaatcacgttctgccgtagcacaagcagggattcgcctgcctctcacaccgacactggccctgtccagtggcgtcactgcaacaagtgagcgccgttttctggaaaatgccgttgactggagccagggttttaattcagggccgattgatggggtgcttagcacacgttttagctacctgtacggcagcaatggagaacgaggaaatatccaacaggtcagctataacgatggtttttccctgagtttttatcgtaacgcattatcagcagatagctgcgataacagaagccagggattcgacgctgttaacggttgttaccgtacgctgtcgacactgttttccgtacctctcggatcgtggtatgccagcctgggctattccgataaccacagcgaaggacgttacgtctaccgccgcgagctttctcattatgacgatcgttacgacgaaggtctcccctgggaacaggtttatatgacacgctctcactctcgtgcctggcaggcggggctgagcagcagttttaatatccgtggcctgaatatttacggcagcgccaatgtgtttaagcgcaacgacgactcacgcagtggcagcgacaaaggcggttacttgagcttaaacctgtctctggcaaatccccctcaaagggagacctcaagttatacctctttgggggctacctggcaggggcagcaaaacgaaaaaaaccagctcagctatagcgtagcgcataactggtacgcagacgcacgtggcgagaacgaatacggtctgagcgcatccggaatcaacagtaattcgcttaacgcatcggcatacacgcgacaaggagggcgtttcggtaatgtcagcctgatgttcagcgacttctgggacagaaacgcgcgcagccacactccgagcggaagcggaaattacagttcaacattcgcgctgtcgcgctccgggttgtggcttggccgctggagtgatggacgtccagcatcagccgttgcggttaacgtctctacaccggaagaaagcgagacatcccgtgttgccgtctcgctggataacggcggtagtgcggatatcccaacgaacagccaggggttgttcaccgtaccgggctatcgacaaacgacgctgaccattaacgaatccctgaaaatttctcacggtgccagcagtgaaatcacacaggggtcagggagcagaacggtgtttatggtgcccgggaaattgcttcatagagacgtgcacacttcagcaagctacacctgggttggacggttgacagatgaacgtcatgtcccgctgacgggagccgtgcctataaatgtcaatggctggaacgatctgggacaagggggttttagcgcacaaagcgatgtccttctccaccaactttatatggttagccagcagcagttttatcaatgcgcgcttaacgtcaagagtatgcgtgatgtggtgcgctatgtcggcaccataacttgccggggaatgacattttccgctctgccagaaacggttcaacagcaggcgcagttaatgctaaccagacatggaaaggcggttgacgccacggtaatgaatactgataacgatgtaaaaggaaaatga

SEQ ID NO: 168683 - DNA, 1146 bp, Enterobacter cloacae
atgaacaaacagattttactttcgttgcttgcctgcctctgggcagtgaaatcgccagcagcgccccccgcagacaaaaacacgactgtcagtctgagcttcgatcgtacagcgccacccaaccgcttttatatctggaaccaggagtcagccggttatgatcctctaaccccccaaaaatggggaatgaacacactcacctgtttatcgaccaacaaccctcaagggggctgtcgtacgaatcaatactcggtggaagataacccatcgccgccatatgcaattagtgtgcaatttacccatctggcgacaaacaataaggtggaactaaaggtatacggtgagaagcatatgtttctccgtaaaagcgccatcacccttgcgagctatgttaccgatgggtcctacaacagagcagactgggatcgcgaaccttattttgatttttatattgtcggcagtgaattgagcaaactgaatctctccggtatctggtcccaaacgttaatacagaatgttaggttatggaataacgggagttgtgggggacttccggttagcttgggatgtggtgacaccaacctcgctaaatggtctgcagaaatcaagctcgaagttgtcgatacgggtaatcaacaaatttacctgccagccttcccgcattcaacccctgtcgtcaatctaaacctgactaactttcctggcagaccaggaggaagtgagatcagcggtgaaaccgggctcgatatgtgtctttacgatggtaacagcagcaccagtcgtcgcctcttcctgcgctttgaagacgacgggctggaagcagcagatcgcgctgctggggcattctccatccgcaggcgcggcggaagccagacggaaccgagagaccgtctcgattaccgggtttcggtgatccatcctgtcacgggcgccacggaaacggtaacaaacggcactaccgtcgtctgggagggggtgaatgaccctaaatatcttcggcaagtgatcctgccaggtgggcgtgaaacagtacagtgcgtccccgcacctatcattctgaccacgccgtcgttttccgccagcagcaaaaatgccggggattacaccggcacgctacgcgttatctacactcccagtacgttataa

SEQ ID NO: 168684 - DNA, 516 bp, Enterobacter cloacae
atggcaattacttatcttggaatggaactcgcccctgctaacaaccagcttgcggtctatctgaagtttataattgatgaggcgataacatattcctatacggtactgggaagatcgactagcacgacaagtttagactttacgtattcttcaaatgacattgtctctttacctgagataaaaatcccggttattggactgtatgcaaactaccttaaccaggtgcaggttgtctttaaaaaccttagcggagtggaagtttttaatcaaaccatccaggtaagcacacaggaacaactctaccgcgatgggacaattttccatatcgatattgagcaaacggatcccgctaacttcacgaccgtatggggaaacagttggttaatgactaccaattgtgatggctacgaccggaacggcgatcttcgctgctattatgctcagccctaccgtaatcagatgctaaaaacgcataatggttatttctatatcggcagtgatgaagatgaacactag

SEQ ID NO: 168685 - DNA, 258 bp, Enterobacter cloacae
atgacgcaggtgatagtcacttcctgttatatcgctaacattaattttacgactttaatgcaggttaaacaggtaaaaactcttaaagaagtaccaggaatcatctcagagaaagaagggcgtatgcgcccgaaattcgggcgcggagggaactcaggcggtcgttttaataatattgacgatcagcccgtcatcttccagtttattacggtgcgcatcgctcaaccgttcatcggtaatcacgcggctaaagcgtga

SEQ ID NO: 168686 - DNA, 432 bp, Enterobacter cloacae
atgaaatatttctacagcgctaaaaataatgcgttttattacttcggctggaaagatgattatgatgccgctggtacatggccagatgatgccattgaagtagccgacgatattcatgaaaagtattcggcagatccgcctaaagggaaaattttaatcgctggtgctgatggtatgcctgcatggggagaaacgccgccactgactcacgatgagaatgtagctcaggccgaagttgaaaggaaaaatcgtattggagtagcgaacgattttatgaacagcaggcaatggcctggtaaggctgctatcgggagactgaagggggatgatcttacgcaatataatctgtggctggattatcttgatgcactagaggccgttgatacctccagcgcacctaatatcgggtggcctacatccccggtggtgtag

SEQ ID NO: 168687 - DNA, 435 bp, Enterobacter cloacae
gtgaacacatatttttatagcgctaaacacaacagctttttcccgcttgagcttaaagatgattatatcaatggcatcggttggccagaggatgcagtcgaggtaacagaacaggtatacagcgaatttacgggtgagccaccaaaaggacaaaaaagagttgcaggaaagaatggattgcctgaatgggaagacattccgcccccaacccatgaagaaattgtggcgcatgcggaggttgaaaggcagagccgaactgatgctgcaaacgactacataaacagcaatcaatggccgggaaaagcggccatgggccgcctgaacgatacagataaggcgaaatataacgcctggctggattaccttgacagtatcgtagccgttgacgtttcaactgctccggaccttaactggcctacaccaccggggatgtag

SEQ ID NO: 168688 - DNA, 1173 bp, Enterobacter cloacae
atgcaacatcttttcgtgtgtcttgatggaacaggaaacagtcctgtacaggctgatcttgaatacacagtcattcatggcttaactcaaagtagtgttgaaagtaatgttctaaaaatatggtgtgagttgacagggaatgaagaaaaataccacccagaggatctcattagcagtaacgaatacaaatattatgggttggtttcttctctaaagcttgaaggtgactatccaggcgaggccctatatataaatggtgttggttcacagggggataaagagaaaatgaacattgagggagcgatgggaattgggacaagctcccgaattatcgatgcctaccgttttcttgctgagcgctataaacctggggatagaatttatctttttggatttagcaggggagctttttcagctaggagccttgctggttttgttcgccatttaggaatgcccgttggtcgcagaataatacccgataaggaattaccatcactctgggaagcatatcgcgaaaataaaccttaccaaggcgggttagcatcttctttgtcaggaagaaattctgtggggattgagtttcttggtctttgggatactgtaggcgctttggcattccaggactcgtttaacaacttccaccagacatcaccgaaagggataaagcatgttcgccatgcattggcactcgatgaagtcagaccgcactttgcccctatgtattggaacaacttaaatgagtatggacaaattgtgaaagaagtttggttttgtggtgttcacagtaatatcggtggaggctatcaaattgctggcctttcgaatatttcttatatctggatgattcgagaactcgctgaggcaacaggatttagaggccgactagagacggttgatgaatatccaaaagaagcttgcatacctgatgacgaaattcgggattcttacagagaattttataagggggtgagaatagttcttgctgcgcttaaagggggggtgtcagttcgtgaaatctctgacagacaaacatttcatccttcagtgctggaatggatgaaaaaggggtggtataaaccgcgagccactctaaaaggcgggggcgcactggcagtaacttatgtagaaaagtatctgagtaatgctaaagactggccattagatcctgattaa

SEQ ID NO: 168689 - DNA, 177 bp, Enterobacter cloacae
atgaagattcccacaagtgtttttaagcgcttcaatttaatgaaattaaaaatttatttcatattgcatccatacattgaacgcatcgatagagaacctcacattttgcgggctttagtttttaatttcataattagtaaaaaacattttatcactcatattacttgtgatttttag

SEQ ID NO: 168690 - DNA, 486 bp, Enterobacter cloacae
gtgaacatcaccatctgcaagccagacgaatatcctgatttggttgatatttttatcgagatggaaaactattataaccaggatgtttgcttgtccaggagtgacatgaccgcatatctgagggataaggtccttgcagtcgactctcatactgaagttcacaaagtggtttgtgaaggagtaatagctgcgttttcatgtgtctcagtgatgtacccttcaccacgtttcagcgggcaaatgtttatcaaagagctttttgtttcagcacctttcaggagggctggagtgggtagaaagctgatgagttttatagccagccgggctcaagagcggggatgtttacaactcgattggttatctgtggcagcagacccattggcacaaaagttttatgagtctttcggtgctcaggttatcaagagtgttaactatcatcgggtttttggcacaaaaatagatgagcttgcccgcagtgccggctga

SEQ ID NO: 168691 - DNA, 315 bp, Enterobacter cloacae
atgtcgtcaaacaaaattcaatattctgatagttttatcgagacttatgctgacttcgccagttttgcacctgtaacatcttcagacgacaagttagtttacatccatttcatatctaacaaatctatcccagcagtagtttccttagaagaatctaaggaagaagttggcaaagcgaaccttcaaataggatcagtgaccgaacttcgccatgaatgcactgttctgatgggaatggaccagctaaaaaccttccgagacaatatcgacgttctgttagagcagcttaaacctcaacaagggttaagcaaataa

SEQ ID NO: 168692 - DNA, 690 bp, Enterobacter cloacae
atgcaaagagaagaggatgttggtgaactgacaatttcttatagaaagagcgatacattgacccccgtttctctgaagctagacaacatacctcagaaagatttcttgactttcatgcgtagtggtagtgactgtttggtcagtaatgttactatttacaatcaagattcacatacttctacaagttcggctaccctatctgacaaaactgttgctacacttgaaaacatcatcatggaagctgagccaagcggaaagagtctggaagctactaacgatgaacgagaagttcaacaggaaactgagatgtcagatctgaacagaaatgaaatacaagcacttcttaaggctaataaagccgaagtggatgctgtagcttcaaaaatgcagacagagatgtctaagtggcgagagactatgtcttccgacctcaaggatatcaagcacatgctcgtttcgcagaacgaccatctaaacagtagatttgatatacaatcgactcgaattgaagcggcgttagatgctcattctaagaaaattgatgctgctctctcagttcaagaagcgaaacttgagggtaagcttagtgatgttaagctcgatataattaagtgggcgcttggtttacctgcacttgcttttactgtttacaaactttatggtgcgatttcaggaaaccctacgccataa

SEQ ID NO: 168693 - DNA, 546 bp, Enterobacter cloacae
atgcaatgtatttgtaaacttatggccttagcgcttgttgctgtcgggatgctttgtattacccctgtaacggcatccacgccagtgcagaaggacagcccagtgataaatactttgtttgcgcaaaccaaaccacagtgcatcgggcgctatgtgattgacgttcccgagtcgtttaacaaccggcttcacgatatgatttttatcgatgattttaaaattgaaagtaaacctctctatccgcctgcatttaaacagcgggtgcaattaagagagcaggaactgagtgatgctataaataagcctgaaaatgagtctgtaaatgcaccgtttataaaagaaaaaattgcgttgcctgatggtaatggggttatttttgacagaaatatttcagggggagatgacctcggaagagttttagaggcacatgtatttgtaaatgcaacagcttttattattacgacggaaatacttgatttatccagtcctaaatatagggaaagaaaaaaacatacactaaagctggttttaccgaggctcaaatga

SEQ ID NO: 168694 - DNA, 1011 bp, Enterobacter cloacae
gtgttattcgaagacacttttgttgttagtgagaagtatgcctcactacaggaacaaattgaaactatcctgcgtaaatcagcagggcgactcaatataaacaatgctgatgagcgcaaaacaatcaaataccggaaagaagtcttaaacagcccggaattcgaagcgttatggcagcgaatttgtcaaaaaacactgtaccgactggcatttgacgaaaacgaattgattaaatcctgtacgaaatcactttctgaaatgcagcctgtagcaaaagcgatggtcagtttcagcaaagcaacaatcaaacaaagccagtcaggtcttgatgttaaggcacagtctaatgggacaacaagcgctgttattgatgttgctgaacaaccgctgccagatattcttggtgttctacaggaaaaaaccggactgacaagacgcagtttaagcaccatcctgaaagaaagtggaagactcgttgattttgctaaaaacccacagcagtttatcagtgaagctataagtcgaatcaactattgcaaacgcctgtcaattgttgacggtattaaatattatccactaaaaggagaggtgtatgcgcaaagtctctttattgataaagagctaacaggatatgcccgtaatcttttcgaaacctcatttaagtgcgtttacgaatatgttcctaaagattctgaagtcgaaagccgtttcgctcaggaactcgaagaacaggatgaagttaagctttatgtaaagcttcccggttggtttaaaatcccgacaccactaggaacttacaatcctgactgggctttggttattgaagacaatggtgaagaccatatttactttgttgttgagacaaaaagtaaacacgttggtcttggtaatgaagaagatgcgaaaataacttgtggcaatgcgcattttatgtcactcaaagatcagttgattaatcctgctagatacatgcgctctaccaatctaaatgaggttgtgagcagcatataa

SEQ ID NO: 168695 - DNA, 708 bp, Enterobacter cloacae
atgccgtggcctcgcaaacaggaatctattacccgtttatccttgataacccaactgatgatacagttatcggaattggcggtttccagtggggcggtggtgggaaaacgattattgggtacaatttctttatctgatccaagacttagcggcactttagaccagctaaggactggcggcaccgacgagaacgcattttatgtccctccggtttgtaagttgcttcccgggctgcagttggtaaatattcttaaccattcagcatcaggcggagtcagctcgtccttccccggtattattctgtttagccggcgggatgtaagttcaggatacgttgacggatccgggtacactcaaagcagacctgtaatggtaggcgatgaaataacgttcagttgttatgtcaatgctggcgccgcggttaacgaaaacctccttgttcttaccgaaacgcttaacaccactacagcttggttaacattaaacaatggtgccgggacaataactcttggaatgaacggcggcgcaacattgacagttgccactggaatacaaacaggaatgtataatgtcagggttacgttgaacacaaacaggacagttagcattctctttggtggtgtaagtgctaccaccgccgcagctaacacgcctttggcaacatgctacgtttctacacgtggcctttataacgtaaggaagccataa

SEQ ID NO: 168696 - DNA, 333 bp, Enterobacter cloacae
atgagtgctacagaacccctgaaacaaaacaaaaccaacgacgagcaaaagaccacttctattttttcaagaatcgataatgcatttgcatttattttttggttttcttttttattctttgcaattacgagcggaatgggaacttttgtagcacgaacaacacataattttcatgaattcactttcaaaaacgaaagatacgaattaattaaaaattatggtgacaacataattgcattaaaatctaaggacacgaataaaacaaagggggtttatgtttttaagcctgaggatttaattgagactcgcttaaatcaagtaaaaacgcagtaa

SEQ ID NO: 168697 - DNA, 384 bp, Enterobacter cloacae
atggatattaaaacccctatcaaaaatgaaacacttatagttgcgctaggtactgcgctttgttacacgggagcgtatgcttatgaaagaggattctgtttattttttggaatacctaccgagttgataactgttacccctgcaagcattatctatactgtatttctgtttgctgcattccttatgactttatatatggcatcatcatttccagtattaatcgctagtaaaaaaaatcttaaaaacaaacatataacctcaattttaacattatcacccatttggattatttttaatttaatcttcttcttaaatgccggatttgaattagtcacctttctaatcatcaccgtggcttctctctttctttcagtgtcacaatga

SEQ ID NO: 168698 - DNA, 2715 bp, Enterobacter cloacae
atggcgaaatattatctatggtgcattatggcaaacgcaaaacagcagtctccaaatacttttaaaccaaaaatcaaggcaattaatattgttattttaggcgccctttattcctggggttcctgcgcatctgcacaaaccatcagtgccgataccgatgttaccggtcaaaatgttactgatggcgtgctgatagacactgctggtgtcactgccaatatcaatggcggtagcaaaataagtaataccccggataaaaatggtgtaaccattaatcttacagatcctacgaaaggcgcaacactgaatgtcagcggcgcagggaccactatttctggtggaaaaattggtatagatgttgccaactccataggggctacggttaacgtcacggacaatgcgtatgtagaaggcgtggaaaccggtttagtcgtccgtaataatgttaatggtcaggctaacgcgaatctgaaggttgaaaactcaaccatcaagggtgggggattcggtgtctatgtctgggaaacatcgggtaaaagtggcagtaatgttgatatctctaattccttgattgaggctaatggtggcagtaatgatgacaaagcagtatacattagcgaagggagtagccttgtccatataactaacagcacgattaaatcggacggtcaaggcatcatgaccagtagtggttattccggcgcaatagatattgcggactcaaccatttctgcggctaagactggattaagattgataggaaataacggagatacttacaacatttctaacactactgtaaatagtggtaatgaaggccttgtaatgtacggtagtaaaaataccaacgtaacgctgtctaatggcacaacagtaaacggtgttaattatgggatctacactgatgatgccagcaatgaaaataatatcatcaatattgatagctcctcggtaagctcctcgaccggcaatggtgttgctctgagtggcggttacacgttaaattcaagcgcagggtcaactatagaaggtgatagcgccattatccttaaagggaataccataggctccaccgttagcgtgaaagactccacggtgaccggcaaaaccaatctgctgaagatttccggtaccagcgcagtggatacggtcggtttcagcggttctaccctttccggcgccatcaccacctcttcaggtgctgaccagtcggtgaacatcgacagctcaacctggaacggtagcgccgggaaaaccggtaccggcgcgctggcgctggatatcagcaacggctcaacctggatcaacaacgcggccacggatgttgatgccatcagcctgaccggtggcagcaccatcgtgatggacggcgggaatatccacaccgcaaatctttccgacaccgcaccgaccacgctgctggcggcagccagcccgacagcgtccaccatttactccacgtataacgcggaaaccggttcagcctatgtgcttaccgccgacaaggccaccggcagcttcaatgccggcgtcacctccagctccagcggtgcagcgggcgatatgaccggcaacaccattgtgcaggtgacggacggttccggtgcgaccttcaactccatgcaaagcgatgtcggggtttaccgttacgaatcacgcagcgtggctaacgcagacgggtcaaccagcgtgatcctcgataacattacgccagaaccgacgccagaaccgacgccagaaccggcccctggcccgaacccgaacccgaacccggactcgcgcacgctctcaaccgccgcgcaggctgtggtgaatacccgtgcggcagcgatgagcatctggagcgacgaactggatgtgctgaaccgccgtctggataacgagcgcctcaccggcagcagcgacggcacggtgaacgcctggggcagctactacggcggctaccaccgtcagcaggtcgagcagaccagttctgcctacgatcagaccaacaacggctttatgttaggtgccgacaagcgtgtcgatatcgctccgggcaacctgctgttcggttttgccgccacccgcgggtattcggatgtgaacatgcatgacggcggcagtgcaggcacagatgtcgacagctacggcgcttcactgtatacctcactgcgcctgaacaacggtctgttctttgatgccagcatcaagggtacgcacctgaaaaacgacatcagcgtgacgtctctggacggcggtcataccaccggcgactataacaacaatggcttcggcggagctttcaaaacgggctaccacaagcagtttaatgcctggtatatcgaaccttatgcccagatttcttatgcccgctataacagcgtcgactacaagctgaaaaatggcctgcacacgaaagatgacggcagcacctcactgggtctggaaggcggtgtgaatgtcggtacggcgatggcgctgaacaatggcaccgaggtccgtccgtatgtgcatctggccgttgcgggtgaaaccgagaacagcaacaccatggacatcaacggcgaaaaaatcaacgacagcaccgacggttcacgcggcatcgttggcctgggcgcggatgtgaagctcagcaaaaacctgagcggatgggccggggcgaactatgccaaaggtcaggatcactacgagtctccatggcagctgaatgccggtgtcagctacacctggtaa

SEQ ID NO: 168699 - DNA, 381 bp, Enterobacter cloacae
atggatcgtttcgatgcgatgcgcgcctttgctcgcgtggtggaggcaggcagtttcaccagggctgcccaaacgcttcatatgagcaaaaccacggtgacgcagcttattcaacagctggaagcgcgcctgcgcgtcaagctgctccaccgcaccacccgcaggctcggtgtaactcctgatggcgcggtctactacgagcgcgtcatccgcctgctggcggacatggaagatgctgaaaacagcctgtccagtgcgacgatgacgccccgggggcgactacgggtggacgtgccactcctcttgcccgcctggtgctggtgcccgcgctaccggcttttcacgcgcgctacccggatatccagttcgacatgggcgtga

SEQ ID NO: 168700 - DNA, 1344 bp, Enterobacter cloacae
atgaaacatgtagttagaaaaaaggatgttttatggggatacctctctcaattcttgagtattgcatccagtttactactgttgccctttattcttagatatttagggcaagaagaaatagggttatggtatgtttttgttgctcttgcaggattggtacagcttttagagtttggtctgttacctacagtttcaaggtttatatcttatgtatattctggggccaaagatataacttataataaaatacctgaatgcaaagatgaagagataaatcaagagcttctgaatgctttaataatagcggcgagggaaatttattttaaaataaccactctcgcatttgtagggatcgtgatatttgggaatatatatttgtacagtttgcacacaactctagattttctctatgtgatgagttgttggactctgtatggtataagtatatgtgttcaattgtattttggatattataattcaattttgaaaggaaggggggatcaaactgttttaaataaagttatagtgttaacgaagtctatccttctggccgttagtatccccatgttagtaagtggtcaaggattaatatccctcgcaattggatctgtcattgctgtaatcatcgatagatggattataaccaagtgtgtctacaacaatgatcattatattattaaaaattatatcccacttcaagcagcaaaagagttaaaaacaattgtctggcaaagtgctaaagacatgggaatagttcaattaggtaatttcctgtgtgtaaggggtagtatccttatagtatcaagcttcattggtttgaaagctgcagccgcttatggattgacggtacaagtaacgatggttattgtgattgtcgcctctatgttgtttggtcttaatttacctcgtatgactgctgaacaggcattacagaaatattcatctgttaagcggttatttaaaaaatcgctattgacagctaatgctatttatatggcttctgctttttccttggtttttcttggtgattttcttctaaaacatataacgcagcaaacacattttttgccaacagaaatgctagtgctatatttgatctgcagtttattagaaatgaattactcattatgcacttcatatctaacaacaaaaaaccagattccatttgttaaaagcatgataataacggggatgtcaattattttgctttcttttgtggtcacttattacttaaaggcagggttgttaggggtgatattgtctcaattgtttgtacagtcactctataataactggaaatggccgctaactgtttatcaggacctaagaaatgtcaagagctga

SEQ ID NO: 168701 - DNA, 1125 bp, Enterobacter cloacae
atgtcaagagctgaagtcgcaataattgatttactcagaaagaaagaagagcattatgtttttaattctttaacaattaaagctattagtgaagagaataaagcaactatttggttatcagatgatgcaacactaatatccgaattaaactcggatgttaaagtaaataaaattaatatcatgaggacaaaattatacctctggctatattcaacattgcatctggctgtcattttattaaagttacctaaaacattaagttcagtctttgtactgtctgcaacacctcttcagtacgccttattaagtgcattgagcctaatcataaggccaaaaatttttctttttatgcacggagagcttggttatttaaaaaccccatctggttttggtcagaaattaggacgcttctttatttcgttgggctttagatttggtgatgtaaaattcatttgtattagttcatcaatacatgaaagcttgtcacagcttttcaaaaatagaacattttattatgtgcaacatcctatatccacgcatcaaaaattgctaaaaagcagaaaggatataaactttgggagctttggcatccaaagtggaaataaaggtagcgacaagatttatgagcttgcgaattatataagttcgatggatttgacctgtatcaggttgatgaccgtaggggtgagtgatggagggtttatttatgataaatgtacaaatgttcatcacttatgcaaaggatatcttaaagaatcactgataagtaaaaatgaattttatagtaatgttcagaaaatagatgtcgcacttattttttctggtcagtctacaatttctgacacgacatatgacctggtatcaagcggtgtttttgcggattgcattgcctttaatatgcctgtaatagctatgcgcaataaacagctggctcattattttgaaagatatggacagtttggttacctttgtgactctgtaagggaaatggctgatgcagtcctggaaattgcacaaaacagagaactacttgataaattcgaagaggtattaagtaaagttcgtgaagattttaaatttgaaaattataaagtaagaatcgcagagattatgcggaatgaataa

SEQ ID NO: 168702 - DNA, 576 bp, Enterobacter cloacae
atgaattataaaaatatattttcccgatatggatattatgatgatgaaggtaaaccactacttattcgctcacaccagccacggcaccttttaaacacaatagcccattatggtgaaatgtctgaactggatatagctaaatggtctggtcgtatcaatgcgaatcagaacagagtttataaccatgtgtcggaagaagatatgttagataaaatcaaagctattaaattgaataggagtaattactgtcaaagggagtcaatacccacaaatgaattgacaattgattttgataaccttaatcaaggtgcaatacacttaactgaatttggttactgtgtacataactatttaatcaagccttgtgcaaaaattaatcatcttattgaatgtgataatgaaacaccggacattaactcagtagatagaattagactgcaatctgtccgagagaaagtaatgcaattaaagagaataactcagatcgcttatgaaaatggtgattatggtgcagacaaatggttgcaacaccacaaaaaaaatttggaaagaattaataaactattgaataattga

SEQ ID NO: 168703 - DNA, 282 bp, Enterobacter cloacae
atgataactgtgataattgagtatattttcattttcttatccaaaaaacaattaattaagaatgccagttttggtgttgttattgtcagtggagaacgtccatttgctgacaatttcgcctttaaaatctatttcaagagttttagactgagtctgcgaaccgccagtaaacagccctacaactggaatgaaagttgttgcattgaactgattgttatacataaagtatctccactgctcatttccgtcatcgagtgtggttcttgtatcaggctcacctaa

SEQ ID NO: 168704 - DNA, 1173 bp, Enterobacter cloacae
atgaagggtatgcagaagatcaaaaggggtaaaagcttcgctggtgtcgtgcaatatgcattgaagccaggttcacatcataaaagtaatccaatcgtcattggcgggaacatgttaggtgattcagcctctaaactgatcactgaatttgatggcactaaacagcttcggcccgatgttcagaaaccggtatggcacaactcgcttcgcttacctgatactgaatcagtatcgaatgaccaatgggtaaccatagctgacgactacatgaagaggatggggttcagtgatactcatctccgttgctatgtgcttcatgacgacgttggccagcatatacacatcattgccagcaggatcgacatagccggtgggaagctctacttggggaggaacgaaaaccttataagcacacggatcattagtgaactcgaaatcgctcatggcctgacagtgacaaaaactgcatctcccccctcgcaagcacaaccgaagcggaagagagtgtcccgtaatgagaaaatgctatctgaacgaactggggagcattcaccaaaagaagctttacagcaaattattgataaaagtttagtcggtaagcctgaccttctaactttcacaaaacgattggaagaagcagaagtatcctggaaggccaatgttgcctctacaggtaagatgaacggcttttcattcgaatatgcaggaatcgctttcaaagcttcgcaattgggtaaaagctactcttgggcaaatctcagtaatcggcttaactacacccccgaccacatagaagctctgcgagcgacaaaggaagttatccctgctcctgctcctgctcctgctcctgctcctgctcctgctcctgctcctgctcctgcaaaggatgttgcaacaacggatattccaaggaaaagcataagtgaaaaaattgctgaactcgaactgcgactcagagaagacagaagaaaagaaatagtagaaaagattcttcaaaaaaacgcagtacaacagcaaaagcatctcaggcttatcggctggcttccatttcttagaaggcttgcagagcttctccgaagctatggtaagagcattcttcacaagcccctccctggattctcaaaactctctgcaacccgacttctacataaagaaaggaaaattcatttatag

SEQ ID NO: 168705 - DNA, 210 bp, Enterobacter cloacae
atgaaagaaaaaattatagctttatcagcttcattaatatgtattgtcttttttttatttttatcattaatgataaaagaaccatgggttaaggacgggttgtatttcctaactccgatcatggttctaatgattcctataatttgcgtgctaattcttaaaaattatatgaagctaaaaaaacgtgaaatcaataattttattcgttag

SEQ ID NO: 168706 - DNA, 384 bp, Enterobacter cloacae
atgaatcaagtagacatctttttgaaagtgataattggtatatttttctttatatatgctatattgttttgctatgttatttctgaaatgattggccccttaaattatttgattttctttcttcctttcatcatttcaatatccctatgcatgtttttcaaaaaaagcttaaagaagcttaaaagtgcaaatgattttttgcttttttcttctgctggacttggtgctattaagttagttgcttctaaactgaatcatgatagcttagtattgaatcaaattatagatgctttaaaaaatagtacattactgctaatgattttagccacagctgcgacgttgaaggcatccatagctctttttgagatttttactaacgaataa

SEQ ID NO: 168707 - DNA, 201 bp, Enterobacter cloacae
atgaagcttgaagaactgtcaggagacgaacgcacactggttattgtggcactgcaggcgctgcaccgtgaaagactgaccgcatcaaatgccgtctttacggtctgtagtctggccggaaaggaccagccgccggaagatatttttgggctgcgtgaagttcaggatgcactaagacgtattggtgccgctcctcattga

SEQ ID NO: 168708 - DNA, 1041 bp, Enterobacter cloacae
atgcttgagacgaatttagcaaaaccatttcttgttgtttatatcatttggcacccggatttcgccgctggtgctggactggctgaaatattgcggggacactttcgtcgggaactctatcagaacgttgctggaggaaccggtttaagtgttatttttcgttctgagcctctacctgaaacggggaagccgttgccgatcaatttttcagaatcagagaccaccgcagtccttatacttgcagaatcatgtatggcaaatgatcctgaatgggggacttaccttcgggagctatccgcgcagtcggaaatagctggactgggtacacatcttttccccattgctattgaagtagaaggattaaatcttggactggaagagcaggcattgcgctgggaccaatggatacaggatgggagtaacaatactgcaaatcttcatatacgattgattagtgagcttacatacgaattttgcaggatgctgcgccattacctggaacatctgaaacaaccagaaaaagatgaagatgatttgcttaattatctcaagaaagttcagatatttcttagccattctaaacatgatgaagatggagagaggattgctcgtttgatacgtgagcaattacatagtggacatgggttaagttcattctttgatgtccatgatatccctgctgggcttcggtttcatcaggtgctattgaaacagctggcgcaaagcgcagttgttgccatacataccgactcttattcctcgcgtgagtggtgtcgcagagagattatagaagctaaacgtaatagtgtacctttagttgttgccaactgtattagcgaattggatgaaaggggatttccttatatgggaaatgtccccatagtgagaatggatccccagcaggctgaacgaattaatatcattattgcacgcctgcttgatgaggttctgaaagattttctgtggcgttgtcgtatacaattggttaatactaaacaaagtgcagtgcagtgcagtttgttccacgtgcgccggagttaa

SEQ ID NO: 168709 - DNA, 489 bp, Enterobacter cloacae
atggctggcagagggaacatcatgacttatcgtgaaatgcttagtcagcatattattgcaatatctacatcagatagcccagatatgcctgtattggggttaagtaaacagcatttatatgacgcgatgacagaaattgcgcgtcatttattagccttgggagccaggattgtttatggcggagatctacgtgctaatggttttactgaactgttatttgagttagtagcacgccatagaagagatgccgatgagggggatgaacgttccagtatattgaactatcttgcatggccggtgcatatgcaaaaagatgccagtgacttggaaaggctcagtgcggacctgaaaggaatggcaagacttgttttgttcaatcgcgatggcgagccgttaccaatggcagaacgagcccattacatagcaactattccttctgatgaagattgggcaataggtttgacagcaatgcgacatgttatgttataa

SEQ ID NO: 168710 - DNA, 399 bp, Enterobacter cloacae
atgagcaaccataagaaaaatatcgatacagattggtataatttccaagaagagatttgtgaacattttaaaaatttaggtgccaacgctaagacgaatgttacagtagaaggtgtaagaggaatttcgaatatagatgtggtagtggaatccaaatatcttgggactgatttcaaatggttcgtagaggctaagtattggaatagtaatgtcacaaaagaaattgttcatgctttttttacagtgcttcaaaataccggtgccgatagaggtttcatcatttcaaaaaaaggttttcaatcaggtgcaatagaagccacgaagcatacaaatataagtttgtatacacttgacgaatttaagaaaaaaacaaaccatcttgtgcaatctaatctgtaa

SEQ ID NO: 168711 - DNA, 549 bp, Enterobacter cloacae
atgtttttcaaaataaaatggttattctcagcattatttttatctctcttcttaaaaaaaattagattccctacgtttattgcctttccagttttttttaaaggcctgaaccgcgtttccattggaaaacatgttcgtattttccctgggtgtcggttagaaactcatggcgatggtgaaataattatagaagatgatgtttcattagctcaaaatgttcatatcacttctggggctaaattagttatcagacagggaacattaattactgctaatgtatatataacttctattgatcataattatgaagaaattggtgtgccaattccacggcagagccacaaatatagcgaaactataattggcaaaaattgtttcataggtatgggtgttgcaattcaggctggtacaattcttggtgaacagtgcattgttggtgcgaattccgtagtgcgaggaacttttcctgattattgcgtaatagctggggttcctgcaaaaataatcaaaatatataataaagagtcaggagagtgggttcgtgtttga

SEQ ID NO: 168712 - DNA, 807 bp, Enterobacter cloacae
atgaatttatcagtagttatacctgtatacaatggggcaaaaacaattgttaatgcagtcaagtctgtagttgaacaaaaaaaacctgctgacaattttaatattgaaattatcgttgttaatgatggttctgtggataatacactacaggtcttgaatgaatatgttttggctcatcgagtaaaaaatatttcaatatatacgactgaaaatggtggcgtttccagggccagaaattatggaataaagaaatcgcgtcatgattggattggtttccttgatgctgatgatgtttggattagtaataaacttgaaatacaatataaatatcttacagaatcttgcattgaacccgtttttataggttccgctcgcaacgaagaagctctttttttatatggtaaaaagattacttcgttgtataaagcacgtttaatagatctactcattaaagtttttccgcaaacgtctacagcactggtgcgcaaagatgtgataatggattgtggtctatacgacactaacatgacacatagcgaagacgcagatttatgggtccgaatttgcgccagtggaggtaatttttattaccaccctgaatctacggttttaacaggctctggaaagcataattttggtgactcaggcttatcagcgaacttgaagttaatggagaaaggggcctgttatatgttacacaaggctcgtaaacgtggagatatatcttttttagtttatgctctcttgtatatattctttaaaattaagtatttaagacgtttgataattgtcaagcttaggggatga

SEQ ID NO: 168713 - DNA, 1047 bp, Enterobacter cloacae
atgtctcctgctggtggtattgaaagagtaatttcaacactcgttaataaactctcggagctttatgagtgtgatgtactaacttttgacaataaagattatttttaccatgtcgataaaaatgttggtcggcacaccttaaatcaaaaactcaatcttgatatgaatcatagatggaggcgtttaatacaagtcggcactaacttttggataacgatatttaatctaaaaagatttttttcgaccaacgtctacgactatgtctatgtaactcaccctttggtccatttaatgctactccttgcaggcgttgactcgagaaaaataattataagtgaacatggggcacgtaataattataataaaatatatagattcattcgaaaagttacgtataaacattgtcatgcatactgtttaccaactaaaagtgattttgccttttataaggaaatgggttttccggtgcggtatacgcctcactataaacctaatttaaaatatagaatgcatgctgatgatgttagaactgttttgtgtgtgggaagactaacacccgataaacagcacttacttttactagacatttggcgagagtgtatacatcaactaccaaaaggttggttgctccatattgtgggtgatggtgaattaaaaccagatatcgagaaatttatcaccaacaataaacttgaagataatgttaagttaagttgtgctgtccgggatatatcagatttatattataactcttcaatttttgttttgacttcacgtagtgaaggctttggaatggtgttgcttgaggctatttcttttggtttgcccgctattagttttaattgtccttcaggaccaatggatattatcaataatgaaaacggatttttaatagaagatggtaatcgagatttattcaaaaataaattaattgaattgataaattcagacgagttgcaggatagcttaagttctggtgcttataaatcagcacagcaatggaatgacgaaaagataacagagtattggcaggatatttttaaatga

SEQ ID NO: 168714 - DNA, 495 bp, Enterobacter cloacae
atgagaaattccttttcatgttcatcaattacactaaatcctcggcaaagtcttggtatcttatctacattaggttttataatccaattcaaacaaaaactgtgtattgttccaatccataacgattcactacttatgccgaatgacataatccgttcaagaatcgtatcggctgctatatttgtatatgtaagagcaattatcttcttttttcctatacaaaatagttctttattttctaaaatgaaacaaagtttagaaaccaatgtttttgttttacccgaccctggacatgccgttaataataaattcccgttgaatttaacggcatccatttgctcagaagttaaatttctatatggcataaactataactccaacaatcttacaaaactgtcattgaagtgtttcttatattctatcattttactagaaaaatctttttcggcatttatacagtcaaatgctttaacccccattaaagacatattgtag

SEQ ID NO: 168715 - DNA, 1305 bp, Enterobacter cloacae
atgaataatttaattaaaaataaatctgataaaatgtctttgcatgaacataaaatcgtcagttcgattgaaaataacggaatcaatcttacaaacttaatatatgctatgaacgaaaatttggtttgtgggtttgtatatacagtacaatattattttaatagcaacagctatttgtatgtgaaaaatattgttagaaatatggagagtcttatccgtaaactatctcctactcatattgatgataaggttctaattgaatatcaaaataagaaattatcaaaagcctcagcatcatttcgcgttttacgaccatttttgattaaatggtttgagttaggatatccgggaatagatgaaagtgcggtagaactgttaaagcatttggacctaaaaataaaaaaatctggtcagtctgtgcttcaagatgatccaacagagggaccattaaataaagaagaacatacttctttgattaaggctatgaatcatgcatatagaaaaggtgaactgtcactgccacattatgcaatatcactattgatcagtcttacaggtagaagacctcagcagttagttatgttgaaatataaagaccttcttcaaaagaacttagataatggcaaagtagaatatgtaatttcagtgccacgagtaaaacaacggggtaaagaactacgatatcgagaacttgcaataatatcagaggttgcatcaattgttcaattgcaagctaatcaatcagtgaaacttgttgagcaagctcttggaaaaactcttgatgattattctaaacgagaagttcctattttcttaaatgaggaaaaactctcagatttatccataacaggttcaattcttctggaatataataaattatatgcgaagcctacaattgctaatgtagcattgaaaagtattgttaataatgggaatgtaatatccaaccgtaccggttcgatactaaatattactcctcgtaggcttcgttatacaatagcaactatgctggctaagaatgggcataatgttaatactatagctgaattattggatcattcatctacttcaagtgcggggatttatattaaaaatcatgctgacagtgttgaaaggattgattccgctgtttcagaacaattgtcatttgtcgctgatatttttatgaacggaatcaaatcgaaaaagattagtcatttcaaatttttttcttcaagtagatgccagagtcagaattcaggatttccttgcaatcaatgtatgttttttattccgattgatcgcagtgaggtgaatcaactatga

SEQ ID NO: 168716 - DNA, 714 bp, Enterobacter cloacae
atgggaatcatgacaaaaacggataaggtggatgcgtatatgctggcctgttacgcattccttaagaagccacaccgctgggagccgccggcacccgaaatcagatatctcggtgcactcctgcgacggcgggatgttctgctgggtgatgccctgcgtgaggagaacaggctggaaaaatacctgtcgacagacacacctgcagatattatcagttcctgcaggcgtatggcgcagcttctgcgcgaggaggtaagtaatatcgagcggcagataaaagcacatatcaaagccagccctgcactgaggcgtgattatacactgctgagctcaattaaatcggttggtccccagcaggggatgcatatgctggtcgtgcttcgcagccataactttgtatcggctgagcaggctgccgcctttctgggcgtggtgccgatcgagaaacgctcaggcacatcggtccggcgccgaccgcggatgtcgaaaatcggcccccctcagttgagagcgaagctttacatgtccgccctgtgcggaaaaatctacaataagcgaatgcgtaatatttacgatgagatgtgcctgcggggtaaacctaaaatggtggccattggcgcgctgatgcggaaactggtgcactggtgttatggcgtcctgaagaccggaaccgtttttaatgacgaaagcctgaaaccggtactgtcaacctga

SEQ ID NO: 168717 - DNA, 1632 bp, Enterobacter cloacae
atgcgcctggctgtgttctgcgaggttaatgacgtcatcgcccgccacggtgttgatggtcaccgcaggcacggtcacgtccaccgtcagattgcgatccgccgacgccgggttgcccgccttgtcgctgacgctcgccgtcacggtgacgctgccgtcgccgagcgatgccagatccgccgccggaacgctcagcgtccagctgccgtccgcgcctgcggttgtggtgtagtctttgccgttcagcgtcacggtcacggtctggcccgcttcggcggtggtggtgccggatacggtcaaatcggactgcgcttctgcggcgttcagaatatcgtcagccgccagggtatgaatggtcacggacggcgcggttgcatccacgctgtactcgcgccccgccgaggcgctgttgccgttcacgttggtgacgctcacctgcacgctggcgtcaccgtccctgaggtgtaccaggtccgcagacggtacggtccaggtccagttaccgctgtcgtccacggtagttgtgtagattttgccgttcaggctgatggtcacggtctgcccggcttccacgttggtggtcgcaccggacagcaccagatccgcgcccttctccgccgcgttaatcacgtcgtcggtggcgatggcgttgatgctgatggcaacggtcgccagatctaccgtcacgtcgtggctgatggtaatcgggttacccgcagagctgtcgccggtcacgctgattttgacggtgccttccggccacgcgctcacgtcggaggacgggatcgccgcgctccaggtgccgtccgccagcaccgtcgccgcatagtctttaccgttgacggtgacggtcagcgccgtgcctgccgccagcccgtcgctggagccggtgacgatcaggttctgcgcgtgttcgatggtgttgaccacgtcatcacccgcgacggtgtcgacgcgcaggcccggcaggttagcgtcgatagcgatttcgcgctcgccggtgccggtgttgccgtggccgttggtgacggtcgccgtcacgctcaggctgccgttgcccagcgcggtcagcacgtcagacggcacgttcacggaccaggtcagatcgttctgcaccgttgcggtgtagctgttgccgccaagggtgacggtaacggtattgcccgcttcggcgttcgccacggtgccgctcagggtctggcctgctgccacttccgccgcgttgatgacgttgtcgcccgccacggtgttgatggtgacggtcggcagcgcggtgtccaccagcaggttcgcggtattgctcacgctgttgcccacgccgttggtggcggtcgcgttcagggtgtaattggcctggccgagaccggccagatccgctgccggaacggtcaggctccaggtgccgtctgccgccgtcgtcgccgtgtagtttttaccgttgagggtcacggtcaccacggtgccttccgcgaggttggcgctggtgccgctgacgctcagatcctgacctttctccaccgcgttcagcacgttgtcatcgctgatggcgttgaaggccaccgatggcagaccggtatcgacggtcacgtcatggctgccggtaccggtgttgcccgccgcgtcggtgactga

SEQ ID NO: 168718 - DNA, 150 bp, Enterobacter cloacae
atgatgagaatcttcttgtatccattcatttttttcattttgatggtagatgttatcgcccagaatttgtacatgactaccatttctagcaggctttttgatagaaaacctggtatcctcccaataagcattgaaactaattttttctga

SEQ ID NO: 168719 - DNA, 567 bp, Enterobacter cloacae
atggttcgtacttttttcccgccgcacgccggtaagccccatgcttttcatcagtcgcgcgatggtgcatctgaccacgctgaagctttcccgttgcagctggtgccagaccttacgaactccatagacactgtagttttcgtcgtacacgcgctgtacctccagcttcagctggtcatcacgccggtcacgctgactgcgtttttccggatgctgacgttggttctggtaccggtagtatgtcgacggggcgatatccagctcatggcataccggtccgactccgtgacttacgcggagggtatcgagcagcggcatcatgttcacatgtgcatcagcattccaccaaagtattcggtatcgacaatcgtcggctatctgaaggggaaaagtgcgatagcgatagcccggcagttcggcagaggaaaaaacttcactggtgaagttttctgggcacgaggatattttgtttcaactgtaggcctggatgaagccacggtcagggcttacatacgcaagcaagagcgagaagacgaacgttacgaccagatgaatctgaacgtataa

SEQ ID NO: 168720 - DNA, 315 bp, Enterobacter cloacae; identical to SEQ ID NO: 162268

SEQ ID NO: 168721 - DNA, 468 bp, Enterobacter cloacae
atgttcagactgacctgtattgaactcaataacggcgagtttgccgtgtatatcaacaaccattatctgtggagtgaggatgccagcggggaacgactctgcctggggcaggtgctggagcagctttccctgatgccgggggtggaaacctgcactattcacgaggccgttccggaggacgaagagtggtgctggaatgacattgccgatcgcgtgttgccgtcgctatccgccagccgcgagggtgtcaccgtggcagctctcatcgcgcggttacagcagtatccaccggacgcactgtgtatgggaacgttctggctggctgatgattttctgtcgctcgatggcagtctgtcggaggaggaaattgcggaagccatgcgtgtctgttatcgcagccacgatgccggcatcggttttaactgggacacgctgcagttcgctatcgaccacgtaaaggggcgctga

SEQ ID NO: 168722 - DNA, 456 bp, Enterobacter cloacae
atgaactctatctattgggtgattttcatgggactgctgataaacataccatcactggctgtcagactgtttctgcttaatgctttcttggtgctgtcccttttgacgctatcgcagaacaccacgcaaaaatacgggctgtttcctgtatggctggtcgttgtttctatcgggctacttttggccacactgcttccaacggtgaaattcatgcgtaagcatttaaccgttgggaaaagtcgggctgttatcctgtcatcatttctgattgcctacgccataagatttcatggtgtgttttccagtgtgaatggcagtggctacacagttaatggatacaatacggtgtggacgttgttctttctgtttgcctttctgttggcttatcttggttgtgctgggagtaaaacatattctggttattctgcgtcgtcatctgcaccaagaaagcattaa

SEQ ID NO: 168723 - DNA, 429 bp, Enterobacter cloacae
ttggtaacctcgcgcatacagccgggcagtgacgtcatcgtctgcgcggaaatggacgaacagtggggatacgtcggggctaaatcgcgccagcgctggctgttttacgcgtatgacaggctccggaagacggttgttgcgcacgtattcggtgaacgcactatggcgacgctggggcgtcttatgagcctgctgtcaccctttgacgtggtgatatggatgacggatggctggccgctgtatgaatcccgcctgaagggaaagctgcacgtaatcagcaagcgatatacgcagcgaattgagcggcataacctgaatctgaggcagcacctggcacggctgggacggaagtcgctgtcgttctcaaaatcggtggagctgcatgacaaagtcatcgggcattatctgaacataaaacactatcaataa

SEQ ID NO: 168724 - DNA, 270 bp, Enterobacter cloacae
atgaaagcgctcggcgaaatgaaaatgacgcaataccgccgggaaggggtaaataatcagactgtcagcgatctcctgacccgtcagcggcaggtggcaaaccgtcaggtgagtgttccggcggtacttctgtcccgcgtcctgcgtaactatgaatgcgagctggaaaaccggatcggtatggcctgggaagccgggcgacaggagccggaatccgtcagaaatgagctgaaggacgttcacgcattacaggagacactggccgcgtaa

SEQ ID NO: 168725 - DNA, 759 bp, Enterobacter cloacae
gtgctcaatagtgttgatcacgtcatcacccgccacggtattcacgcgcaggcccggcaggttagcgtcgatagcgatctcgcgttcgccggtgccggtgttgccgtggccgttggtgacggttgccgtcacgctcaggctgccgttgccgagtgcggtcagcacgtcagacggcacattcacggaccaggacagattgttctgcaccgttgcggtgtagctgtgaccgccgatagtcacggtcacggtgttgcccgcttcggcattcgccacggtgccgctcagggtctgacctgccgccacttccgccgcgttaatcacgttgtcgcccgccacggtgttgatggtgacggttggcagcgcggtgtcgacaagcaggttcgcggtattgctcacgctgttgcccacgccgttggtggcggtcgcgttcagggtgtaactggcctgaccgagaccggccagatccgccgccggaaccgtcaggctccaggtgccgtctgccgcagttgtcgccgtgtagtttttaccgttcagaattacggtcaccacggtgccttccgccaggttggcgctggtgccgctgacgctcaggtcctgccctttttcaacggcgttcaggacgttgtcatcactgatggcgttgaagctgaccgacggcagaccggtatcgacggtcacgttatgggtgccgctgccggtgttgcccgccgcgtcggtgacagacgcagagacggtcaccgtaccgtcgctgaggcctga

SEQ ID NO: 168726 - DNA, 504 bp, Enterobacter cloacae
atgatgttgttgtcgctgacgatctcgatggacaccgtcggcgcggtggcgtccacgctgtactcgcggcccgccgaggcgctgttgccgttcacgttggtgacgctgacctgcacgctggcgtcgccgtctttcaggctacctaaatcggcagacggtacggtcgccgtccagttgccgctggcatccaccgtcgcggtgtacaacttgccgccgaaggtgatggtaacggtctggttttcttccacgttggtggtcgagccagacagcaccaggtccgcgcctttctcagccgcgttgattacgtcgtccgaggctatcgggttaatgctgatggcgactgccgccagatccaccttcacgtcatggctgatggaaaccggattacccgccgcgctctggccgtcaacggtcacggtgactgtacctgcgctcagcgcgccgacgtcagccgccggaatagccgccgtccaggtgccgtccgccagcacggttgccgcgtag

SEQ ID NO: 168727 - DNA, 501 bp, Enterobacter cloacae
atgttgtcgccgctgatggtgttgatggtgaccgctggcgcggcggtatcgacgctgaatgcctgcgaggaagaggccgcgttgccgttcatgttggttacgctgacctgtacgctggcgtcgccatccttcaggccgctcagatcggcagccggtacggtgcaggtccagtcgccgttggcatcgaccatcgtggtccaggttttacccgcaaagataatggtaacggtctggcccgcttcaacgttcgaggaggagccggacagcaccagatcctggcctttttctgccgcgttcagcacgttgtcgtccgtcacgctgttgatgcttatcgccaccggggcgagatcgacatccaccacggtaccgatgttcaccgggttgccggaggtatcctgcgcgctggcgctgatggtgagcgacccgtcctcccaccgggagacgtccgcggccggaaccgcagcctgccaggtgccgtccgccagtaccgaggcggaataa

SEQ ID NO: 168728 - DNA, 417 bp, Enterobacter cloacae
atgaaaaaaatggcttctaactatgtaggtctgataaaaaaagaaagtgaaatatatactgaatttgtatctgaacttgagtacttaaaaattttatcatgggatgttaagaaagaacatattgaagaagtagataaaattagaacgtacatgagaggtataatcgctaaggatcaagagctattagctcttatcaatatagtttttggtatgtggaatcttaacgtttataatgatgatgaaagtaaagcctttaccgaacttccattcaatttatcaagagatccaagggtggagatggcattaaagctaataccagagatgacgcgagaaagagagaatttacaagcactcattgaagatatgcttagtaaacaattgaatgttttttcatttattgaacaagtgggacactaa

SEQ ID NO: 168729 - DNA, 519 bp, Enterobacter cloacae; identical to SEQ ID NO: 119189

SEQ ID NO: 168730 - DNA, 426 bp, Enterobacter cloacae
atgaaagtgatgttgtttttactggccgcgcttattgcggttgtgctctggcagcgtcatgaaaacggcaacctgacgcgctcgtttgaacgggcaaacagggtcgccacggaacaaaaaaccgcgatcggaatgctgaaaaatcagctttccgtttcgcagggaattgccagacgaaatgaaaccgcgcaggtcagtttacgcggcgaactgctggccgccggtgcgatggccgtgcggcgtgaagaaaccattacgaggctgattaatgagaatgaaaccttacgccgctggtatagcgctgagctgcctgatgttgtgcgtcggctgcacacccgcgccggttgcgcctccgccggttattgtttacagcgcgtgtccgaaggtgagctattgcccgatgccgggcagcgacccggccactaa

SEQ ID NO: 168731 - DNA, 483 bp, Enterobacter cloacae
gtgccagcccgtctcctggtcgattttggcacgcaggccgagcgcgcgggcggtcgcccatgctatttcggtctgatttgccgtggtgtcccatgccagaaaatcagggtgaatgaccgtcagctcacgctggctgaaattctcacggtaggcgatagcttcggaaatggtcttgcagccccacgcgctgatatagccaaacgcgcgcaggctctgacaggtcgccgcgagcgcggtcgccacttccagagaatccagccccggcacgccgagaatgcgcggcttaacgccggtgacagttttggcggtcaacagcgctttcagtccggtgtatttgccgttttcgtcggtcgtgccgatgatgttggaaatggtttctttctgcgccgcttccgggtcgtccgggtcttcaataccttcggcaacgcgcacaaccacaacgaccggcttgcactggtctgcaatggcttgcagggattttga

SEQ ID NO: 168732 - DNA, 1128 bp, Enterobacter cloacae; identical to SEQ ID NO: 160631

SEQ ID NO: 168733 - DNA, 369 bp, Enterobacter cloacae
gtggcctcactggctgagctggaatttgaagacgttcccgacaccatgctcaacagcctgaccgacaaggtaaaggccattttcagccgcaaacaggccagcgacgacgcacgtcttgcagatgtgcatgaggctgtgaccaccgtcaccgagctggtgcaaaccaacctcaccgccaccgaccagcgcgtcaccgagcttgagaccgaactggcgcagcttaagcaggacgtgaccagcaaggccgaagaaagcgcgcaggcgtttaacgacctgaaaaactccctcgataacaccgaaagccagcgccagccgcgccgcgagctttcaaaaggtggtacgggcgacgagctgctgaccaactgctga

SEQ ID NO: 168734 - DNA, 1068 bp, Enterobacter cloacae
atgcgtaaagatacccgcttcaaattcaatgcctacctgtcccgcgtcgcggagctgaacggcgtttccaccgatgacgtggcgaagaaattcaccgtcgagccgtcggtcacgcaaaccctgatgacgaccctgcagatgtcatccgcgtttctgaccaaaatcaacatcgtgccggtcgacgagctgaaaggtgaaaaggtaggggtgggcgttaacggtacgattgccagcactgccgacaccaccggtgacgatgagcgtaagaccgctgatttcaccgcgctggagtccaacaaatacgaatgcgatcagattaacttcgacttccatattcgttacaaacagctcgacctgtgggcgcgttttcaggacttccagacccgtattcgtgacgcgattatcaagcgtcagtcgctcgatttcatcatggccggtttcaacggcatcgagcgtgcggcgacgtccgaccgcaataagaatccgatgctgcaggacgtggcgaccggctggctgcagaagtaccgcaatgaagcgccagcgcgcgtgatgtcaaaaatcaccgacgaggaaggggcggtgatttctgaagtgatccgcgtgggtaaaaacggcgactatgcgaacctcgacgcgctggtcatggatgccaccggcaatctgattgacgagatttatcaggacgacccggagctggttgtgatcaccgggcgtaagctgatggcggataaatatttccctatcgttaacaaagagcaggcaaacaccgagtcgctggccgctgacatcatcatcagccagaagcgaatcggcaacctgccagccgtgcgcgtgccgtacttcccggctaatgccctgatggtgacgcgtctcgataacctgtcgatttacttcatggacgacgcacaccgccgcgccatcatcgaagagccgaaaaaagaccgcgtcgaaaactacgagtcaatgaatatcgactacgtggtcgaggcttacgccgccgggtgcctgattgaaaacatcacgctcggtgacttcaccgcacctgctgcaccggaaggcggggagtaa

SEQ ID NO: 168735 - DNA, 909 bp, Enterobacter cloacae
atggcaattgttgaccttaaccagctcgccgcgcctgatgtcgtggaggtgctggactatgagaccatcctcgcagagcgcaaggcgacgctcgtctcgttatacccggaggaacaacaggaggcagtcgcgcgcacgctgaccctcgaatcagagccgattgttaagctgctggaggaaaacgcctatcgggaagttatctggcgccagcgcgtcaacgaggccgcgcgtgcggtcatgctggcgtatgcagaagatgccgaccttgaccagataggcggaaattataacgtcgagcgcctcgtcatcaccccggcagacgacacgacgtttccgcccacgccagccgtaatggagtcgaataccgactaccgtctgcggattcaacaggcttttgaaggactgagtgccgcaggctcaaccggtgcatatcagtttcatggccgcagcgccgacgggcgtgtcgcggatatttccgtcatcagtcctgagcctgcgtgtgtgaccgtgtccgtgctgtcgcgtgaaaataacggcgtggcctctgacgagctgctcgccatcgtgcgcgatgcgctgaacgacgaggacgtcaggccggtggccgaccgcgtgaccgtgcagtcagcgaaaatcgtcgactacaaaatcaccgcatcgctttacctttaccccggccccgaaagtgagccggtgctcagtgcggcaaaagcaaagttacaggcgtatatcaccgcgcagcaccgcctcgggcgtgacatccgtaaatcggccatctatgcggcgctccacgtcgagggcgtgcagcgtgtcgagctggccgcgccggtggctgacatcgttctcgatgacacgcaggcgtcatggtgcagcgagtacagcgtcaccatagggggcaatgatgaatga

SEQ ID NO: 168736 - DNA, 531 bp, Enterobacter cloacae; identical to SEQ ID NO: 141033

SEQ ID NO: 168737 - DNA, 909 bp, Enterobacter cloacae
atggcaattgttgacctgaaccagctcgccgcgcccgaagtcgtggaagtgctggactatgagagcatcctcgcagagcgtaaggcgacgctcgtctcgctttatcctgaggaacagcaggaggccgtcgcgcgcaccctgacgcttgaatcagagccgattgttaagctgctggaggaaaacgcctaccgggaagttatctggcgacagcgcgtcaacgaggccgcgcgtgcggtcatgctggcttacgctgctgacagcgatctcgaccagataggcggaaattacaacgttgagcgcctcgtcatcgcgcctgcagacgacacgacgtttccgcccacgccagccgttatggagtcggacaccgattatcgtctgcgcattcaacaggcttttgaggggctgagtaccgcaggctcaaccggcgcatatcagtttcatggccgcagcgctgacgggcgtgtcgcagatatttccgtcatcagtcctgagccagcgtgtgtgacgatctcggtgctgtcccgcgaaaataacggtgtcgcctctgacgagcttctcgacattgtgcgcactgcgcttaacgacgaggacgtccggccggtggccgaccgcgtgaccgtgcagtcagcgaaaattgtcgactataaaatcaccgcgtcgctttacctttaccccggtcccgaaagtgagccggtgctcagtgcggcaaaagcaaagctgcaggcgtatatcaccgcacagcaccgcctcgggcgtgacatccgtaaatcagccatctatgcggcgcttcacgtcgagggggtgcagcgcgtcgagctggccgcgccggtggccgacatcgtgctcgatgacacgcaggcgtcatggtgcaccgagtacagcgtcaccatagggggtaacgatgagtag

SEQ ID NO: 168738 - DNA, 759 bp, Enterobacter cloacae
gtgctcaatagtgttgatcacgtcatcacccgccacggtattcacgcgcaggcccggcaggttagcgtcgatagcgatctcgcgttcgccggtgccggtgttgccgtggccgttggtgacggttgccgtcacgctcaggctgccgttgccgagtgcggtcagcacgtcagacggcacattcacggaccaggacagattgttctgcaccgttgcggtgtagctgtgaccgccgatagtcacggtcacggtgttgcccgcttcggcattcgccacggtgccgctcagggtctgacctgccgccacttccgccgcgttaatcacgttgtcgcccgccacggtgttgatggtgacggttggcagcgcggtgtcgacaagcaggttcgcggtattgctcacgctgttgcccacgccgttggtggcggtcgcgttcagggtgtaactggcctgaccgagaccggccagatccgccgccggaaccgtcaggctccaggtgccgtctgccgcagttgtcgccgtgtagtttttaccgttcagaattacggtcaccacggtgccttccgccaggttggcgctggtgccgctgacgctcaggtcctgccctttttcaacggcgttcaggacgttgtcatcactgatggcgttgaagctgaccgacggcagaccggtatcgacggtcacgttatgggtgccgctgccggtgttgcccgccgcgtcggtgacagacgcagtgacggtcacggtgccgtcgctgaggactga

SEQ ID NO: 168739 - DNA, 414 bp, Enterobacter cloacae
ttgacctgccttaaccatgctgacgagctcgtcaaggggctggattttgccaaacagcgcttttttgccatcgagcgcagagccatcgctgataatctccgccttaagctcggtcacatcgccataacgtttaaactgactgtcaggcatcaacccccggatatgttcgaggttaatgcggcagccgtagacgcgcggatcgaacgtgtcggccatttcctgaatatcatcgccactgatgacgcgtccatcgcaggtgtcaccctcgacgccgatgcgaaaccatttagaaactttctttgccattgttcaggtgtcctgatgttgggttttcgggtcggggttagtttcccgactctgaccctcatcagccacctgttgcggaagtgcaatccctacacaacaagggtttag

SEQ ID NO: 168740 - DNA, 723 bp, Enterobacter cloacae
gtggttaggctagctacatttaatgacaatgtgcaggttgtacatattggtcatttattccgtaactcgggtcataaggagtggcgtatttttgtttggtttaatccaatgcaagaacggaaatggactcgatttactcatttgcctttattaagtcgagctaaggtggttaacagtacaacaaagcaaataaataaggcggatcgtgtgattgagtttgaagcatcggatcttcaacgagccaaaataatcgattttcctaatctctcgtcctttgcttccgtacgcaacaaggatggagcgcagagttcatttatttacgaagctgaaacaccatatagcaagactcgttatcacatcccacagttagagctagctcggtcattatttttaattaactcctatttctgtcgaagctgtttgagcagtaccgctttacagcaagagttcgacgttcagtatgaggttgagcgagatcatttagagataaggatcttacccagttcatcgtttcctaaaggggcgttagagcagtcggccgtagtgcagcttttggtttggttgttttcggatcaagatgttatggattcgtatgaaagtatttttaggcactatcaacaaaatagagaaattaagaacggcgttgaaagctggtgctttagctttgaccctccgcccatgcagggttggaaattacatgtaaaagtgaatcgccacggataa

SEQ ID NO: 168741 - DNA, 288 bp, Enterobacter cloacae; identical to SEQ ID NO: 125610

SEQ ID NO: 168742 - DNA, 174 bp, Enterobacter cloacae
gtgcgaaaagtccaacgacgcagtaaattccgcctgattggcggcccgtacgatggcgctatcgtgatgctcttcaccgctggcacactggagtttacagccaaagggcagaccgggcggtatacaggacatagcggcgacaggctacactgggaggaaaaacgtgtcagttaa

SEQ ID NO: 168743 - DNA, 600 bp, Enterobacter cloacae
atgatttttaatggagagatggtgcgcgccatcctcgatgggaggaagacgcagacgcggcggatcgttaaggtccagccagacactccagagtttggcctgcgacgcattattgagtcgtccatagctaatgagatcggaatgtatttctggtctcaagaagacgcccgtggaattaaagcgcgctcaaagcagttttattgcccatacggtgacgtcggcgatcgcatctgggtgcgtgaaacattcagcccggttcctgatcatgaagagcctgctggttgttcagccattctttacgcagctgacggaaacggtccgtatggtaaatgggttccttcgattcacatgccgcgctgggccagccgcatcacgttggagataaccggggtgcgggtagagaggttaaacagcataagcgattctgatgcatcgaaagaaggttgctgtattgctgatatggaaagtggtgactgcctaagcgatgtatttgctcgcctctggacatctatttacggcgatgagagttggaaggtcaacccttgggtctgggtaatcgaatttaaggtggtgcccaatgttcaggataatccaacctaa

SEQ ID NO: 168744 - DNA, 621 bp, Enterobacter cloacae
gtgggcctgcttatcagcgacagtactgacttcacctcgataaccaatgccacgcagtcagggcagtgtatctggaagggtaccgttaatgttccgaccgggggatgggcggttcccacgatagcaggatacgacaagtcgaagtatgtcgttttcgggcgctgtaacagtggtaacacgattgacttcgacggtaacacggtcaggttcttcagccctccctccacgaacgatgacgctcccgcgaccggcacgatagacatcgttatcttcgccagtggtgtagcgccgcaggctggtatcggcctcaatatcttcaatgctgcaggggcctgtaccttttcaaccacaaaacgacctttcgtatacctcaatcaactctggtcgccttctaaaagcgctgtgaacataggcagcgggtatgttccgctgggcaggtttgggttaatgacccatgaggttaacggggtatatgtgtatcgaatgttcggtataaaaattcagaatggttacgcttcagttcaggggggcaagtatctcgggcgcgaacaatatgccatttttggtaatgacacggtaacgcccctcaatcttcccgttcttcccgatatgtacgtctga

SEQ ID NO: 168745 - DNA, 918 bp, Enterobacter cloacae
ttgctgggctgtctgccgcacgacaacatcagcaatagcaagcgcgttgccgatgattgcttctgctgtctgcttattcgatccaaccgccgctgcaagaccgtttgcattctctttgattgcatcagccagttctgcgaacttttcactgctctccaccgcgctctcgatcaggtctttgaacgtatcagtctctttaatctcctccaggattgcattggtgatatcggatacatcgatgctggcctgcccgcgcacccagtcggtccaaccgctctgattcccgatcctgtcgacaagccgtgcctggtaccagaattcctgccccgccttcagccccatctgttgataaagtttctgcggatacggtacagatgccaaaagcatcggattcgaaccgtcagcagtaatgctgtattgcagctcagtgctcagggtgtcgccggtattagccgggaatccccaggtgacgttgattccgaatacgacgtcttcggaggccttaagcccgacaggtttgggtacatcacccgcgcgtcccttcagatgagtaagcgcggaagttgcccagagactcgatgcaccgccagagttgatcgcacgcacgcggaccaggtaatccccctcgaagatgccaggcacttcgatattgcgaagaccggtctccggtacgttaacccactcattgtcgccgcgcttccactgcacccgataggctatgacatccgcctgtggtttgccgttcttgtcgaccggcgcatcccaggatgccgtcagggtagccactcgctgcccctggcgcactgcgtcatagctcgctaccacgatattggtcggctggttgacgaggccggttggtatcagactaattggcggtgtgtccaggcgggcattgttatcgaccgcatcatattttga

SEQ ID NO: 168746 - DNA, 279 bp, Enterobacter cloacae; identical to SEQ ID NO: 134012

SEQ ID NO: 168747 - DNA, 765 bp, Enterobacter cloacae
gtgaccgatatccatacgcttgaaaggttgctcagaaggttacgtctgacgcgcatagccaccgagtggcacagccaggagaaacgcgcgctggccgaagggtggaccccttcgcgttatctgctgtcactctgcagtgaagaggcgacgcacagggaaagcgaacggctgcggcggtatataaaggacgcgcggttgccagtggggaaaacgctggccgaatatgacttcggccaggtcccggagctaaatgccgcacaggtgcgtcagctgtgtgaaacgacggactgggtggacagcggggagaatgtcctgctgttcggtgccagcggtctgggcaagagccaccttgccgcagcgatcgcggacggcgtagtgagccagggctatcgggtccggttctacagcgccggcgagttgctgcaggagctgcgtaaagcccggtcgttgttgaggctgaacgagatgcttctgaagctggatcgctaccgggtgatagtgatagacgacctgggctatgtcaaacgggataacgcggaaacgggcgtgctgttcgaacttatcgcgcaccggtacgaaagaggaagtctgatcatcacaagtaaccatccgttcagcacatggggcagtatcttcgtggacgaaacaatggcggtggcagcggcggacaggctgatccaccacgggtacatcttcgaagttacaggagaaagttacagaaagaaaacatcaaaagcagtcacccagcagtcagctaagaaataa

SEQ ID NO: 168748 - DNA, 1500 bp, Enterobacter cloacae
gtgacgctgaataccagacaggtcagtttttacatggctcaacgtaataaaggtcttacgcaggaagccgctgcggccaccaccggcatctctgttcgctccggacgacgtattgaaaaagggcagtggcaatcatcaggtgagcgacactggcggacacgtcaggatcctctggaagcggtctggctcagtgatgtgcttcctttactcgcttcccgtccgcagatctcgccgacaacggttctcgaatatctgcaggataaatatccgggccagtatcccgataaggtgcgccggacgctgcagcgccgtatccgtacctggaaagcctgccacggtgaggaacgggagatcatgttccgccaggagcatcaaccgggaatgcgggcgctgtcagattttacccagctgaaaggcacggttatcaccattaacggctgcccgctggaacacaagctcttccacttccgccttgaatggagtcgctggagctggatgcgggttgtcaccggcggcgagagcttcaccgctctggccgaaggactacaggaggcgctgggtcagctgggtggtgtaccagcggagcaccgtacagatagtctggccgcagcatggaaaaacctgagcgaggaagaccaccgggatcagacagcgcgctatgccgggttgtgtgaacactacggcatgaccccttcccgcaataacagcggacggggccatgagaatggttcagtggagtcggctcacggacacctcaaggagcgtatacggcaggccctgctgctgcgcggaaataacgacttcggttccctgaatgaatatcgtcagttcgttacacagcaggtgctgcgtcataaccagcgcaatcaggatctggtccgtcaggaactggcacttctgaagccccttcctcagcgacggtgtgctgactacgaagagttgtctgtccgggtcagcagcagtagtaccatcaacgtccggcacgttgtgtacagcgtgccatccagacttatcggacagatgctgaaggttcgtctgtgggatgacagactgagttgttacgttggaagcgatgaagtaatgagctgtcagcgggtccgggcaccgaaaggtaaacggcgggcccgcagtatcaacttccggcacgtgatcggtagtcttgtcatgaaacccggggcgttctaccacgccacactgcgtaacgacatcctgccggatgatgaatggcggcagctgtggcagcggatgtgttcacgtcttgcccctcagctggccagtcgcctgatggttaatgccctgaagctggcggcagagcgggaagatatctcagcggtcgcgaaggggctgaaccacctgctgctggagccgggagagccggatctgcagaagctgctcaactggctgggcgtgaaggataaacgcccgctgccggacgggaaactggttcagcacagcctgcagggttatgacaacctgatgcgtaaaggaggcctgcagtga

SEQ ID NO: 168749 - DNA, 903 bp, Enterobacter cloacae
atgagaaaatcaggtttaggtttagccctgttgttttctttaattgctccgattaaagcggtctatgctgaagcgattatgatttcaggaaagctacaggctgatttgccagccgtatcctttgacccggggccgggcgactttgttgcatacgttaattctaacactatcactgcctcaggtgcaggcacagcctgtaatgtaacggttgatgatcgagcgacttcctctgttgataacctcgtttgtttttttgagtggttacccaataccttgggattaacttctaacggcttcactctttcaggcgttcccaacaccaccggtgatttaaaactaccttacaagatttcttacttctctggttctgaacggaaaaaagttgaaatagtaaaaggtgaatattcaatcaaaagtgtggcaccggtaaaaccaactatcaccggtcttaaatcatccctgaacggattagtctatgacggcttttctttcaaatcgtatttaaaggatgaagcgatcaaagatatcgctgtttctgttgaaccccgcaattatattcaatacatctcaataggttcaggctccgcctgtgaagtacctattggcggaacttcctgtaccattgaagttggaagcattaaggccagtgatacagatgaacttttgggttcacgtgatatcacaattacagcaaactctaagaataattatttcgcacctcctgaatccaaaaagcttgttgttaactgggattatcggcctcctgtagtagaccatacactttggaattttaccgatgaggctaaaacaatcaaagtaggtggccaggacatctataccggagccagaatggtggctcccaacagctatgtcgctcactatgactccggatggcgtgtttaa

SEQ ID NO: 168750 - DNA, 441 bp, Enterobacter cloacae; identical to SEQ ID NO: 125604

SEQ ID NO: 168751 - DNA, 123 bp, Enterobacter cloacae
atgacgtgcgcctcaaggtactcgccagagattttcccagtaatcgtcaccgtcttctccatgacccagcccgacgagccagttctggtctcgataaccattgttacagaggtgtttttctga

SEQ ID NO: 168752 - DNA, 735 bp, Enterobacter cloacae
atggcatgtgaagctggtgctttcacagggcgtgatgtcgtcgtttactacgcgattggctgccccgaatcacaacccgccaacggtgactataagcgccttggcatgatgcgcgggaagactgtttccgccgaatgggataccgcagacgctaccgctgatatgagtgcggcgtatacgcaggaaaatctcgtaacctacaaaaacatctcgttctctggagatggcgtaacccgaaaagaagatgtctatgcgcagaacgcgctgaagcgtcacgtatacaacccgccggcagagacaagtaaccagccgtatgtctggctgaaaatcatctctccaaacgacattaccgaaggcccgtttatggtgacttcgtgggaagatgaagctcctcatgatgacgtggccacatggtctattgaggcgtcaagcgcggggcaggtggacgttcgtgatgtcggcgccgtaatcacgatcactacgcagccgcagaaccgcacgctcacggtgggcgatgcgctcaatctttcggtggcagccaatgtctctgacagttcctctctcacctatcagtggaagaagggcggaactgacatctcaggtgcgacgaacgctacttacacgaaggccagcgtcgttacgggtgatgcgggttcttactcctgtcaggttacatcctcaaccgccggctcggtaacctccagcccagctactgtaaccgtgaacgcagcctaa

SEQ ID NO: 168753 - DNA, 282 bp, Enterobacter cloacae
atggaacgttttgcaaagttgttcgaaagctacggtcgtcagattttggtgaagaaaggtgaaaacagtgatggcgattgcgcgctatgcatatcgaccatgtttgatggtgctgaaatgtctttgaacctgggctttggagacaacgaagaggctatggacaacgcacttgatgcatttactcaggaacaggctgatgttttcgggaagaaattcgagggtcagatgtctgctttcgaagcatttaagcagctaaccaataccgcagaagacgacgactga

SEQ ID NO: 168754 - DNA, 441 bp, Enterobacter cloacae
atgagtattaacggttggtactacctgcaccaaaacaacgacctgatttacaaaccatcccctgatgcgatcgcagacattcgcgattcagatcttgcggtttgctcgtggcctcttgatgtaacagatcgaaagtcagcatgggaaatgcttgttgaagcgtgcgcgttaggtgcaagcgaacttcggattaacgaacttgctgacaaatggaaatgtaacgaccaggacgctgacatgttcgcaagtgttattggagttgaaattgaacaggacggaaatcagtggtgtgcacaccgccaagattttatcaaccttcatgagtcaccagcaggttttggtgatagcaaacttatggctatggctgacctagcaaggcaattaggtattcgcggcggccacatgtggcgctctacgttttcagatctggtaaagggctag

SEQ ID NO: 168755 - DNA, 525 bp, Enterobacter cloacae
  misc_feature (461)..(470): n is a, c, g, or t
atgagcgatgagcaacatatcgggaatgataaatctcgatatttaaacgcaccaaagcggacagaagtcggtcaccgttcaggtcttgcgggtttgaaaacagcacctcgcataaaaaagttattcactcttcataagggccggagacttgaagcggaacatgtgattgttccagcccagagagtggagaaggagaccttagtccatccagcgaacccacgaaatcaagaagcccttacagattattctgttagagatattcttaagcagattgaagaaagaggggtcgataccgaagggatcgctgtaaaaagagatggggtttatttattaatagaaggaagtcgcagacgtttctgctgtataaaggcagaaaaggatctccccctgtgggttcttccggatgaactaaccgaagatgatataaattcaattatatccgcagcacaaacatctcgaannnnnnnnnngagaagttgggtttcaatttatcaaaaaaatggaagaaaaaggattttctactaa

SEQ ID NO: 168756 - DNA, 204 bp, Enterobacter cloacae
atggtccatgccgtggatatcagccacccactcagcacctgtggcgcgctgctgatcgttgggctcaagctggtcgaggaatgcggccacactggtatgaatcggcggaacgtcttcaccgcgctcaatggcagcgacacgttcgagcagctcccttccaccttccgactcggtggcgcgggcaacgtcaacccacttttctag

SEQ ID NO: 168757 - DNA, 450 bp, Enterobacter cloacae; identical to SEQ ID NO: 125600

SEQ ID NO: 168758 - DNA, 450 bp, Enterobacter cloacae
atgccacgttatcgtcgcgttaatatcgacggtcagtctctgtacaagaccgaaacccgcactacggccgctgcgctgctaccgggcaccgccgcaaccatcaactcatccgatgaattcgctcaggctactgcgctaaccggccgcctgtacatcatcgatgttggttaccaccagggcctgacaatcaccgaagaaatccctgccggggattcggcagtaggtaactacgtcgaagaaggtcgtgagctggcgctgcgctgcctgcctggtgcgtataaaaaagacagcccgatcaagctgggcactgccggtcagtttaccctggcaaccgatgacactgattcagtgatcggatacagccaggatgaatacaccatcgcggccagcaccaccgacttcatccgcgtgcgcatgcgcgttggcactgccgccgctgctggcgcgtaa

SEQ ID NO: 168759 - DNA, 627 bp, Enterobacter cloacae
atgaatcgagataaactatttgaattatatgagaaactttacttttctgagatagaaaccaaggacaagttacatgcacgagttcaagttgtgtttagtttgattgttatttcagtgacggtattaacatatctgacaaaaaatatttcatttgaatactgttggcagctttctttgggggtcgtgatactgattatttgttcattcatagcaatcggttattcctgcctcagacttcaaaaagctttttggggaaacaagtttcgttatgttactacccccaaagagctcaatgcctatagagaacaacttgtaaaatatgagatcgattttattgagtattgtttagataatgatattcaatacagaaatgagcatgagcctggcgaggtttttcgtaagcatattttaaacgaattaactgattgtactgactggaatacaaggcagaatgaggatagaagtagcgagatctttgagtctataaagtggttttttatatcactagtacctttagttctagctgtggctatctttttaatcgctgatctagactctgcatcaccacgaaaaagcactgcgcccaattacataattattccaatggaaaatattaggaggctatga

SEQ ID NO: 168760 - DNA, 513 bp, Enterobacter cloacae
atgaacaaatcagaacattgtaaagaagtatatgcttattttggattagccatgttccgtgcacaatgcgttgaacaatcaataatccaattgcttatttttttagttttctttaaagaaaacgcaacgaaaatctcgtcagcagaaaagtgggaattggaatttgataattttgataaaaccttgtcaaaaaaaaccatgggacatcttttaggcgcattaagggagttaggtgtgctaaatgaagtgatcgaaaacacgctattaaaagctttgatcaagagaaattggctggcgcatggttattttgtcgatcgcgccattgaatttttaaacgaaagtggtcgaaataaaatgatcggcgaacttgagagtattatagaattatttaacttagccgaagattttctccagccaatctcgaaaagacttgcattgcagtatggcttaactgatgacaagttagaaaaaatgaaaaaggaaatttacccatcggaaattgatgatatgtaa

SEQ ID NO: 168761 - DNA, 1647 bp, Enterobacter cloacae
gtggaaaataatatttatttcaaggaagttgacattgtttcgataagggacaagaaaggtttttcatttgaattctcaccatcaataaacttcatttatggtgagaatgatactggcaagtccagtctcataaaaagtctgtattatacgttaggcgcagatctccgtttagatgattcttggaaaaaagatgatataatcactagggttgtactttctttttatggcgatgaaattacatttatacgacaaaataaaatgattggcattgtcgataatgaaatgagcgtctatttctctatagctgatttagctccaaaaatcagtgacttatttggctttaagttacagttgcatagcaagtatagaggcgagactgaacaagctaatcctgcatgctattacttgccattctatatcgatcaggatgaaggatggcatacaattttaaactctttttcaagccttagcatgtattctgattggcaaaaaaatattttatactatcacgctggtattaggcctaaggaatattacttattacaaggtgagataaagaaaatcaggcttgagatatctgagcttgagtccgtaatagcagtgattatcaaaagtaaagagagaatcgaaaattcatttggtgtcgttctttttgatgtggatgtttcattttatgaaaatcaaatagtatcgcttcttgatgaatgtagtgatttggaaaaggctgagtctcagtttagagtggagttgttaaatctttattcccaaagaagtcgtatttctgatgaaattgagcatggcgttagaattttagaagagaactattctttgtggcaagatcagatgtctttgactgatatagttaaagagtatagtaacttgggatatcaaagtgagatggcttctcacctccctaagctttatgaggcaaaagaagcattaaataataaaattgataagcttcgggttatgcttaatgagaaacgatatctttcagaacgtatcaaaacccttctaaatgaagttaagggagagttaacgcttaaggatattataagatcggcggcacaacatgaaattcatgacactttcatgaaacaacttgcctcactatattacgatgttggccttaaaaatgttgatttaaatgatttgcttcgtaagcttgaggtttataatgacaaagctagaactgcgtcaataaatgaaagatttaaaacgcatctggagtttgctttaaaggaactaggtgtggttgggtacaatgcgcatggaatagcgtcatatagtaagataactaagggtaaaacgggtagccgtaatcctagaggtatatttgcttttcattatgctttattaaaagtattgtcttgcaatgattccgctgaggtttttcctatcgtaatagactcaccaaagcaacaagatatggatagggttcatacggaaaagttgattgagatttgtgttaataatttagctcccttggggcaggttatcataggtgcagtaaatctagaggctaatatgcatggttatcattcgctttttttggagcggaaatacagtctcttatctgagtcaggttttgatgctgcgtatagaaagataatgcccactttaaataagatgttattgggaatataa

SEQ ID NO: 168762 - DNA, 1083 bp, Enterobacter cloacae
ttgagcctgtcaaatgctttagtatctaccagccaacctgagcgtggcggggaagttgccatcagagggtttgagtaccaagcttcatttggtatttcataccttctcgaaaagcatgcgttgaaaaaagaatatgtattcatatttgaataccatgatgatattttggtgttagattctgaagttgccccttcctcatcagaatttatacaagtgaaaacaaaacaaaatggtatttggactatagcatctgtaattaatgcgacagctaaaaaacccatttcgtttattgcaaagttgtatagacactttttaaattttaaatcatatccaatagagttattgtttgtttctaatgcaggctttgattttattaccactgccagatgtaaagctgagtccctagatgaaataacaaaaaataaaatagtagaaaaggtcacacagcagattgaagggattgagaccgttcgtttagaaaatctggagtttgttacatctgatctcagccttacgggatattcgagccatttgaaaggtaaggtttgtgactttttagatgatgtctacggagtcgaacatggtataaacgtttcctcattgactagtgttctcattaaaatttgcaatgacaaagctagagtgtcttcagacacaatatcaaattttgaagatttaattaaaaagaaaggtatcacatctggatttatcgatgatgtactctctaaaattaattcttctaaggaagaacagccgtgctggcgtcatgtattaactttctttcaacatgattcgaactttcttgagttaatagagcttgaatctatattcaatcgcgtagcagttcggttaggggatgttaactcactttattaccattatttatgtgaaatttgcaagtctctagattttggggttacttttgatataaaagatattaagcaaagtttcaatgacttcattatattagcagacacacccaatcctacaaagtatgacatattaaacaataatgaaaagaaaattattatagcttttgctgttattaaaaaagcattaaggagtgcgtcaagtggaaaataa

SEQ ID NO: 168763 - DNA, 570 bp, Enterobacter cloacae
atggtcggtatcgccgccgcgctggtggcggtaattctgggtacgctctacggctcactttccggctaccttggcggcaaagtggactcagtgatgatgcgtttgctggaaatcctgaactccttcccgtttatgttcttcgtcattctgctggtgaccttcttcggccagaacattctgttgattttcgtggccatcgggatggtttcctggctggatatggcgcgtatcgtacgcggccagacgctgagcctgaaacgtaaagaatttatcgaagccgcgcaggttggtggcgtatctacccgaaatatcgtggttcgccatattgttcctaacgtgctgggggtggttgtggtctatgcctcactgctggtgccaagcatgatcctgtttgaatccttcctcagcttcctggggctgggtacgcaggaaccactgagcagctggggcgcactgttgagcgatggtgcaagctcgatggaagtatcaccgtggctgttgctctacccggggggggttcctggtggtcacactgttttgtttcaactttatcggcgatggcctgcgtga

SEQ ID NO: 168764 - DNA, 315 bp, Enterobacter cloacae
atgatgttgagtaagaaaaacagcgaggcgctggaaaacttcagtgaaaaactggaagtggaaggtcgtagtctctggcaggatgcacgccgtcgctttatgcacaaccgtgccgccgtcgccagtctggtggttctggtgatcatcgcgctgtttgtgaccctggcaccgatgctgtcgcaatttacctatttcgatacggactggggcatgatgtccagcgcgccggatatggaatccggtcactatttcgggaccgactcatccggccgtgatctgctggtgcgcgtcgcgattgggggcgtatctcgttga

SEQ ID NO: 168765 - DNA, 1059 bp, Enterobacter cloacae
atgaaccagacgtacacgccaaaattccaggaagaatacagcgccaaaattccggcactgacgttactgaccagcctcggctggacgtttttatctccgaaacagattatggattaccggggctataaacaggatgaggtggtgctgcgtccggttctgcgtgaagagctgtcgaagcgttcctttatggcgggtggcaaaacctgccagttatcggaaaaagcactggataacctgatatcacaggtctgttctccggcgctgaatgaagggctgctcaaagccaatgaacggatgtataaccatctgctctacggtatcaccgtcacggagtttgtcgatggcaagaaggtcaaccccaccattgcgctgatcgactgggaacatccggaaaataaccagttccattttaccgaagaatttacggtattgcggtcaggcggtgtcgaaacccgcaggccggatattgtgtgttttgtgaatggtatcccgctggccgtcattgaagcgaaaagcccggcgggtcacggcaagaaagggccaaccattgacgaagggatatcccagagtatccgcaatcagctcaacgacgaaatcccgcagctgtttgcttacagccagatattactgtcgattaacgggcatgacgggcgctacggtacctgtcatacaccaatgaaattctgggcggcatggcgcgaagaagatattaccgatccgcagatgtatgcgctgcgcaaccatcagttatcgactgaacaaattcatgcgttgtttgatcatcgtccttcagtcgatctcaaatggtatcaacagttaatcgatgggggggaactggcagtcagcgggcaggataagctgctcatcagtctgctttcaccggaacgtctgctggagatgacccgcttcttcaccctgtttgataaaaaaaaccggaaaaattgttgcccgctatcagcaggtgttcgggataaaaagactgctggaacgcatcagtacccgcagaccggacgggggcagggaaggtggggtgatctggcataccacggggtcaggtaa

SEQ ID NO: 168766 - DNA, 423 bp, Enterobacter cloacae
atgcccattatcgatatccgcttcagccataaatcactgtctcagctacctcatccacctgccgggtgtcaggaataccgcgatactttgtgtccccatctcagggcactcgtatatccaaaacggatcacactcgccctacgctgtacaattaaaaacaaacgcatctacgaaaccctcggtactttccctcttctcagtgtggatgctgcccgtcaatacgttcaacaactgctgactgataagcaccggcttcaaatgcaatcccattcgcatactattgagcatgctgttaatagcctgtggcttcctgatatgcgcttgtataaaaaagcccccagtctgaactttccaaactccatcgctatatcctgcccagttggggtagccgccagctgcacgatattactgctggcgaaatag

SEQ ID NO: 168767 - DNA, 1509 bp, Enterobacter cloacae
atgagtaatattaccgtacgggcatcaaaaatagctttaattacgctatctatatgtgtgattgttttcctgacttcacgatatttctcaccaaatgcagactatgccaacagctcgttggtttggcgcatgattatgcaggaaggataccaggcgctgtttgactggaggccgactccagatagttggtatttcaccgtgtacccactgcatttcctgctgttctatatcttaggcaatgacggaattatgccgcttaccatagcaacggcaatgtatactgtggtattaactttcactacagcccatatagtaaaaaaatgcacagattcagatgtgtactgggccattacagtgatagtcctgacttccatgccagagataatgtaccttgctggttttgttgggcaccctttcgctcacaactccaccaatgcttttggtatgtgcatgcttgcactaatggcttacaacattagaaaaagaagcttactgataacgtgctttgttgggctgacgctaatatttacaaatgcttccgatatgtggatttctcctacatatttcttgcctattatactaagcgaattgcatatggcattgaaaagcagaagtggttatgctcatgttgcaatactaattgtatctttggttttatcagtaacacatgttgtttccatactcatgggtttccctatacagaagttcaatatagttcctgttgagaagatgattgaaaatgtaataattgcaatcaatcttgttggagagactcttaacattctgatagttccaaaccgttatgcgttttatgcttcgtttttcataacagcgtctatagctacgtgggcttttgttgtcacattcaagaagggagggcttcagcgatacattggcattgctacctacatgtcactaatgggcatagtgtcatcattcattatcagcaacgtttccttgccaccagggccgcctagattttttgttaacgtcattcccgcctttgctgtgcttgttttattagcggcgtttctggcagttagatctgcctgggtgtttaagttgactattgctctacttgtaataaccagcattaactcatacaaagggcccgttgactacaagaatagatacgttgtcgagattcttaaccatattgatttcctgaaatcacatgatttacgttacggatatggtgacttctggaagatgtctcagactgtaaaccttctgtctgagggagacataactgttatcccactccacatggagaataacacggttttccatgataaatatgtaagggttcagacatttaaatcgtggtatacggacgagtttcgctcaaagacacctgcaaggcagttcatagctatcaccaaaggccatgagtgtacagatgttggtgagtgcgtaacaaacgcacagaagcaggtcgggaaagctgatgagatactgaattacaatggatacacattccttgtgtataacagaagaataaccttctga

SEQ ID NO: 168768 - DNA, 1968 bp, Enterobacter cloacae
atggctactacacctactcagaattcggttccgagcgaatccccacgcgacttgaaatttaatgccgggaaaatcgatgagtttgtaacctctctggcccttcagtacatcgaccgttttggaaaagctcattacacaattgagggaatgaaacagctcgtactggagcaaatttatagccttggatggaatctgaagggctcattccaggctggcggaacagttcagaatcctggcgatttgctgcaagacacatcaaccggaatctggtatcgatgggatgacctttcgtcgcttccaaaaactgttccagcaggttcaacgccgtcatctgctggtggcactggccccggaaagtggcagcctgtcgatgtagctgatgtgctgaggaaagatttggcaaaaccttctggtgcgggattatctggctatgatgcaactgtttcatatcctgcaaatactgttggtgccgaattaaacaatcgcagaagaaatatggtgtttgctactgcggatgccggaattcccaacgatggttctgatgtttcagcgcaggtttcaacgttcctgaatgccaacaaaggcaagtttattgtctttgacaccggtacctacatgttcgccggggtcgtgctttcaggtacaggctgggaaggcacaaccatttacttcaaaggcaagcacctgctgaagccagacaccaccggcacgaacacgcctggttacggtggatttataggcctagttctcaccaagacggtaaatggccttactctttactaccgaggagatgggaaccgctccttgcagtttgataggcagcatatctttaatgttgctatttacggggctaccaatatcacaattccttatttcaagtgcgatgaaataatgggcgatggatgctatgtaatttcagaagatcaaacaagcgcatcatcacaaaatgcaacaaatattaacttcggaattgttgaaggtaaaaactccgttgttagtggcagaaatctgataagcattgtttcttgcaatagaggttctataaataatttaatctctgaaaatattggtggtgttgtgggaggttcatctcagcctggaggtttggatattgagccaaataatcaaccaggatgcctggtgcgtgattttatagtgcaaagcgctacctcaataggtgctggtggtgtttatttggtaacagactggaatgcaaatccaaagaagattcagaactgccatgttttgaaagcaattgttagaggtggccagaaagtaaggatgtatggggcagaacaatcaacgatggttgccgaatgcactggcacgctagatggatttgctatggaggggtgctctaattgcagcatatctgttcgtgttataggttgcgaggtcggtggtctttttggaacacaatcaccaaactatgattgtaaggttaagttaaatgctaggagaataaccaatgctgggatgattagtggcggatcatatcgatgtgaatttgacgttgattttgataactggataacaggcggaacagctaatttcattggcgtttggtttagagaccttaacggcataggtggtcttgaacagcaaagcaacctatttaaggtaaggataccaaagacaacaaatgtccttagagccatgcagtatacccctggaagcaatccgataaatttctatggagataatattttaagttctgactccatactgactggctggcctacttttgacgtcattttaggtgcggcaggccaatatctagtcaagcaggggaagatcccttacctgactacttcaaatggcgtgccatcgaatggcacatggaagcaaggagatttcgtatactacgcaaacccatccacgaccaataaattctatggcttctaccggataactacaggtagcggtaacgttaacggtactgattggggaacagttgtgttctcctga

SEQ ID NO: 168769 - DNA, 1503 bp, Enterobacter cloacae
gtgaataactctacatcgcatctgctagcggttaagacgccgctttccagactttacctcgctctattttccgctccgctgttactgctttcacctgccgatttcgcacgtgcagcggatgcaatttttgatggcgactcgcgtattaccgacacgctgggttataccggagatgtttacgttggacgtaatcaacgcggaaacctgctgatcgataatggcaaaatcaccgcctataacatcaatatcggtcggctgttcgacgggcaaatttatgaaagcatggtcacggtccgtgggccaaacgcagaacttaacgcagtgaacgatcaatacgtcctgcgcggcgacctcaatcttggcctcggtaccctccgcgtcgaagagggcgcgctcgccagcgcaaaggagatcgttgtcggcaacacccgcggctacgatagccaccttatcgccacgggcgccgggtctcgtgtgaccagtaactttcttagcgtaggcaccgatttgggtgcacgatccacgctgttgattgaagacggcgccgcgctcagtaccgcctatgatgcgcgcattgggaatggtaccgggccggatgaaaccaacacgctgagcccgaaagccaccgtcacggggagcggttcccagtggaatgttggccgtacgctgtcgctttatggcgatctggacgtgctgaacggcggggcagttaccgttggaggcgtgcaggtggcgggcgtatccggggccaggaagactgctgagctggttattgcgggcaaagactcgcgttttaccagcgacagtaatgtgagcgtgggtgattatggcaatggcgtgctgtcggttatagacggtggttcattttccgctggcagcaatacgctgatcgtgggggaatcgggttctggctcgaaccggggcgcgctaatcatcggcagccgaggcaacatggacaccggcacgggtttgactgagccaacacttggcacagccggcggcgcgggtaccctcgattcgaacacggcgatcagcctacggggcgggctattcggcagctatgtctacttcaaccataccaacgaaaattacgtcttcagcaacaaaatgagcggcgaaggtgaggtgatcaatacttccgggcagacaacgctgaacggcgatctttcggcccttcaggcgaacgtgaccgcgcgtggtggcaaagtcattattgccagcaacatcaacacccagccagaagacgatatttttgatgttcagacccttagcgccgagaacggcggtacgctgatcctcaacgcgacggcaggatccgacgttaacaacgggcagggttacagcagcgccgcgtcaatcaaggccggcggcacactggggggggaacggcacgctgggccagaccgagatcctgtccggcgggcatatctctccaggggatggcgacatcggcacgttgacgctgaaacggtatctgaattttgtgggcgagtctttctatga

SEQ ID NO: 168770 - DNA, 390 bp, Enterobacter cloacae
atggctaacgttaaacactacattacagctgatggatatgatccttttgatgcatatctgcgaagtttgaaagatcccatagcaaaagccatgattgccacgcgtgtcgccagaatgtcgacgggtaactatggcgattgcaaaccatgcagagagagtgtgtcagagctcagaattgaccggggacccggctatcgtgtctattttagtgaagtctccgatccggcagatggcgcagtaagtctggtgctattgactggaacgaaaaaaagcaaaatgcagacattgaaagggccgttgggtacctcaacgactacaagcgcagaatataagaggaaatcgcaatggctaaatcagtacttcatgatgacgcaatggtacaactcctga

SEQ ID NO: 168771 - DNA, 525 bp, Enterobacter cloacae
atgaaaaataaatcacaatcgataatcatcattactgccatcttgcttgcgcacgccgcctctgccactgaatttaatattaatgctatcgataaagatttacggtcgggcattgatctttctcgctttaaagaagagacgtccgttacgccagggcgttattttgtcaccgtcgcgatcaacgatattccactggcaaacggctgggaactgacctggaaagaggttgataacaaagccgaagtctgtattcccgcagaactggcagacacctttggcctgcaggacactgttcgtaagaccctaacgcttaaacagggctgcgtggattttactccgcaggcggatattaaattccgcttcgagcaatcaacccaaacgctgcacgtcaccgtacctcaggccatgatgcaatttcgtccgaacgactggatgcccccccccctccacctgggacaacggcgtggccggcgtgctgctggactacaacctctttgccagccattatcagccgcaggaaggtag

SEQ ID NO: 168772 - DNA, 390 bp, Enterobacter cloacae
atgctggcagcctgcgcagggattgtctttgccgcgcaaattggttttgtccccaaccagaccggcagcgggctggagatgaaggccatcgccgcctgcgtgctcggggggatctctctgctgggcggcaccggcacgctgatcggtgccctgcttggggctttcttcctcacccaaatcgacaccgtactggtgctgttcaggcttccagcctggtggaatgactttatcgccgggctggtgctgctgggcgtactggtgctcgacgggcggctgcgtcaggcgctggcgcgccatcagcgggcgctgaaatacggccgcttccagccaggtcacagagggggaaagcacgtcactccctttccccaacgcaaaaaagaggtggcgtaa

SEQ ID NO: 168773 - DNA, 210 bp, Enterobacter cloacae
atgccgaggggggaatgcgttgaggagctggagatccataaagaattactcggcgtcacgctcgatgaactggcgcaactgcccaccatcgttggcgtggccggcggggaagagaaagccgatgcgatttatgccgcactgaagggtcgccgtatcaatggcctggtgacggaggagacgacagcccgcgcggtgctggccctgacgtaa

SEQ ID NO: 168774 - DNA, 1581 bp, Enterobacter cloacae
atgagttaccttttagcgttagatgcagggatcggcagcgttcgcgccgtgattttcgatttacagggcaaccagattgccgtcggtcaggccgagtggaagcacctgagcgtggagaacgtaccgggatcgatggagttcgatctcgacaccaactggcggctgacttgccagtgcattcatcaggcgctggaacgcgcgcacctgggcgcggcggatattcagtccgtctcctgctgctcgatgcgcgaagggattgtgctgtacgaccgcaacggcgaggccatctgggcctgtgccaacgttgacgcccgcgccagccgcgaggtggccgagctcaaagagatccacgacaaccgctttgaatccgaagtatatgacgtctccgggcaaactctcgccctgagcgccatgccgcgccttctgtggctggcacaccatcgccccgacatttaccgcaaggccgcgaccatcaccatgatcagcgactggctggcggcgaagctttccggcgagctggcggtggatccctccaatgcgggcaccacgggcatgctggatctcttttcccgcgactggcgtccggcgctgctcgacatggccgggctgcgcgccgatattctctccccggtgaaagagaccggcagcgtactgggagccattacccatgaagccgcgcagcacagcggcctgcgcgaaggcacgccggtggtaatgggcggtggcgatgtacagctgggctgcctggggctgggagtggtccgcgccggacaaacggcggtgctgggcggcaccttctggcagcaggtggtgaacctgccgcaggtgcgcaccgatcccgatatgaatatccgcgtgaacccgcacgtcatccccggcatggcccaggcggagtcgatcagcttcttcaccgggctgaccatgcgctggttccgcgacgccttttgcgcagaagaaaagctgattgccgggcggatgggagtggacacctataccctgctggaagagatggcgagccgcgtgccggcaggctcccacggggtgatgccgatcttctccgacgcgatgcatttcaagcagtggtaccacgccgcgccgtcgtttattaacctctctatcgacccggaaaagtgcaacaaagcgacgctgttccgtgccctggaagagaatgcggcaatcgtttcggcctgcaacctggcgcagatttcgcgcttctccggcgtgacgtttcaaagtttagtttttgcgggcggaggagcaaaaggcgccctgtggagtcagatcttaagcgacgtcaccggactgccggtacgcgtgccggaagtgaaagaggcgacagcgctcggctgcgcgattgcggcaggcgcaggcgcgggattatttgcagatatggcctcaacgggcgagcggctggtgaagtggagccgtgagttcacgccaaatccccagcatcgtgagctgtatgacggcatgatgcaaaaatggcaggcggtgtatgccgaccagcttgggctggtggatagcgggctgaccacatcgatgtggcaggccccgggattggtacgggcagcggcgccgtaa

SEQ ID NO: 168775 - DNA, 1086 bp, Enterobacter cloacae
atgcgcaccgaacgcaagcgtaatcgcgcggaactgaccctgagccaggatttaggcggcgaacgcggttatctgtccgttggggcaatcagtgaagactactgggataaccgtcgtaaaacgacctcgtggaatatgagttacaacaacagctggaacggcatcagctacagccttaactacgccatgaatcgtaacactgcgggcgggggtcaatacacaggtgggaaaaacagcgaacgcgatgatgtcctgtccctcaacctgagcattcctctggacaagtggctgggtaaatcctttgccagctacaacgtcagcagcagtcccgcacgagggaccgtcaataccgtcggccttaacggtacggcactggaggataacagccttaactggaacctgacgcaaagccatgcgtcgcaggagcagtctaacagcggctacgggagcgttaactatcgggggacttatggcgaggtgaatggtgcctacagccagagcgccggtcagcgcaatctcagctacggcctccagggcagtattgtcgcccacgccgggggcataaccgccggtcaacccatgggcgaaacgtttgggctggtcaaagtgccgggcgcatcgaacgtagctatccagaatcaaaccggtatcagaacggattatcgcggttatgccctcgtaccaaacctgatgccgtaccgccgcaatgacgtcacgctgaacacgtcaacgctggatgaggatgtcgatctgaaacaaaccagccgtagcgtcgttccgacccggggagcgctggtgcgggcagaataccgcgcgcaggtagggcagcgcgtgatgatgacgcttatccgcgctgacggcaaaccggtgccctttggcgcaaccgttgtgaacgacgccgacccggatgccggcagcagtattgtcggcgatggtggacaggtgtacctcgccggcctgtcttctgaaggcacgctgaaggtgcagtggggaaatgacgcgcagcgtcaatgtcgggtgacctatcgcctgagtaaaccgaaaacgggcgaaagcatcccggtcatccagggacagtgtcgctga

SEQ ID NO: 168776 - DNA, 192 bp, Enterobacter cloacae
atgcacgcggaaatcttccggcacggtaccgttggcgcggagccagacctgacgtttcggctcggcggtgtgacccttcatcgggttatggaactcgacggggcggatctccagcggtttatcgcacagaaatttctctttgacctgtggcggaagcagatgcgccagcgcacgggcgatatcggtctctga

SEQ ID NO: 168777 - DNA, 552 bp, Enterobacter cloacae
atggtgttccgacgttctcttttatgccttgcgatcggcacggcattccccttacatgtttgtgcagacagtcacgcagctaatgacaccgcgcaggaaaacgaagatgcggtcgaatttaacgaacagtttcttctctcaagaagcacaaatattgacgtaagccgctttgcgcatggtaacccggtggcgccgggtacgtaccgtaccagggtcaatttaaacggcacgttaaaatcgacggttgacattatctttaaagataacgggacgccgcgcgcgacaccctgtattacgaggcttttgctctcgcagtccggtgtggatacccgcgcactcggagacgagctggacgacgacgacaacgagacctgcatcgatgtaaaaaaattctatcctgaagcgtcggtcaactacgacagtgctaagcaggtgttgaacctcaacttcccgcaaatttacgtggttaagcgcccgttaggctatgtcgacccgtccctttgggataacggcattccggcggcacttctgtcttacgatctcaacggctga

SEQ ID NO: 168778 - DNA, 396 bp, Enterobacter cloacae
atggatgatgggggcgaacaacacctgctctgggcgcgcgaaccggtgagcggctggtgttatgcccggctctatgcgggtctttcaccgcagttgctcactacctggacgcgcgcgctgctggaggcctgccctgctgatatacaatttcttgagactttcggttttgaaccgacgctgcctgcacaagacgttgttgttaacgctcatccacacaagcacaatgcgctgcaggtggcgctaccgctccgggatattattccgcgagtgaatgatgaaccggctggagaggttgttatcacgctatgcgagttttataaccggggtaaaacgcagaaaaagctgggagaaagtacgccgcaggcgtttctggaagcgctgcggcgtaaggactag

SEQ ID NO: 168779 - DNA, 1455 bp, Enterobacter cloacae
atgaataatttcaaagaaacatcactatggaaaatggccttcgaaagtgagcaagctaaagcccaccaatcatctgtcgaagctcttatttcttcattcactagagccagagataatgcacgggctctcgtatcagaaatatcgatagaccttccgaactacacagttcatgatatagagcatttggatgccctttgggaaataggcagccagattgtaggtcctgatttttgcattaatccagtggaaggttttgtattagggtgtagttttctttttcatgactctgcaatgaccatggcagcgtacccggggggagtggaagaaataaaagattctcgcgagtggaaacggatatataacagaattaaagctttaagcaatgaatatattgatgacagttatattattgaaatatttcttcgagaacaacatgctattcgtgcagaaaaactacccaaagtatcatggaaagcagattcaggttttcggtacttaattgatgatggagaatccagagagaagtttggcgattttattgggcaagtagcagcatctcattggtgggatcatgcaaagcttgaaaatcatatgcaggataaaatcattcctgccccctctccttttccaagtagttggtccattgatctattaaaactagcatgcgtacttcgtgttgcagatgcagcacaaattgacgaacgtagagctcctagttttttacgagctctcagaaaaaatagactttccgactattccaatcagcactggacttttcaaaacaagctaactcaagcacaaaatcgaaatgacactctgtattttgctgcattacgtccatttcctaaaagtgaagccaaggagtggtggatgttacacgataccctcaaaatgattgatagtgagctaagaaaaactgacgatttgttggcaagacgtagggggaacgactgtcggttttcagctcgccgggtttcaaatattgagtctgcagcaaatttaaaaacttgtatccaaaccgaaggttggcatcctattgatactgaattttcaatttcagatattccacagcttattgcaaacttaggtggcgaccaactttatggccacgacaatatggcagcattgagagaaatcatacaaaatgccatggactctgtgcgtctcagacaaattgtagatccgcaagcatcttcgccattggttgaggttgaattaattaacgaaaatgattcgtgtatactaaaggttagagataatggtgttggtatgtctgaattttccatcgttgaaaatttactttcttttggaaaaagtggatggctgaacgatacagccattggagaatataacgataacttccctcataaaaataacgtttcaggtcgctacggaataggttttttctattttcatgcttggaaaaaagatagaaatcaaatctcgccgatttga

SEQ ID NO: 168780 - DNA, 1233 bp, Enterobacter cloacae
atgcttggaaaaaagatagaaatcaaatctcgccgatttgattccagccctgaccaaacaactctattatcctttcctgaaggtctcaatactcgcccccttctgtgtggagctgaatatactgacaggatgacggctggtggaacggaaatatctgtccatcttgatatagaaaaactagagaaaggtttttggcactcggaaacaaaatatgaattttggtccgtatctgaaaatggtataaaggtcctaagtgaagctatatcaaagagtttcccaacatcgaacgttccggtaaaagtaaaaaatggtgacatttgcgagataatagatggtcgaaattgggaaactgagccagtatctgattttctaaaaagggttgagggtgatttgtatcttagtgaaagtggggtaccattcgaatctgcggtatcactaatcaaagaagattcaggcgaaattgttggtcgagcaacactatatcccgacagactttccaatcggtaccacccagacaaaagcatttcaggaacagttgcatcccagggtgctaaaatatgcacaggctcatttcgaggagttttattaggaacgccagtacgggcagcaagagattttgcatctctgctagcatcgtcagatgcgatacaaaaatgggcaacagaacaagcctctttattgcagaaaattacatctaaagatgaagagcaggaaagtattgctgaacaaatttcctcactcgggggtaatattggagatttaaagttttgtgaaattggcgggatatattatagtaaaaatgagcttcttgattttttgaaacaaaaagatgaggtatgggttgtttttaatgccgcagcttcattaggacggccaacagataaaccatcctgcacaacagattattgtatctcagttggttatggtgttcgtgtatttataaacgtcccaattttggctcgatcatttcctgagttcaaaaaccaaaaagcattgaatgaaattgcacttgaaatcatcagtgaagaatttaacattccggataatgttatgaaaaaaatcactaaaattgaagatggccactcggtttatgtagcatcagctcccacatggcaaggtgatgacggaatcataggttacgttgacgggcaatacttcaaacgtaacatgagtcttgctgacgttgatccatttttcattccggaagttcaacgaaataatgaattaaattaa

SEQ ID NO: 168781 - DNA, 756 bp, Enterobacter cloacae
atggaataccagactgcgatacgcggtacattttttgacattgcccaggtctgcgacagcgcagacaccattgccgaacacgcgcgctaccttgaggacgggctgctgtttattcagaatggtcacattctggcgcacatgccctggcaggagggcgagcagtatattgacccccacaagggctacaccgacctgcgcggtaagctgctgctgcccggttttatcgatacccatgtgcattatccgcaaacggagatgatcggcgcctttggcgagcagctgctggagtggctgaccacctataccttcccggtggagagccagtttgccgatgaagcctacgcgaaagagatcgccgaatttttcattaaccagctggtgagcaatggcaccaccaccgcgctggtgttctgcacgctgcatccggaatcggtcgaggcgctgtttactgaggcgctgcgcctcaacatgcgccttatcgccgggaaggtgatgatggacagacacgcgccggactacctgagcgaggacgcgaaacagagctaccggcagacgcgcgagctgatccagcgctggcatcaccggggggcggctgggctatgccattacgccacgctttgccccgacgtcatcccccgagttgctcgccgcggtcagcctgctgagagaggagtttccggatacctggctgcaaacccatctgagcgaaaacccaaacgaagtggcctgggtgaacgacctctggccggagcatga

SEQ ID NO: 168782 - DNA, 1497 bp, Enterobacter cloacae
atgccaaacagtcaaaacgcgcagcagggtacggccgctgattccggtgcggtttacagcccacgtctttgcaatgaggatctggcacccacgcgtgaccagaactggagctggtacaacatcttttcattctggatgtcggacgttcacagcatggggggatatgtggtcgccgcgagcttctttacgctcgggctggcaagctggcaggtgttactctgcctgctggtggggatttgtattgtgcaactgtgcgccaacctggtcgcaaaaccgagccagatggcgggcgtgccctatgccgtgatcagccgtcaggcgttcggcgtctttggggcgaacattccggcggtgatccgcgggcttatcgcctttgcgtggtatggcatccagacctacctggccgccaacgccctgatgctggtggcactgaagttctggccgtcgctctcttcactcaccaccggcgcgttcctcggcctgtcacatctgggctggatctgcttcgccatcatgtgggtattgcaggcgatggttttctggcacgggatgagcgccatcaagcgcttcattgatatcgccggtccggcggtctacgtagtgatgctggcccttgcgggctggattgtatacaagaccggttttgacgggatctcctttaccctcgccagcaaatccctgaccacgggcgagcaaacctggcagatgatcaccgcgaccgcgctggtggtctcctacttctccggcccgctgctcaactttggtgacttctcccgctacgggaaaagcatgggggagatccgccgcggtaaccgctggggtctgccgtttaacttcctgctgttctccatcgtcaccgtggtgattgtctccggtacccagtcgctgtttggccgcatgatcaccgacccgattgaaaccgtcagccgtgtgggtaacgatctggccgtggcgattggcctgctgacgatgatcaccgccaccatcgggattaacattgtggcgaactttgtctcgccagcctttgatttctctaactgctcgccgcagaagatcagcttccgcaccgggggaatgattgctgccgtcggctcgatcctgctcaccccgtggaacctgttcaactcaccggagttaatccactacaccctggacgtgctcggggcgtttatcggcccgctgttcggcatactgattgccgatttctacctgattaaacgcggcaaggtgtcggttgacgacctgttcgatgacacgccaaagggcaaatactggtatcgcaacggctttaacccgaaagccatcggcgcgctgatcccgtccgttgccgtgggcctggtgattagctttatcccggccctgcatgaggtggcgaacttcagctggttcatcggcgtcttcctcggcggcgtgacctaccgctggctggcgcgggaagatcgcgagacagcaggcgcgacgacgttcagctcccgcgtggcaacgcaaaaagagtaa

SEQ ID NO: 168783 - DNA, 390 bp, Enterobacter cloacae
gtgaggaaggcgccggaatatcctgtctgggaaacagccagcgcacccaacaaccgtcgctggctgcaggcaggggcattgattagtttacttgccggcggtgccggagcgctgaccggagaggcaaaccgcagcgctgcggcttttgcagtaatgtggcttgctctggtcttcatcggttttctctggctttgccgactgctttatttccgcttctctttgcaccatgccatagcctggcagcgcaacgtcaggtatgagcagaacctgtggtgggaagaacatcagagcttgattgggctgaaagacatcctgctccttggcccggcaggtgcggaaacgatggactggcagcgggtgcttcgtcgtattcagcggcccccccgttga

SEQ ID NO: 168784 - DNA, 678 bp, Enterobacter cloacae
atggacactctgcagaatctgattgccgcctgtcaggcggacgaaacccagctgcgaaagcaggctcaggcacgcacggaaagctggcaaccctggcttgtcccggtaaatgagacccgtgcaacaggagaagaccccgggtatgacgatgatttccagcgtataagagaggaggtgaataaactctccggtatcgatacgggactgatttgtacgcttgccgaaaaactgctgacgactaccgccaaagatatccgcattgcgacctattactgctgggcgcgattgcaccaggacggtgaaacaggctttgccgaagggcttgagttagtggcgggattgctgcagcgctacggaacgcaacttcatccgcagcgggagcgaagccgtaagcccgcgctggagtggcttgcaggttctcgtctgcttgacagcctgtcactctggccagaagtggtccgcgacgatgcccttcgcacggcaggcgcgctgttgctcatccatgacgctctgcaaacagagccggaaacgtcacgacccgagctgaatgccctgtacagcgcgctggaatcccgcctgatgaaggcgggggcgtggatgccgtggtacctcagaatgccggtaatcagtcccaactcccggcttcgtactcgacggagtctgacgcacccgttatga

SEQ ID NO: 168785 - DNA, 315 bp, Enterobacter cloacae
atgggcgatttaaccctgcgttattacgacgccgaaatgcgctatctgctggaagccggagaagagtttgcccgtgctcatcccgagcaggcggcaatgctcaacctcgataaagcgggcacgcgggacccgtacgtggagcgcctgtttgaaggctttgccttcatgatgggtcggctgcgtgagaaactcgacgatgatctgcccgaactgaccgaagggctggtcagcctgttatggccgcattacctgcgtacgattccgtcgatgtcggtggtggaattcacccctgactggcgtgaaatgaaagagtag

SEQ ID NO: 168786 - DNA, 966 bp, Enterobacter cloacae
atgcgctcgctcccgctcaattacagcgacctcagccagctgtaccaggctgagcaacggctcaccgcgctgggggaggtactgcagcgcctggagcttaagcatcatagccagctggatacgttgcgtaccctgatgcacaacagtgctgtccggctggaaaacagcgagggagcaaccgtctctgccagtagtcctgttgaagaagataacgcccggaacgaagcagtaaaatgggtgtatgtcgcacagtcggagtacccggcgaatgttgacgttcagacggcaatacccggtccgatgaaaaagtggaaatctttcgtcgccggaatggggaccatgctggtgataagcgcacttgcattatggagttggcagtatcttcaccgtcctgacccgctacaggctcagcttgcagcctcattgtcacctttacctgcacctctgtcatctgaacagcttaaaacgttgcgccagcaatcttcgttaccaaaaacggctatcgcgcaaacgcagcagcaacttgccctgctggataaattgcctcctgactggagtatgacttacagccgaaaactcacggaacaggctgagatgttgtggccggagcaggctaagcctctggttcagcagtggcagcagcaacggaatgccgcggcgttaccaacagaacaactgaacggctggcatcagggaatggcgacgctggagaagttgagtcaccgcctgaacggtctggatgagcagaaggggaaatacatgaccgtcagtgagctgaagtcagtggttttttccgctatgcagtcatttaatcaatcgataccgcctgaagaacagctccgacgactgtcgcagtatcctgctggaaatgtacttcctgaaggggagaagactcaacttgagctgcatttaaaacaactggcaacgcgttatgctcaaataaaacaggacgcctctgctcaatga

SEQ ID NO: 168787 - DNA, 2634 bp, Enterobacter cloacae
atgagtgataaaaacctgcgtctgcaggtcgtgttaagtgcggttgataaactcacccgacctttaaaagtggcacaggctggatctaaggaactggcctctgctgtccggcagacccgcgagcagcttaaacggctcaacgatgcgggaggtcagttaaaatccttcgatcagctgtcccggagcctgagccggaccagtaccgaactggaccaggcgcggctgcgtgcgcagatgatgacccgcgaaatgtcagccctcgaatcccccaccaaaaagcagacagcggcgcttgaaacgcaatggcgggccgtgtcgaggctggagcaaaagcaggagcaggaaacgcggcagatggcggcagccagggcggaactgtatcgcctcggcatctctgcgggaggcggtgcccgtgaaacggcacgcattacccgtgaaacggatcgctataacaaacagctggcagagcaggagcggcgcttgcgtgacgttggcgagcgccagcgcaagctgaatgcgatcagggcaaaagccgataagatgcgcgatgtgcgcaatagccttgccgggaacggcgcaggaatggtggctgcaggtgtggcaacgggggcaacgctgatggcacccattcgcgcctactcggaatcagaaaacgccgctaaccagctggcaggctcgatgatggggcctggcggaaaggttgcgccggagtttgagaagctaaacaagctggcaatcaccctgggggaccggctgcccggcaccacggcagactttcaaaacatgatgaccatgttacgccgccagggtatgtctgcgcaggtcatcctgggagggctgggtgagtcggcggcgtatctcggcgtgcagctgcagatggccccgacggatgcggcagagtttgccgcgaaactgcaggacgccacgcagaccaccgaaaaagacatgatgagcctgatggacgtgatccagcggggttattacgcgggggttgatccgggaaatatgctgcagggttttgcaaatatcagcagcgctatggacattatcaagcagaagggcctggatgctgcgaaaacatttagtccacttctcgtcatggccgatcaggcggggatggccggagagtcagcgggtaatgcctatcgtaaaatttttcaggccacgctggatgccaaaaatattaagagcgtaaacgacgggctgaaaggaaaaggtatcaggtttgatttttccgacgggaaaggcggatttggcggcctggaaaagatgtacgcgcagttagaaaagcttgaaaaattaaatgatgaaacaaaacttgcaacgcagaaagccctgtttggtaacgataacgaggtgctaaaagcgctgaataccatgacgtcaaaaggcatcgagggctaccgtgaaaccgtcgccaaactggagaaccaggcgactctgcgcgagcgcgtcgatgcgtctcttaataccctgggcaacaaatgggaggcggcaacggggtcttttactaatgcgatggcaagcattggggaaactgtctcgccagtgcttaaaacgctatctgactggctggggaatctggcttccgggctggatgggttggttaaacggcacccgcggctgactgctgcaatgtttacagtcgctgcagtattcgcggttgctgcgacagctgcgggcgtggtgtcactggcgctggcatctattctgggaccgatggccgtagtgcgggtaagtgcaggcatcctccagcttaaatttgcttctgtgtttggtctggtcacaaaagttattggcgcagcaggccaggctatcctgtggctgggcaggctgatgtttgctaacccaatattggcggttattggcttgatcgctatgggagccatttatatctggcagaactgggaaacactggggccaaaatttaaagcgatgtgggatgctatctcatcgggagtgactggtgcatgggcggttattaagcagaccatcagtcagaaatggactgaaatactgagtgatgttgccgcgctgcccgcgaagtttaaagcggtgggaggcgcaatcattgacggcatcctgagcggtatcaatgagaagtgggagacgctcaagagcaagctggcatcggtgaaaagctatctgccggactggatgaccggtggcgacaaatcaccgggaaccccacaggcaaaaggtgtgggtggattttttgccgggatgtatgacagcggcggatatattccgcgcgggcagtttggcattgctggtgagaatggacccgagatcgttaacgggcccgcatacataacgagcaggagacgaacagcagccattgccgctgccacctggctgactctgggagggctggcaccggagacagaggctaaaccactccacccatacagcctgcctgtctccgcatataagagtcagcaacaaaagcccgctatagtcacgcaagccctgcctgcgtcgatagggacagttgaaatccatattcaccagcaaccagggcaaagcccgtcagatgtggcagatgaagtgatgagacgtattgaagcaaaacagcgaaaactggcagcccgttcccgcagtaacttcagcgaccaggggggatacgatttatag

SEQ ID NO: 168788 - DNA, 135 bp, Enterobacter cloacae
atggttgatgatttggtggcggatatcgccaccatttttcactggtcgccgtccgttactgacgttatgccgttgaccgaggtgctggaatggcgacacaaagctatcctgagaaacggagtcagtgatgagtga

SEQ ID NO: 168789 - DNA, 312 bp, Enterobacter cloacae
atgagtgaacttcttactgaaaaaacggaatccattgtcattctggatacacctgtgcagcgtggcgcaacttcgatccgggaagtcgtgctgcgtaaacctcagtctggtgcgctgcggggactccgactgcaggccgtaatggaaatggatgtggcctcgatgatgacgattatcccccgtatttccagcccggaactgactccgcaggaaatggcagagctggacccggcagacctggcttccatgtcgctggaggtggttctttttttgctaccgaagtcggcaacatcagctttccaaccggcctga

SEQ ID NO: 168790 - DNA, 1119 bp, Enterobacter cloacae
atggacggcggcggctaccacctcaagggggaatcgacggacggtaagaccaccaccatgaaagcggcaacctctgtctgtggcgggcctgattactggcagacgtggcgggcaaccggcaacgcgctggagggatgcgccagccgccgcaacgatgccgccatgatgcttgatgagatccgggaggtggacggacgcgaggcaggcaatatcgcctacatgctggcaaatggtcagggcaagggccgtgccggtacggacggtgagctgcgcacccgtaagcagtggcggctgctgttcttttcaaccggcgagctgtcactgactgaacatgcggcaaaagccggtgagcgtacctttgccgggatggaagtcaggatgatccagatccccagcgattccgggaaatttggcgtatttgaggagctgcacggcttcgacagcggcaaggctctggcggaacatctggagtgggccacgtccagctactacggttcgccgttcagggagtggctgaaagccctgaccgctgaccttaacgggctgacggcacaggcaaagtcactgatgaaggaatatacagccgccctgaccccgaaagatgcgggtaatcaggtaggccgggctgtgaaccgctttgcactggtggcgatggcgggcgagctggcaacccggctgggtatcaccggctggcctgagggtgaagcgctgcgggcaacccgcgtctgcctgaacgcatggctgaaagatcgcgggcacaccgccaatcaggaagatattgccgcactggagcaggtacgcagcttctttaccgcgaatcagtacagccgctttgctgactggcacgacgaacgtaaccgccccggcaatatggtgggctggcgcagggtggagaaaggcagtaccgcgcagggcacggaggccgtcaccacgttctacgtcatgccgtccggctggaaagaaatctgccggggatttgacccgcgcaaggtggcgcgtctgtgcgcggatcgtggatacctgctgccctccaccgatggcaagctgcagacaaccattcgcccgccagagatgaatccccgcaggctctatgtcttcaacagcgaggtgccgggttaa

SEQ ID NO: 168791 - DNA, 339 bp, Enterobacter cloacae
atgggcggcgggtacggaccgtatttgatgatggtgtgcctgttcattatgtgcgccacgatcgggttgtttatctccaataccgccacggcggtgctgatggcacccattgcgctggcgatggcgaaatccatgggcgtgtcaccctacccgtttgcgatgatggtggcgatggcggcttcagcggcatttatgacgccggtttcatccccggtcaatacgctggtgctggggccaggaaattataaattcagtgattttgtaaagattggcgtgccattcaccgtgctggtgatggtggtgtgcgtggtgttaattccggttttattcccgttttag

SEQ ID NO: 168792 - DNA, 813 bp, Enterobacter cloacae
atggatgatgataatttcgatattattgagcttagaaatgaaatagatagtttaaatccttctaataaaaaaagattagcagaacagtttgctcttgcagcattagggagcataccttggattggaggttttttaggtgctattgcaaattttaaaagcgaagaaggcaatataaaattaaactcattacaaacaaagtggcttgaagaacatcataaaaaactagaaaatttaaattcaactttaaatattatagcaaagagatttgaacaactaggcgaggatatcaatgaaagacttgagtctgaggagtatcttgatttagtccgcaaaagttttcgtgtatggaatgatgctgatacacaagaaaaaagacagctagtctctaatatgataactaatgctgtcagttctaaaatatgttctgatgatattattcgtttatttatagattggcttaacatttatcacgaagtgcattttcaagtcatcagaattatttatcaaaatccaggcgtaacccgttatgaaatatggatggaattgcatgaaataattccgcgcgaagattcggctgaagctgatctctacaaaatgttaattagagatctgtcaacaggtggagtgattaggcaagcacgtaataccacagaagatggtcagttcttaaaacaaagacatgccccgcaagccaagcgaggcacatcaacgcttgagtctgctttcgagaacacaaaatcttatgtactgaccgaactaggaaagcaatttgtgcactatacaatgaatgaagtagtgaccaagttgggttga

SEQ ID NO: 168793 - DNA, 174 bp, Enterobacter cloacae
atgcttattgaatatggagttccaaaaactgcaatttcaagtttacttccttttattgaagggcttgagacggaagaaaaaattgtcaaaaaaatcattaatgatcgtttgtatgaatcaaaggcattaatcgaatatgagcgagacttaattaagaaaaatattaaggattaa

SEQ ID NO: 168794 - DNA, 153 bp, Enterobacter cloacae
atggcgaagaatgcagcagcaaccaaacgcaataaccgtaaaattcacgctcgtaagtttctggcaacgccggagggtcaagcctggctcgaacgtaaaaagacagaggaggcggagttgaaaatggtcgcagaggccagaaaatttatctga

SEQ ID NO: 168795 - DNA, 135 bp, Enterobacter cloacae
atgaagaacagcaacattatggcgttagcgctcgcgcttcgcaacgtcgaagccggtcaggcggttaaagtgccagcaatgactggaaatcaacttcgccagttgctggcgtggctggaagcattgaaaatatag

SEQ ID NO: 168796 - DNA, 132 bp, Enterobacter cloacae
atgaacgaagatcgggagcggttcaccgcaccacagcagaaaacagactggtcaggtttatggtggtgtatcgccatcgttgttggaatcacggcggcatcagtcgtcgccttgtttggagataaattttga

SEQ ID NO: 168797 - DNA, 222 bp, Enterobacter cloacae
atgaaaaaatgtacaacaacattaaccttgttggccctgctggcatgtcagccactggcggcacacgcgggccgcatcaccatgcaactaacagcacaggaggagaccgaaagcggcaaaacgctttgccggtatgaaaattccatttacagcttcaactttgtaacgcggagcaagcattgtccgtccgtgaaaaccttcgacacggaggattcagattaa

SEQ ID NO: 168798 - DNA, 318 bp, Enterobacter cloacae
ttgcagattgctgtgaagacacgcatcaagcttatttatcgtccggaaaagctgaaggcgtcaacgccggaggatcaggtaaataaattaacctggtcccgcagcggaaataaaatccaggtctctaatcctacaccctatgtcattaactttaatgacataaacgtcgggggtaaaaaactggaggaggcctcctgggtggcgccgggcgcagtggctgcatttagcttaccgcccggcatttctggcaatcagatccagttcagcgtgattaacgattatggcagcccgggaataagacaccaggccagtttttaa

SEQ ID NO: 168799 - DNA, 261 bp, Enterobacter cloacae
gtgaaccgggatccagggcgacagccggagcgaacgttgctggcatggcgtcgtaccggatgggcggcgctcgttccggcacttctttgcctgcgccgctggctccacgtcggcgaaacgcagtatgcggtgagtgcattacttttgctgatgcttggcctgacgatgttatgcggcatattacgcaggcacgacgttgtttcattgctgattaccggcagcggaatgcttctgttggcaggcacagtgatgcggttatag

SEQ ID NO: 168800 - DNA, 858 bp, Enterobacter cloacae
atgtggatcctggaaaatgaatgctttacggcaacggtgcaggccgcaggcggtgaactggtcagtctctggcacaagccaacgcgaaccgagcgcttatggcaaccgcaagcggatgtctggaatcatacggcgacgcagttatttcccgtcgtggggcgattgatacaagggggactctggctggacggccagttctggccactcccggcacatggttttcttcgggagcaaacgttctactgcgttacgcagaccccggatacgttgatgctggaagcttgttccagcacgcagactcgtaaacagtggccgcgtcactggcggatacggctggtatttgtccttgaggcctgtgggctgacttttcaccagacgatcgttaatgacgacagccgaacattgccttattcgacgggctggcatccgggtttcgctctggctgtttcctcctgcagcggctggtgggtggaatttagcccggcggtaagcggcccgtactttacggtcaatcgcacgctgaaaacagacgggcgacagcggaatgttacccgttttgcgctcacagggacatgcttcgctgcaggggcggtctattttggcgactgccagcacagggtgattcatgttcgggccccagactggactctcgccctgacgcttgagacaggtgaacagccctggctggcgttgtggggcgtgccgggggcagatttactctgtgttgagccgttagctggcaccaccgacgcaccggatgcggatggacatacgcttaataagcgcggcgtgcagcatctgaatgcaggagaaagccagacatttaccgtccggctacgctttgcggtggacgcatga

SEQ ID NO: 168801 - DNA, 1302 bp, Enterobacter cloacae
atgaaacacagtgcatttttggcttctctgattgccttatctgcctcggcgttcgcggcagactgtccggtgcttagacatgctcagccggaagatgtgggctttaatacaacaaaattaaacaacctcgatcgctggatccagcaacaggtggatgccgggtacccgggtatgaatgtgctggtggtgaaagacaatcgtatcgtttttcagaaagcctggggctatgccaaaaaatatgagggttcacatctgtccactcaccctgtcagggctacgacggacacgctgtatgacctggcttccaataccaaaatgtatgcaacaaattttgcgctgcagaagctggtgtatgaaggcaaaatcaacgtgaacgatcctgtcgcgaactacattccggggttttcggacgcgacaaccgataagataaaggggaaaaagtccctgcggattatcgatatcctgcaccatacggcgggcttcccggccgatccgcaatatcacaataagcgcgttgccggggaactgtattcacaggacaagcagaccacgctggaaatgatcaagcgaacgccgttggtttactcaccaggttcaaaacatgtctacagcgatgttgattacatgatcctgggatttatcattgaggccgttaccgggatgccgcttgatacctatgtagaaaaacaaatttacacgcctctcggcctgaagcacacggtgtttaatccgctgttgaaaggttttaaacagcaacaaattgccgcaacggagcttaacggtaacacgcgcgatggcgtcatcagtttcccccatattcgtacaactaccctttggggccaggtgcatgatgaaaaggcgtggtattccatgggtggcgtgtccggacacgcggggttgttctcgaatacacaggatattgccgttctgatgcagactctgcttaacggagggtgttatggcaacgtaacggtatttgacaagcatacggtagatgagtttacccatcattcaaccgctgatgccacctttggcctgggctggcgggttaacggtaattcatccatgacgcccacctttggcgtactgacaggttcaaaaacattcggtcatacgggctggacaggtacgctcacggccatcgatcccgagaagaaaatggcgattgcgatcctgggtaacagaccacactcgcccgttgccgatcccaaaacaaatccaaatgttttcgtcagtgggttattgcccgcggcaacgtacggctggattgttgatcagatctatggcgcacttgaagagtaa

SEQ ID NO: 168802 - DNA, 744 bp, Enterobacter cloacae
atggaagtgggggcttttgggttcggcgggaaggggaattcctttaatgcagattccgttgctgatgtatgggcaaacctcttggataaaggtactcgagtctttcgcaacaacaaatccgttaactcacaaagagcttattcagcttcactatattttgcctctgaagatactcacgcgattattagtgttgcctatgattcaggcgtagttggcgtgttagcaagaaatacctccggaacaagcagcacttcgacgttcaacacactgtacgggacagccaatacgacacgggccagcgatggcaccctgaaagctgcatcgcctgtagtgaaagttttttcggatggcacataccagaccaacaacgaatcagagggctgtacagtaacgcgtctggccataggtgaatatctggttgaagggtgtgaggggctaaactcggacgctgcctggggcggcatcgatggcggttttgacattcccaccgaccgcaacaagcagtcgcttatctggctggattatgaggtaaacgctgacggctcggtgctggtgaagacttatcaccgcacgtatcctgatgcgccagcgttcgccaggaacgagctgcagggtatcaacgatggcgatcccgttgatatcccccatgaccagtttttgtccgtccgtgtcgagatgccacagaacagcatctggaatcagcgtgccgctatttctgaggctcctgattcatccgctggttaa

SEQ ID NO: 168803 - DNA, 1152 bp, Enterobacter cloacae
atgattgggcaattgcaaagtgtaattagcatacttagcggtgttgtcaacgctccagtagggaatggagtagtacggtatacagcaaaaaattatgaaaatggtactgttcattgcgcgccctggtggcgcgcatcgataaagttatcgatcactctgtatctttttatcgctggttcaactattgttttttcaaaatatctctctttttattttttttcccatgaagaatattcttggcttataatccttgcttgctcagctcttcctctttcagttgcgaatactttattggcgtcaattcttaatggacaacaaaaatatagacaatatattgtatcaggtatgatatccgttattgtttcgacgttgttcttaattttaatgactgtttgctactcccttgaaggtgcgctcatttccgtatctttaaatacatcaattgcgggttttgttttgatgatttattgcaaacggaaagattggtttatctataaaaacttcttcgggaaggtatccagagaggaaacaagaggaatattaaattattctttaatggcatttacttctgctttatcttttcctgtagcgctactgatcgcgagaaaaataatgattagtgaaacaggatggcaggatgcagggcaatggcaagctgtttggaagatatcagaagcgtaccttgcagtgatgacaatagcattgagcacctacttcatgcctaagctttcttcaattaatgaaagtttagcaattaagaaagaagttaatcgtctgattctggtaatagtgccttttacagctgtgatggcattatttatatatttatttagagatgttggaatcacactacttttcaccaatgagttttatgaagcacgaaatttattcttctatcagttaattggtgatgttgttaagattgcgagttttgtatatgcatatccaatgctcgctcaaggtagaataaaaacttttattttttcagaagtattctttgcggtgtcgtttattattctcgtcgattacttcgtaacaaaaattggaattcagggggcaaatattgcctatatgattaattattttgtttatttttgttttacttttgttttcacaaattttataaatccgaaaattaaattgatgtcgtga

SEQ ID NO: 168804 - DNA, 138 bp, Enterobacter cloacae
atgcagtttgtgttgattttactggtgatagccggagggatgggtctctccattgaggcgggattactggggccactgggggcgaagtgggcgacttatgggccacgttcagtatttttggggtcggtgccgcactga

SEQ ID NO: 168805 - DNA, 756 bp, Enterobacter cloacae
atgttatctgatcattctctttattgcaattgttatgcatcttctaaagataatatatctattgcgaccactgagaaaggtgtctttggggattttattgtgccaatggaaatggtgttaaacaggcttaaagctgagtactctttagcaaggaaaatgtttttcgaatataagattggtagtgatttttttgatgaggattctgaagcgtgttattctgaattgtataatggcgaggtattatatgaaaacgttgagaggttaaggatagcatttagatcctgctttggtgtcttagataaaatagcagttgctctatgtaagttgtttgatttaaaaccagatagagggcatatatattttcataacttctggcagattcgtgatgagaaaagaaaggataaaataaacaaaataaataataaaggattgctaggtttgtttagtattgcaatggatttaaacgataaaaatggtgagcttgctttttttagaaattggaggaatgatttagagcataaactattagtaattcacgaaaaagacatgttagtggatttatataactcttatggttattttgatgaagtgaaatttattgagaaagaagaatttgagcaacatctattacaactcatagaaattgtaaagtcagcggttatcctttttgtattcacaatacgtatagaggggaaaagaaatattcctgatgatgtatttgctattgcaaataccatcgagagaaaaatattttag

SEQ ID NO: 168806 - DNA, 510 bp, Enterobacter cloacae
atgagcgcagttcttgattttaatcctcatgatgacgcagatattgatagttcgattaaactgaatgaagtaaaaaataattactggaaagcttttaaattttcgcgagaagaaggatgcattcctcctgagttaataataaatctagctaatgctttaaaaagacaatatcgtatatctgaatcaatggattattatgaacaagctatatctattgatgactcaattccccaagcgtgggtcaatagatctgaaacattagaattgcttaatgaattatctaccacatatacatataaaatgattaaggaagtgattcgaggttatgaatgtgcaataaagtcagggaaatgtattccttcatggattgctacttatcaaagaaaaataaggtacagcgaaagtgtattgagtgaatcatttgaagataccgttgaggatataaatacagatgaaaggcttacgcgggaggagtatgtgctttatccctctaccagagattttgtatag

SEQ ID NO: 168807 - DNA, 288 bp, Enterobacter cloacae
atggatattaattatatagtttcaaaaatgaggtatataaatgagcttataaattcaggaacatttgattccgcctataaaaatgtaaaggatatactgagcggcatagatgatataaataccattaaggcaaatagaataattatattgtctaatttggctggaaatcttattgacattggaagctttggtaacataaaaagtatagccgaagaaggtttaagtatatttataaataataaagatgatatgctaacaataatgaaaaaaatcatcatattactataa

SEQ ID NO: 168808 - DNA, 252 bp, Enterobacter cloacae
gtgaacaggtgctggcggggggtaggtgatgatgacacgccaacactcctgattcaggctgaagaagagcgtgtggtcgataaccgcatgcatgaccgttattgtgaattgcgcgccgccgccggtcacccttgtgaagggggaaaaccgctggtcatcaacggcgcttaccatgagatccttttcgaaaaggacgctatgcgctcagtcgcgctcaacgccattgttgaatttttcaacaggcataactga

SEQ ID NO: 168809 - DNA, 384 bp, Enterobacter cloacae
atgacactacattgcgcatttattggatttggtaaaagtacgacccgctatcacctgccgtatgttctcaaccgtaaagacagctggcacgtcgcgcacatcttccgccgccgcgcgaagccggaagagcaactcccgcagtactcccatattcatttcaccagcgatctcgatgaggtgcttaacgacccgcaggttaagctggtggttgtctgcacccacgccgacagccattttgaatatgcgaaacgcgcgctggaagcgggcaaaaacgtgctggtggaaaaaaccgttcaccccaacccttgccgaagcgaaagcgctgttcgcgctggcaaaaagcaaagggctaaccgtgacgccgtaccagaatcgtcgctttga

SEQ ID NO: 168810 - DNA, 195 bp, Enterobacter cloacae
atgagattcagctctctcattccctgtgtactgttgatccaggcgtacatatcggcattactccgtaatgacagccttcgcatcgcactgtttttctgcgcactgatcgttttattgctcttcttaagcaacgtagcgatttggttaatcccccaccctttacctaaggaaggtgcgaacaagttcctgatatga

SEQ ID NO: 168811 - DNA, 201 bp, Enterobacter cloacae
atggggcaccttggcgatctgccggtgctggtggtgaacaatgacggtaaagccaccgatccggtcatggccccgcgcctgaaaaaactggatgaagtaaaaggcaaagcgctgatgatccacgtgggcggcgataacatgtccgatcagcctaaaccgcttggcggcggcggggcacgttatgcctgcggcgtgatctga

SEQ ID NO: 168812 - DNA, 555 bp, Enterobacter cloacae
atgaaaacacgatgcactgacgatacgctttttctttctactcaggcagaaagcatctggcacctgaaggcagcactatttggtaaagtcgctgtcgaattaaatcaaatcgcagcggattgcattgtctttctgacctccggcaaatcgataccactgtcagcattgccctctgcacgcgcaatcatttgtacaaagaacaatccgaactttgaagacttaatcgcccagggggagacaccggttatcgtcgtttcagaagaaactgttttcagtgagggcgatgtaataaccatcagcgagcgggggcggatccatcgcttatttcgtgcaagctctaagaacaacgcattcctggtgactgaagtttgcaacaacctctgtgtaatgtgcccgcagcctcctaaaccggaagcagcaattaaccagggtgatattgagcagcggatcctaaaaactctttccctgattgatgataagcactttccggaagcactctgtattacgggggggggaaccgacaatgttaaaggaaggattgcttcatattattga

SEQ ID NO: 168813 - DNA, 894 bp, Enterobacter cloacae
atgacctgggcatgggacgggttaacggaagtgacaaataatattatgtccgtttcagcctgccgtgtgttacgcggagaagtcacggataaatcctgtcacgaaaatctgtattacaacaatttctcctgggatcagcaggccgtcggttctttcctgaactctggcgaaacacatcagtttgatactgacaatgacgtcttccgtaaattaatgatgtttacccagctgaaaacatcgtggcccgatctcttcgcttatattggcaaagcctaccgcgaaacctataacgagggtaaaggcaaatctctggttgcaaccaatcaacaaaaaattgatttctttgtgatcaatgccagcaaagcagcggggcatgatttacgtgaattctttacacgttggggtttaggctattccgctgatgctgactcacaaattgctgccctgaaattacctcagccgaacaaagtgacaaaaacctttaccagtagcctgaacggctcttccccgattaccattgaagttccggctgaagataacactgtgaatattgcttttgtgaccaacacacctaaggctggccctacctctctggtctgggttgaggatggtgaaacgccactgtatgcgcaggttgtcgatagtcgtaacagaagcttcatcgtgaaactgcgtggccagaacagccatggcggctgcaatattcattccgttaacaccgcggttaactgcaactcaggaacaagcgcatatttaagagtcgcttataaagcagaagataacccgcatctgcctcagggcagctatacgggtgttcttcatctgattgcgcgtgactggcacaacacgggctggacggcaaacgtgaatgtcgatctctccattgtgaagtaa

SEQ ID NO: 168814 - DNA, 375 bp, Enterobacter cloacae
atgcgcatgactaccagaaaaaaagagatcctcagctactttgagccggataacttagaatggataacaggtgaaattggcgcgcctccttttgatgtttccggtgtttcttaccttctgcacggcacaagcagctttgataaaaaccaccagctggaatcgacccgcagaacgcttgaggcaatggtgaaagatgagctactggagaaggtaatcagctacgagagacgccaggacacgacgcagagcggggatggaaaaggtgtgtggtgcaactgctcacgctatggtttgcccggtcaatgtaacgttgtgcgggatgatggtgatgacagacgcccccatatcgagggcgaaagcgtcagaattgattaa

SEQ ID NO: 168815 - DNA, 360 bp, Enterobacter cloacae
atgtcgaagataaaatgtgatccgctcctctggccggagggagaacagttcacctgtgaagtgctcattccgacaaaattcgagccgctacctgtggagatcacttataccgttccgccatttgaggtggttgtagagacatggcagaacagagacccggcgaagggctacacattatttcggcagttcatcgttgactgggatcagcaggataagctgacggatgatgttctgattgcctatctgattaaatggcctggaacagatatggctatctttgacgcttgggctgaacacatgaaagatgtgatagcaaaaaacctatctgcatttcctgccccttcatgcaccctgaactga

SEQ ID NO: 168816 - DNA, 594 bp, Enterobacter cloacae
atgcaaaacaatgaagtaatgacaaatatcaaactgagcggatcgctggctaagatgttcggtcgtgttcatcagcgcctgataagcacaccccgagaggtatttctggctctgtcgattacggttccgggattcgaaaaatacatgaataccagtaaggcgcgcggcttaacgtatgccatcgtggtgggtaagagaaatatctcagagagtgatttggattttcctaatacggggcaggaaatcaggattgtgccggtcatcataggcagtaagcgagccggcgtgctgcagaccatcttaggtgcagcattagttgttgcatccatctggatgcctggagttggcattgctgccagtaacatgatgtttgcagcaggggcagcaatgacaatgggtggggttgcacaaatgctttcgccgcaaccgggagggctatcgagtaagcaggatgctgataataaggcctcctatgcgtttggcggtgtaacgaataccacggcgcagagctacccggttccgttgctctatggtaagcgtcgaatcggtggcgcaatcatttcagcgggtatctatgtcgaagataaaatgtga

SEQ ID NO: 168817 - DNA, 468 bp, Enterobacter cloacae
atgtctgtattcataacggttttttcaggtgttttggtttttgttattggacaaatagttgtaaagttaataattgaaccgataaatgattttaaaaaagaaaggtctaagataatctacgatctagtattttatgccaataagctagctaacccgaaaggccctgatgatcaggagatggtggaggtatgcaaaattatgaggcagcattcatcaatgctacattcagcgacccacttgattccttgttatcaatatttcgcttttatctttggtctacctacaatcaaaaacattaatgaagcaactagcaaattaatttatttatcaaacggctacactggcgtccttaagaatcaagcaattttaaacgcctatgcaatgcaagaagttaaaattgcgttaggtgtacctattccgcagggtgagatgctcgacccagaccttaaaaaagagttcataaagtaa

SEQ ID NO: 168818 - DNA, 678 bp, Enterobacter cloacae
gtgcttctggctgccaggcagattgaagctgaatgtggtgtgccggttcgcatggtggtgatcgatacgctggcccgttgttttggcggtaacgacgagaacgatgctcgtgatatgggggcatttattgaagggtgtgacgttatcaaacagaaaacgggtgcaacggtgctggtagttcaccactccggcaaagatgaagggaaaggcgctcgcggttccagtgctttccgcgctgcgcttgatactgaatttaacgttaagcgtgaaggggatggaaaggcgcttattctgacctgtaccaagatgaaagacgcagaggaaccggaacgtaaagcgtatgacctgagaacggcagagctttataccgatgatgatggtgaactggtttgctctctggtcgtcagggatgaaccacgagaggccaaagagatagatcctgatctgattggtgtttcaaagctctcagataatcacatggctctgtggcaggctattcgaagccgaacggcgcaaggcgagtcctgcacccgggcaattcttcgtgatgacctgaaagcaactggtattgataccaagcattttactcgatgggttcagaagctgatcgatgatggactggttatccaaaatggggaaattgtaactatccgatctttacgtgaggcgggtagttaa

SEQ ID NO: 168819 - DNA, 219 bp, Enterobacter cloacae
atgaaccaatttaaacaaccttcagcagaaagaatgatccgcgaggctgagtgccgccagttaacaggcatctgccgcactacacgctacatgatggagaaagaggggcgattcccggcacggcgcaagctcggtggccgttctgttgggtggcttctgtctgagatttcagcctggcagatgaatcagccaaaggctgccaacaatcatgcggcgtga

SEQ ID NO: 168820 - DNA, 738 bp, Enterobacter cloacae
atgattgataatagtaatctaccacaaagattatattattctctacctgatgccgctaaggaattaggatgcgaggtaagggatttaattcattatgccgctattcaggcgttgcaactttctatttatattccatttcaccatggtagccctgacgcttggtttcatcttaacatgcccagtagtaaggttgctgatattgatatgttttctatgcttaagggggatggatggagtctcgattttgtagaatataagaaggaatcagatgatttctttattgacggttattacgcaaaagctataagcggctttttctatattgatggctataatttaatttctcttgaattcaatgagtcagctgatgtctccttggctggtgtatcaaccttgccggactatagagacgggcagtgcatcgatattaattttcaagtaaataatttaaagttaaatagagattttttgtgtataagaaaaagtgatttagaagtaataaacaagaatgtttctatgcctgctaagattataaaagaagagtcaaacaaaacagcagcaaagaaatctcaaataattccagctctaattaaatgcatacctgagatgcgagatattgatttggatacaacgccagtatctaaaataatctcgttgattgaagctgttgcggctagggacggagtagaacttccagaattacataggcagacttggcaaaaatatcttggacgatga

SEQ ID NO: 168821 - DNA, 1224 bp, Enterobacter cloacae
atggctggtggtacgaacaaacttagcgataccgcgctacgcaaaatgaacggccgggagagccccggagacagcttttacgctgacggtgacggcctgagtattaaggtctccaaagctggcgtaatgacctggtatttcaccttcaggatcggtggccgcgaaaccgcatcgcagcgcatcaggctgggtaactatcccgatctctccctgaaagcagcgcgcgagaagcgggagcagtgccgcgcatggctggctgagggcaagaaccccaaacaccagctaacggtcagcacacaggaagcgcttaagccggtcacggtaaaagaggccctcgattactggataaaggaatacgccacccataagcgggccaatgtcagcaaacacatcgagcagctgaataaacatatctttccttatataggaagctatccgctatcgatgtgcgaaacccggcactggctggagtgcttcgcccgggtgaggaatgaggcaccagtagccgctggctacctgctgcaaatgtgtaagcaagccctgaagttttgccgtgttcatcggtatgcagtgagcaacgttctggacgacctgacgatcgacgatgtaggcagaaaacagaacaagcgcgaccgggaacacaccaggcaggagcttgccgatatctggcgggaaagcaccgggctgaaatttaagccttactactcagcgctgctgcatctgctggtggtcttcggctgccgaacgcaggagctacgactttccaggcctgctgaatgggatctgcaggaatgggtgtggaccgtaccgaaagagcacagtaaaggcggagagaagatattacggccaatccccgtagctatccgaccgtatgttacggcgctgctgcagcagcacagggatagcggcctgctgctgggcaagatgaagaaaccggaggcggtcagccagtgggggcgcggtatccataaacgtcttggccacgctgagccctggactcttcacgatctgcgccgaaccttctccacgacccttaacaatatggggatcgctccgcacgttgttgagcagctgctggggcatacgctcggcggagtgatggccgtatataaccgtagccagtatctgccggagaagctggacgctctgaacaaatggatggatcgcttaggcgttctgtctgatgaacattcgaatgttgctattttgaaggtggtcaaatga

SEQ ID NO: 168822 - DNA, 180 bp, Enterobacter cloacae
atgcaatataaagatatattgaaacatattactgggattagctgccctttatttggtattcaatggaacccaccagtttactcgtccgatattgccagagaaattgtattatttttagaaaataaacgagtgttgttcagtttgcctcagaatgaagtggtaatgactccaacttattga

SEQ ID NO: 168823 - DNA, 690 bp, Enterobacter cloacae
atgtcactcgcgcaggtaagcaaagtgaatattgtttcttattcccgatatggttttttctctggctcgtggcctcaccgcgtaagtcgactctcgacgatagcgctttttatttcgggcgtttttcccgcgggcgcgggcgaactctattttatggctgatgcgcttgaaaaaatacactcgacttcccagggcatcgatctgggccgcttcgagcgcggagagcagttacccggcacctacagggtagaaatttggcttaatgaaaattatatccgaacggaaaatatctcttttgttcctgtaaacggcatcgggctggcgccggaacttaaccgcagagagcttgagtcgctcggcgtcagggttaaagcatttcctgaattagccatgcttccggtcgagacgattattaccgaccccggcgcattcataccggacgctaccgcccggctggattttgacaggcagaggctggacatctctatcccgcaatcggcgctcaacgcgcgcgcggcaccgttgatccgtcgctctggaaccagggcatttctgcgctgccggtcaattacagcatcaacgggtcgcgcagctggagccgggacggtgagacgcaggatcagctttataccaacctgcaaagcggtattaacgcggggccgtggcgcctgcgcaactacagcaccgtga

SEQ ID NO: 168824 - DNA, 225 bp, Enterobacter cloacae
atggaagctgaggagaaacgttttacctatagctaccagtttggcctgtttaataaagacggcaactggcaggccaccaccatcaacgatcaggaagtgattgatcgcctggaatataccctcaaagagttccacgacaaagcgagcgcactgctggcctctctggagctgaagttcgaacccgcggataacttttccagcgaagcggtgaagctgaccgcgtaa

SEQ ID NO: 168825 - DNA, 417 bp, Enterobacter cloacae
atggcgctttgcagtcttctcctgttagccgggagtgcgtgtctggctcaggctgtcgtgtatttgcaacttcgggagtatgaaaaacagctgagccacacactgacgcagcaatggcaacgttatattccagaaaacaggcatacccgtaatctgcgtacctatttacccaggcagctacagcaacgatcgcctgccccctatttgctcttacaacagcttcaggctcatctgtccgctttcccgggactggcgctggaaggggtgagttataacccggcacgtaatgatttacgtctttttatttctacccgcgatgaccaacagatccaggcgtttttaaatcaaaaactggctggctactcactcaaagtcgataaacatgaacagggattatggacgattcgaaatgattaa

SEQ ID NO: 168826 - DNA, 819 bp, Enterobacter cloacae
atgaggttatacattccattctcttatcttcttttaacaagaattaaaacaaagcatgagagaataagctggtttattatttaccctgcatttctcatcactgcgactttactttttaatggtgatcttttaaatttcatgcttactttttgcatgactatgtcgctgtatgaaattgggtatttagataatgattttagaactattaaaaaggagaaaaatccaacgcttagggctgatgagcggcgatcatggatagaatataacctccaatatctgattggaataaggttattaattgctttgttagttcttttttatataattccatctattgattttattcaaaaatctatatttatatttttactatgtcttcttgctgttggtttctattttcataatacacttcggtctagatggaatgttttaacatatttcatcgtggttctttgtcgatatttaattcctgttgttgcagcggttaaaagtgaattctatggatatttgataccatttatcatcatagctttcccgttagtaaggacaattgaacatgcctgtaaagaaaaatatgaattacgtcgaatcaagcttttagttagcaacccagataattttcgtgtcaaatggtatgcaggtattacttttcttctcttaatctctatcgttttttatgaaaatgagattgtatttagattggttcttttaagtgtatattttctgctgtatcgaatgatgactttttattttgcaagatcaaaaagtgtcttaaggaataaacatagttcttataaatgggatgaaaatgaaaagtaa

SEQ ID NO: 168827 - DNA, 879 bp, Enterobacter cloacae
atgaaaagtaaaactgcagctattgttgttctgtttaatccaacaaaaagtcatgtcttgcaattaataaatgacctaaaagaacaatgtgatttagttattctggttgataatacgcccgagaatcatccaagagttatagataaagatgaaatggccaagaatgtcttgtatgaacatcttggatgtaatatgggaatagcctatgcacagaatcatggttttattaaggcgatagaattcggatgtaaaatattctttacttttgaccaagactcatccattagtaattcatttatattcgatatggtaaatgaatacgaaaaattagccaaggtcagcactaaaattgcggcattaggtcctttaataatcaacgatagaaatagcttgcaatatgatcgagaaataaaacttggtacagaaatagatacgggcgtttattcggttgagagcattatttcctcgggcacattgatacctctaaatgctctaacttatattgggctaaacaaatcagagtggtttattgatttggtcgatattgaatggtgttatcgagctcggtatcttggttggaaaattctttctacaaaaaatgtagcgctacatcataatatcggtatgcaggatattaatgttatggggggacgcagtttcgcgaaatgtagtccttttaggctatattatgtctataggaattggctattggccaccagagaagtttcatttccactgaaatataaattaaaaaaactgtatgttatgccttgtaaattttttatatatgcatttagtgataatggtctatcacgggtaaagtatatgcttcaagggattcgagatggtttaaagggcgtgagtggaccttatcgttaa

SEQ ID NO: 168828 - DNA, 135 bp, Enterobacter cloacae
atggaggtagctaaaattgcttttaaaactttcacccactataagtgtggggtactccaaaatgtgattaaaaaaatttttagcgcaattagtacattacaaaaatatttaaaccagatccataaagaaatttaa

SEQ ID NO: 168829 - DNA, 2520 bp, Enterobacter cloacae
atgagttttattgataccattaaaaatataaccagcactaccctgaaccgttaccttctggatataccttcctgtctgtcatcgctggacgttgaagaattcagtggcagggaggcattaagccagacctattattacactattacgttcaccagcccggataaaaatattgataccgctacggtattgcgtaaacccgccacgctgacaatggggaccggtattttacaggccctggcggataagaaagtggtccacggtgtcattactgattttcactggatatccggctcggccgaccaggcaaaataccgggtaacggtggagcctttccttaaattactggacaggcagcaccgcagccaccgtttcttcgtcaataaatcggtgccggaggtggtggagcaggtgttgcaggaacacggcctgcacggctgggagtacgagtttaacctgaagcagagctacccgaagcgcgagcagataaaccagtaccaggagagcgacctggcctttgttcagcgcctgctggcggaggtggggatattttacttcttcaccttacaggaagatgcgcagacggaagtggtgcactttgccgacgcgcagcgggcgctgatgttcggcaaaaccctgccggtgaacagcccgtccgggatgagcgacagcggcgcggactcggtatgggggctgaacgtggctcacaacgtggtggaagcgaacgtcacgacgaaagattacaaccaccgtgacgcgcagagcgtgctgcagtccgccccggccgatatgacacggggcgacggcgaaggaatgacctatggtgaggtataccattaccgactgcgccaccttgagcgcggcgacaaaattgacccgcaggcggaaaccgccaacttttatgcccgcctcgaccatgagcgttttctggcggagcaggttcgcatcaccggtaaaagcacggatgtgacgcttgccccggcccaggtactgaccctcaccgacagcctgccgccggccctgccagaaatgcttcagaatccgttattgcttaccgcagtcgggttcactgccagccgcagggatgcactccaggtcaccctgctggcggtgccctgcagcgaaacgcagtgctggcgtccgccgctgctgccgcgcccgaaggtgagcggcaccatgacggcgcgggtgaccagcgccaaggccaatgatatctacgcctggcaggatgcttctggtctctatcgggtgatgtttgacgctgaccgggacggtaaatcacagggccaggagagcatgccggtgcgcctcgccaaaccttatggcggtgatgtgtatggcttccacttcccgctaatccagggtacagaggtggcgattgccttccatgaaggcgatccggatcgcccgtatatcgcccatgcgctgcacgactcgcgccatgttgaccctgtgacggagaaaaacagcacgcggaacgtgattaggacagcgggtcttaacaagttgcggatggaagataagcgtggcgaggagcatatcaagctcagcaccgagtatggaggcaaaacgcagctgaacctggggcataacgtgaatgcgtccggggcactgcgtggtgaaggtgcagagctgcggacggatgactgggtaagtatccgcggcgggaaaggggtgtttatcagtgcagatatgcagcctcaggcgcggaaacagatgctggagatggatgacgcaatcgggcagttggagcaggcattaacgctggcacgaagcatggtgaaggcagcaacttcagcaaaagccacactgggggatgtcgggagtcagcgacaattaaatgcctctttaagcgacctcaccgctccgggcatgctgctgcatgcacctgaggggattggcatggtcagcgcccgggcgctgaggatagcttcgggaggtgaaagcgtgggtatcatgtcgggaggcaacaccgatatcagtgccgggcagtcattcaccgttgcagcgggggaagccgtcagccttttggcgaacggccagggcatgcaactgctggcagcaaaaggccaggtaacgattcaggcgcagagtgacgctttgtcggttagcgctcagcaggatcttgaaattcagagctcggaagggacagtgactgtctccgctcatcaggaactggttctggcgtgtggcggggcctatatcagactgagcggtggaaatatcgaactgggctgtccgggaaacatcctgtttaaatgcgcgaatgtacaaaagatgggcgcatccagtcttgatattgcgccgatcgaaatgccggtagggtttggtggcggttttattcttaccgatgaaaacggtgtaccacagccttcaacaccttatcgaatcacaacggcagagggcgatattttacagggaactactgatgaaaaaggcaaaacagcgccggtcaatacgtcagttccgtcatcggtaaaagctgagttcggtaagataaaaactaacggagagccggaatga

SEQ ID NO: 168830 - DNA, 1683 bp, Enterobacter cloacae
atgacacaatatcaggggtatgacgtacaagatgccacccataaaaccagtattcataatgagtggaaaaccgttatcgcaaagaaaaaaccggtacggggcgtgaccttaaccatcggtgtgtttttcgatggtacggggaataatcgtgaaaataccgcatcccgcctgatgaaattcaatgaatgcagcgctcccaaacaggggatgaatcagaaagatgcgcaaagctgcgaggattttagtcatgccatcaacaaggacagtctctcaaatggcagctacagaggatattattcaaatattcactggctaaactctctttacatagcagatcaaaccttattggatgatcaggttcaggcacaaattcagacctacatttcagggataggtaccgcggcggataaatcagactcggccatcggtatggggctgggcaccagtattctggatatgtatgaaggcgtggtaacgaaaactgacgaagcaatggaagggatcgccagcgaattattagcttttatgaagcgaaatgttcaacaggatttctgtattgcaaaaattcagtttgatgtctttggctttagccgtggggcggcggcggcacggcactttgccaaccgggtgatggaacaggatacggctatagccagtgcaattacgaaagggctaaggggagatttttacgacggtaaaccttccggtgaagtccgctttctggggcttttcgataccgtggcggccattggcgggatcagcaactttttcgacattaatggccgcagcaatccgagggtgaagctggaattgcgtccttcggttgcgaagaaagtattccagatcaccgcgatgaatgaataccggtataacttcagtctgaacagcattcagggcatgtggcccgagcttgcgctgccgggagcgcattcagacatcggtggggggtacaatccggtgggatcacctctgcaggaaaatgaaagcctgtttctgagctgtcccgaatttgaaatcgtcagcgacgataccagagaaaccgatacgcgagtctatcgtaatgcggagaaagcgagagaaatgctgatgtctctgcctgccttaaaacatattttgccccacgggaaaatcaccaccaaaacccgctctgttggtgtcataaacagcaatcaaagccgggctggcataatacaaaaacaggtgggagccgccgtgttttttgagcgcatggccgttcccaatgaatgggccaacgtctgcctgcgtgtgatgttggatgcggctcaggaggcggaggtaatgttctatgaaattcaggaagaggatgaaaaatattcattaccgacagagttgaaagccctttgtgataaagcgattgcccagggaaaagcggtacgactgggacaggagccgcaggcttttactgaggacgagcgacttctgattgggaaatatacccactgctccgcaggatggaacatcgagtccaaccgtaatttatgggtggatcctaaaacgggagagatatttattcatcgttttggtcctaaagaagataaggcgtttgtcttcccgaataaacccaatgaccactgggtgcgttccgtatggtatatggacgatcaacagcgactgaatgacaacgcagaaaaaaacgacgacgttatggtcccaaattattaa

SEQ ID NO: 168831 - DNA, 681 bp, Enterobacter cloacae
atgactaaggttaacttcatcttaacttcactgctgcttatgtcggtagccggttgtaccgcagaaaaatctccggctgctgtcccgggcgagaccgagtggggctacaaaaaactgccttacgatgaatggaagtttctctttatttatcccaaagcgctgcccgccctggccactcaggcgctgatggtggacggggccggttacaagacgacctacgagtatattgatacaacgagaccaagtcaggtcagcgtgggccgctggaatgaccatctgggcgtgactcagtcgtattataacaaggggaaggcactgccactgatgctgcgcttctgctgggactcggttatcgataaaaagagttatgaaaccctcatattcttcaggaaaggaacctgggagcagatgactacgctatacaccgacagctatcgcccggatgagacgtattatcgtgacactatggtgattggtctggcccccgggggcaaggtgagtgtctggctggataatttaggcgacccggtggtccctcagtcagatgccaaaattaccaccgtatccggcgacaaaatgcagatgtgtaagggcgtgactgatttccctaatggttatggatacaccaaagggacaaaagcttttatcgaaggtaaaacctacccctacggcaactggtga

SEQ ID NO: 168832 - DNA, 678 bp, Enterobacter cloacae
atgactacggttaaaatcatttctacagcactgctgttgatgtcagtgaccggctgcaccgcggaaaaaactccgtctgctgccccgggcgagaccgaatggggctacaaaaaactgccttacgatgaatggaagtttctctttatttaccccaaagcgctgcccgccctggccactcaggcgctgatggtggacggggccggttacaagacgtcctacgagtatattgatggtactgaatcaagtgatgtcagcgtaggccgctggaatgaccatctgggtgggactcaggcttattacaataaagggaaagcgttacccctgatgctgcgcttctgctgggactcggttatcgataaaaagagttatgaaaccctcatattcttcaggaaaggaacctgggagcagatgaccacaccctatacagacagccgctgggacgaaatctactatcgttcaaccatgattattggtctggctcctgagggtaaggtgagtgtctggctgggagaccgtggtaatccggtggtctctcagtcagatgccaaaattaccaccgtatccggtgacaaaatgcagatgtgtaagggtgtgactaaacaccctgacgggtatgtttactacggtgatacacctgattttataaaaggtaaaacctatccctatggtaactggtga

SEQ ID NO: 168833 - DNA, 1158 bp, Enterobacter cloacae
atgggctgggtacgaacaaaagcattaaccacggagcgtccatcagcaccgacactgacctggtggctgtctgccggtatactgatggcgattatcggtgtactgctgtttatcctgcatgcctccggcaccataaaaacactttcagcgatgaatatctggtgggtatctctcactccgactggatgctggctgttggccttttgtctgcagtgctggctgtgggacagaaacctcaaagagtatcagttcttacagaaagaggcggaacgcgggcagttaatgtgggaagcctgggccggtcgttatctggcggttctgggtagtacggtgctgttgccggatgatgtttcagcggcaaactggggaaaagaacgtccccagcaatatgggcttacccgcagaattacttaccttccgacagaaaaatcagcacagttgaatgcgctgcatgtcctgctcggcggtataaaagacactgtagagcgcctgccagcagagctaatgctgcatgtcactttaataacggataatccctcgcctgaacttaccggcagtttcagtcatctctggaaagaacgtattcctggtcgtgccgtgcctgatggcattaccgttactggttcattttctatgtcggaagtagaagcgcgcctgaagcaacccttgctgacggtcagtttgctcctggttatccagcttaacggcaatgatgcttattccgacgggctggccgcgctactgctgaccagcgacgacgtggcgcaaaaatatcacctgctgcatccagctcgtctgctgcgcccgatgcctttagatatgaataattttgacagggatatcacactgtttctggaaacccagactattgcctgccggacgcattctgttctgggggatgcgaagtcgtggacggagaggacagcagcgctcatcactcagggagcaaaactgaaagctccgtggaaggctgaagatatcgcattaatggaaaaatggtgcggcataccggggccgtttgccccctggctgctgaccgcgctggcagccgatattgtcagtcttcgtaagcagtccctgctgggactgttttccactacacaggaacattttatcagtaccatcatcccagggagtgaagatgaatataccgggtaa

SEQ ID NO: 168834 - DNA, 234 bp, Enterobacter cloacae
atggcatccattacaacgctgatggcggcctgccggctggaggcagacacgctgacaccgcaggtacagtcccgccttgcgctgtgggataactggctgctgcccgtttctgacgacaaccctgtcggcgatgaccccggctatgatgatgattttcagcagatgcgcgaagaggtgggtaagctctccggcatggacgcggagcttatctgccagcttgccgaaaattgctga

SEQ ID NO: 168835 - DNA, 567 bp, Enterobacter cloacae
atggcgcaggtacggcagcatctgccgtacatgaacttttaccgcttctgccagctgcttgagcagagccagccggatgcgccagtacccggcagcgactggcaggtgcgtcaggagccggtgcggttccggccccatcccgggatggggttcccgtccagtgaaatccgggggatggaagatccggaggcggaacattcgcatctcccgccgacggtacgcgtcaattttatggggctgtacggcgtggagtcaccgctgccgacgcactacattgacgatatcgctcagcggcgggaagggtacgaagccgcccgcgattttctggacatcttcaaccaccgtcttattacccagtattaccgtatctggcgcaaatattcgtatccggcgacctggcaggcggggggggggcggacaacacctcgcagtatctcctggggctggcgggcctgggtatccggggatgcgcggctacggcaggtacgccgctgtctcgctttctggcgctgcttcctgcactgctgctgccggggcggacagcggaggggatggcgtcgctggtga

SEQ ID NO: 168836 - DNA, 312 bp, Enterobacter cloacae
atgattatcgataaagaatacgcacttgtagatgcaacagcaagactttacactgacctgagggattatgaaaatgaaataaacagagccgccagcgtaacgtttggtaatgacctcactggcatagtcatttatcagttcagttttatcatcagagtcaggacaaatgacgaaaaaataaaacatggtcttcttgttaactttggtaaaaacatagcaagacaggtttcatcactttgtgaatccgcaatgcgatactacccgaatgaaaaacacaaaccgagtcgtcaattattcagatgccttaaataa

SEQ ID NO: 168837 - DNA, 759 bp, Enterobacter cloacae
atggtgagaaaattgacagaaaatatccctgattggtttaagctaacagagttggcaatctcagaaacaatggaacgtgtatctgagtctttatcttcaaataatttcccattgcaggttaaaaattgtccattgctggctcattggtttgttcttgatagcttatctcttgcaaaccaagctaacagagagggtatgcatgcaaacgcacttgtagcaactcgccaatgtattgaggctattagcgttattgaacttggtatttgtgggcatcctgaggctcatcttgtcttatcagaatgggagcaggataagattacgcccgggaaacttagagcatggttacaggataatgtatggataagttatggttctggattatggaatgaaccttgggctattttcatgcgtgaatttgccaaatcaattcaatcttatgctcattacggaagagatttagcgcagtggcaaatgaagcttcaaagtatgagtggtgataaactatttcttgaaataaaaccacgagcatatgacccccaaaaggctacaagaattactctttatcatgctttgttaacatatatacttggacgacaatggcttgcgagaaatcaggatgataaacaatttggagagctcataagagaatttggagaggctcttggaaaatcctattactttgatgggaacacaactaattggagtcagcaattttgggcgatgctatgggataacaatggaaatactatccttgaatga

SEQ ID NO: 168838 - DNA, 852 bp, Enterobacter cloacae
atgaatctcaaggaggagattgctaagtctgaacccgatactgatgattttagagaaaaaataaataatctatcttggaaatatactgcttcactaaaaaatatcgatatggctaatctttcccaagtaattgttaggcgagctgcaataattgaggtgcttagtttagcttgtggacaaggcttaaatatacaagctcaaattgagggctcaaggcgaaaagatgaaagaattatacatagcatctttttcccaatgagaaaagactcaaatgatgttactgatcatgatatttggctgttaagtgaagaatatcattattatgactatattgcttctgatatgccattgtctaagctcaaatgggatgatggaagtgatattttttctagtgaaattgatgtggaaatgcaggctttgctcaataaacggtctaatgataatggtgctaagagacctgatattgcgatcttcaataaagaaggttctgttattattgttgaattcaaagcccctggtgttaatatggatgagcatgtaggtgatcttatcgagtactctcatcttttagcagctaaatctaatggcagattaaagaagttttacggatatctgatcggtgatcgtgtaaaccctctcagacttaatggttggactaagtttcctttaggtaacgggtggtttcaatccaacccattgcaagatcctactactggcgtgaagttaggagaaacttattttgaaatattgcattttgaagatgttatagagcgtgcaaaaaaaagaattggagtatatcaaaataagcttaatctcaagttggatattgatgaactcaacctcatgttgtag

SEQ ID NO: 168839 - DNA, 132 bp, Enterobacter cloacae; identical to SEQ ID NO: 163210

SEQ ID NO: 168840 - DNA, 1275 bp, Enterobacter cloacae
atggcattagacattcggggcgggttaaaaaatactaaattaagtaaaaatccgtatgttgtttttgaagagctgatttcaaattcaattgactcatacttgattcgtaaatattacgatcagtatgctcccgatatgagaattgacatagaggttgatgtatctaatgctggaatgtttaaagatacggctagcatggaagttatatgtaaagataatggatgtggattaggtgatgagcaattaaaagcatttcttaccatggatacatcatataaagatgatttgtctatacctgggataggaaaatgcaaaggggctgggagaatacagtattttcactatttctcagtgatagatatagcgagtgtttacacaatcaataatgaatgttttaaacgtgagttaagctacgttgattctaaaaaagaaattacagaatcagatgtcataacagctccgtgtgacgatggtatgattggtacaagtatcagattaagccatttgaaagatcaaatctgtacaaaaataactaactctgaatgtctctctgagtcttattctgcgaatgttttaagtaaaagcatgttgctctcttttttgcaaagactaattggtctggaggagcagttaggtgattttgaaatagaatttaagacaataaaagatagcgaaatagttgaagttgcaaggctaaaacgtgacgatttacctggtgtgactagtgtggatactgtttccgttcaagagtatgatgcagaatcaggtacatacttaggtacgtcagaactattcaaagtatctcattacaaattagattcaagaaagtatgggctccccaaaaattcgatagcattatgtgctaaatcatcacctgtaaaagatattacatcaagatatcttcgaagtagaagtgagcagaataatgctgtcaatggatttcatcatatagtgatgattgagagtgagcatttagatcttcatgtcaatgagcaacgagatgactttgataatataccagaggaatttgttcactccaagctttttgctaatgaggatatttcatactcttctatttatgaaaaaatagatcctataattagacagatggttggacctgtaaattggaaaaaagaagatgtaataaaaactataattaacaattttggtattagtgaaaagatgctacaagaaacatcgacacgaattgtgtatggagatactccacaagatgttgctgaacgagttctaaggaaggtgcgaacaagttcctga

SEQ ID NO: 168841 - DNA, 216 bp, Enterobacter cloacae
atggcggaaaatcgtgttgaggccaacgcccataatgcgggcggttgcccggcatccaacaccattcatggccatatcaatgattttctggtgcgtaccgggttgagaagcggtgtaagtgaactgcagttgccatgttttacggcagtgagagcagagatagcgctgatgtccggcagtgcttttgccgttacgcaccaccccgtcagtagctga

SEQ ID NO: 168842 - DNA, 1950 bp, Enterobacter cloacae
atggaaataaataacgacatacaagaaaatgaattatttgatttcacttttaaagaatatcaatgctgctcccgtcttctcagagtttctcctgagaaagggcgtgagatgttaatctccattcttgagtgtaaaaataattacgataatcgtttgaatgagatgttaggggacttgattgattctgcaggcttttatccatatttagaaaaagaaaaaataacacttacttctactcagcaattaataagagaaaaataccatcattccaataacattattggcattagctatcatgaagagcaaaaatattattacgatattattttatctggtaaaaacttgattttgagtgctcaaacgagttttggaaaaagtttacttatagaggaaataatagcttcaaacatttataacaacattctaattattcagccaactctcgctttattggatgaaactcgtcgcaaaataaagaaatataaagatagatatgagttaataatccgaactggtcaggagtattcttttaaaaaaggaaatatttttctgcttactgcagaaagggtaagtgaatatcaaaatttaccaatgatagattttttgattgtagatgagttttataaagtaagttcaactcgagatgatgaaagacatcaatcactgaataatgcattattgaagatttttaatttaaatcctaagcaaagattttattttttaggtccgaatattgatggtgtttctgaaggttttctaaataaatatagttctcttttttccaaaacaacatatagtttggttagatgcaatgtgcataatatttatgagaagcattttgataagtttggtccgcgcggttcaaaagcaagatataaagaaaatgtcctttttgaacttctatgggaaaaaagggatgagcaaactttagtttattgctcgtctcctgcgcgcgcaagaagaatatcaaagaattttacagattatataaatgaaaagcaaggtggttcactttcatatagacaagttcctcttgttgaatggattgagaaaaatatcaatgagaaatggtctttaatagactctttaaaaaatggtattgccttccatgatggttctctccctcggcatatgacatcttcattgattgattactttaatgaaaaattactttcagtaatattttgtacttcgacgataattgaaggcgtaaacagtaatgccaaaaatataatatacttcgattcgacaaaaggtaaaaacccaatagactactttgactattctaatattaaaggccgtgcgggcagattgatggaacattttaccgggaatgtctacaattttgagattcctcctgccgctgaaagtatttatattgatataccatttattgatcaagagatgattacggctgaggttttaattaatataaaagaagaggatgttaaaaatacagaaagtaatgaatatctatttttaaaatctctagataatgaagttcgttatttgttttccatgaatcaaattaatatacatgggcagaaaaatcttttagatttcctaattagaaattatgaaaatattcatgataaactgttttggacgcttacgcaaaaatataaacaactagagttttgtatagagctatgttggaatttcttgttaaataaggatgatgtgccgggtaatctcagcgctgccaggatgacaaaattaacctatgattatgcgtcctcgcaaagtattaatagagttatagaaaatatgtatacatataatctttctttaataaaaagaaaaacaaaggaaagagagcaaaaagcattagatgaagccatacgagatggtttttatttcctaagacaatggtttcaatacaaactccccaaattacttcttgttcttaatgaactgcagtcttatgtcgctaagggctttgttgaataa

SEQ ID NO: 168843 - DNA, 936 bp, Enterobacter cloacae
atgactccttttaattcacagcaagtaatagatgaaagaattaagtctataaatttacgaggctacttagttggttttgaccttgatgatgtaggtaataaccaatataggatttctcctttgatattgaaaatcctatcagcacttcatgagttttgttttgggcgccatgaaggatgttcaacagataacacagagacattgaataaaattatagaatcagctaagttggtttataaaatcgattcattttgtaaaataagggagctttgtcaaacttctgattatgaagatagcgatatacctgacaaatatctcaagcgaggcgagtttggtgagttaattttacatctccttttaagagattttcacgcaacaattccattattatcaaaaatttatttcaaagactcgattggtcatgctgtgcatggttttgattcagttcatatagatccgatcaatcaggaattatggcttggtgaatcaaagctatatactgatccaaaaagtgggttgcgggaattaatcaaagatgtgactgagcactttaataacgactatattaactcagagtttatgctcatttcgaaaaaaattaaaggttttccaagtactcctgaggtggattattgggttgacttactttctgaaggtggaaaaatatctgataagttaaaaaagataaacattcccttactttgtacctatagctgcgagttgtttaatttatataatgatgaaaattcagatgaattttgcaataagtacatggaaaaaattaccgaacttaagaaatacttcgatgataattttcatcatcattggaaagaacatttaaacattattttaattttgtttcctgttcaaaataaaatggaattagttaagaaattacatcataaattaactttgatgcaatccttgggtgaataa

SEQ ID NO: 168844 - DNA, 540 bp, Enterobacter cloacae
atgaacgtcatcccaactaaaatatctggattgctaattttagagcctaaagtctttcaggatgagagaggttttttcatggaaagttttaatcaggcttcttttaatgaagctgtgggtaaagaagtagttttcgttcaagacaatcattcaaaatcctcaaaaggtgttttgcgtggtatgcattatcaacttgaacctgcagcacagggcaaacttgttcgctgtacaagtggcgccgtctttgatgttgctgtcgatattcgaccacagtcagatacatatggtgagtgggaaggcgtgattttgtctgcggaaaataacaaacagttttggatccccgaaggctttgctcacggttttttggtgttaactgactctgctgaatttatgtacaaaacaacagattattataatccgtcattagaatgtggttttgcctggaatgataggaatgttggtattgaatggccaaaggttgaaaatattatcttatcggagaaggataagaaccaacctcttttcgatatagttatctaa

SEQ ID NO: 168845 - DNA, 744 bp, Enterobacter cloacae
gtgattaaacgcgtattccggctgaccctgcgggctgcgcagggttttattgattccatttttgccctgatgaacgttccgttgcgctgcccggattacaccagtgtcagtaagcgggcaaagtcggttaatgtcagtttcaaaacgtccacccggggtgaaatcgcacacctggtgattgattccaccgggctgaaggtctttggtgaaggcgaatggaaagtcagaaagcacggcaaagagcgccgtcgtatctggcgaaagttgcatcttgctgttgacagcaacacacatgaagttgtctgtgcagacctgtcgctgaataacgtcacggactcagaagccttcccgggccttatccggcagactcacagaaaaatcagggcagccgcggcagacggggcttacgatacccggctctgtcacgatgaactgcgccgcaaaaaaatcagcgcgcttattcctccccgaaaaggagcaggttactggcccggtgagtacgcagaccgcaaccgtgccgttgctaatcagcggctgagcggaagcaatgcacggtggaaatggacaacggaatataaccgtcgctcgatagcggaaacggcaatgtacagaatgaagcagttgttgggagattcactgacgctgcgtgactacgatggtcaggtagcggaagctatggccatggtgcgtgcgttgaacaggatgacaaaggctgggatgccagaaagcgtgcgtattgcctga

SEQ ID NO: 168846 - DNA, 264 bp, Enterobacter cloacae
gtgattaaacgcgtattccggctgaccctgcgggctgcgcagggttttattgattccatttttgccctgatgaacgttccgttgcgctgcccggattacaccagtgtcagtaagcgggcaaagtcggttaatgtcagtttcaaaacgtccacccggggtgaaatcgcacacctggtgattgattccaccgggctgaaggtctttggtgaaggcgaatggaaagtcaaaaaagcatggccaggaacgccgccgtatctggcgtaa

SEQ ID NO: 168847 - DNA, 219 bp, Enterobacter cloacae
atgtttggtttttcctccggagccctgatgacttttaatgatgatgagcgacacctgcttgtgtccgttgtttcgggctggctccggcgtgccgaaggggatgccggagccatgatgctggatgcatgccggcagattttgtctgaaaccgaaccggccgcaagggcggtcatgctcgaatttcttgaatcagttcgcattcattacgtttcgtcctga

SEQ ID NO: 168848 - DNA, 210 bp, Enterobacter cloacae
atggaacccatacagtggcagcagcgttttgaatcctggcttgatgaacatcacgccagcgaagacagtgcgcatgatatttcgcacttccgacgcgtctggatgacggcccgcaaaataatgattcatcatcaggccgatccgctggtggtcctgaccgcctgctattttcacgacatcgttggtgatgctgccaacttactgatttag

SEQ ID NO: 168849 - DNA, 249 bp, Enterobacter cloacae
atgtttgccagcacgaaaaataatacgctggtactgaacacaggatcgtcactcaaaggagatgtcatctccaccgcgtcaaaaggcaacacgctttcactggttggtacgggcacagaagacagcaatttcatcggactgaaggaaggggatggctttgcgtcagtaaaaatggatggtgaaaagtggacgctgtcaggcaatttagacattatcggggctttgttgaataaatcgaacttttgctga

SEQ ID NO: 168850 - DNA, 357 bp, Enterobacter cloacae
atgacggtgcaggttaactgggaaacgggcgtcgcgtttgccagcgatgtgcctgaaattcctcctcctgagcggccaaatactaaaggaatggatgagcagacctattacaaggcatggcaggaatacgcagataaacgccgtgagtggcgaactataatcaaaggattgaataaaaaacatactcaaaccgttccggtccccgattacagcggccagaaaacctgcggcattaccgttcacttcctgccctgtgaccaggtgaaggtcaccaccagctgcgccgactacggtagccctgattaccccatcaaagaccccgtgcatatggagaagccgacagtatgtcccaagtga

SEQ ID NO: 168851 - DNA, 690 bp, Enterobacter cloacae
atgattgaaaatgacgtagctactgaaaaattactgatcaaaaaaagaagtgtgaaagatcttgctgattatattagaattatgtcaggcacatcacctaattattcattattccttggcgcaggggcatcagttacttcaggaataaaaactggatatgaattagttcaggaatggcgagaggagatatacaaacgccttaaccctgacgagtattcatctcctaaagaggcaattacatggttaacaaaaaatcatcccgattggtatgatccatcaaatgaatactcctcattatttgagaaaaaattcgatctaccttctcaaagaagaagatttgtagaattacaagttgataaaaaactcccttccattggttatgcttatttagtcgaattattcgaatcaaaatacctcgacacagtgtttactactaattttgacgacttaattaatgaagcgttctatcaattttcatctgatcgaccattattatgcgctcacgattcttctataaaaggaatttcaatcacttcatcaagacctaaaataataaaactccatggtgactatctttttgatagcatcaaaagctctttgagagagaccgagtctttagaaaataacacgcgtgaaaaactagggaaggtgcgaataagcaggtcatttcttcccaagctgactcgctga

SEQ ID NO: 168852 - DNA, 249 bp, Enterobacter cloacae
atgcaatccagagttgcacgcttagaatctgatgtagaatacattaagcgagatattactgagattaaatcagacattaagagcatcgactcaaggctgagtgaaatcgaaaatggagtaaaatccatgaagacaacgtttaaggcttcttctgccattctatcggttgtgtttgctttttgtgtttatgtattcggtaattatgtttctaaaattcttgatgctctgaacggacttgttttgaaatag

SEQ ID NO: 168853 - DNA, 426 bp, Enterobacter cloacae
atggaaaagatttcatttttatatgtatcccagatattccccgggaaaatatcgcgctccttaaattatccccagccatggataaagccagatgatctctcagggaaaatcagtattgacgtttcctttgggcttattattaaaacgaaagttaactatcgtgtcgatgtcgacctgttttttggcgaccagagaattgattttggtagcggtcagtcattgcaatcggaccctattgtggctggcacgacctccggaagtgattcagtgagcattgaaaatatgtccctcatgaacattcttgttaaagaagagggcgtttacaaggtaacgatgtcacttcatgttattgatgataaagataaaagtagattgattcacgattcagagtgttttttctacttatcaaaagaatggaaagtctga

SEQ ID NO: 168854 - DNA, 663 bp, Enterobacter cloacae
atgtatggttgtggagcatatgaacgcggcagggctgttacattagagcaaaaaagagatgttcttttaaaagaaagcccgaaataccctcctggttatttaacaaaagataaggttgatctttacacaataagaaatgaacttgttgctagtggtggcgaaacacaagattttttaaaaaaattagttgataattgttttgattcaagcatgtatttctgcacatttgagcaatattatgatgcttatgataattttaagaaaacaagagagaaaaacgaaaaaagaaagcaacaagtggctgtaagtaaaggtgatcttttttactgtaaagtggattttcatttaccagatagaattattgatagtagtaaaattcgcgttggtgtaaaggacaatgttgatgttgttggttttgttttttcgaatggatatcagattatttcaccagagcttaaggacattgattcagcatctggtgaaagaagtggaatgtctcctggtggctcattagtggtcaatgcaagttatgatggtagtagttatttgataagattgtttgataaccatttggacaccgaaccaagcaaagatgccattcgttatgttctggatttaggatccgctggtggaattgatatatttgattgcaaaaaggcatga

SEQ ID NO: 168855 - DNA, 987 bp, Enterobacter cloacae
atgacaagtatagcaattcttgaggcagttaacacctcttacgtaccgtttaacgggcagaaaatcattaccgccatggtggcaggtgtagcatacgtagcgatgaaaccaatcgttgaaaatctcggcatgagctggtcaactcaggttcgtaaattgacggccgataagggtaaattcaactgtgttcatatgaacatggttgccacggatagcaagttgcgtgatgttttgtgccttccactgaagaaactcaacggatggctgtttagcattaacccagaaaaggttcgcgccgacatccgtgacaacttgatccagtaccaggaagaatgttttaccgttctgcatgactattggacgaagggtgaggctaagaacccgcgaaaagctaaaaaggcgctgcccggtaaaatcacctccgaacagcaggaggcgatcaagcaactggtaatgactcgcggtaaatcgctaccgaaagagtgtcaggctaaagcgatgattaccatgtggtcctcactgagatcccactttggttgcagttacaaagaaatcagcgacgaccagtttaccgaggcgctatctatcgctgctcgcgtaccactggaaggcgagtttcttggaaagcagccggagctgccaatgcctaagcttgacataagtcttcctctccaatggtggattgacaacaacccggtggttcgcagtggcaacctgtcatttggcaagtcaatgtgcgccccttcactggacgtcactgtgactatgctgtgtggtgacaattcaacatcgtcggccattcgcctgatcaacatccttgaggaggccggatttgatgtgtcggcacctaaggctgaaatagtagccatgcgcagccatctggcaaatgttgaatatggtatgaaagctatttctgatgcttgccgtcgggcaggaaataaaactatctccttccgcggcgctaaagcggaattcgtaattaactaa

SEQ ID NO: 168856 - DNA, 702 bp, Enterobacter cloacae
atggcacttcaacttttagctgctaacaatgcccaaagcgttctggcagctggcattagcgcctcagcaacatcgttgacactgaataccgggacgggtgctcttttcccttctccggtatctggcacaagcttcttcaagttaacgttgattgatgctgcaacaggccagataagcgagatcgttcatgtcacagccagaacaggagacactcttacgattgtgagagcccaggaaggcacattggctcgcgcgtggtctgtcaacgacattgcggccaacatgatgaccgccggcacgttgagttacattcttgataactacgcgaccattgctagcctgggaactgctgctgctaaggacgtcggcactggcgcggggaagatcccagatatgtcggccttcacgtctggaacaggctggattagattgcctgatggaacaaccttccagtttggaaacgcagggatgcctcctgggacaaataacgtatatgtgaatttccctagagccttcagtaacgctggttaccgagtttcttgtgtctggaatgatgtgggtgtggcgcaaagcggatctggagcgcaaactcagtccaacatcggtatcagtgcaacatcgaaatctgcaacaaggtttggtctatggcagggcggcccgggtgggtttaacgttgactggattgcaataggagtttcatga

SEQ ID NO: 168857 - DNA, 150 bp, Enterobacter cloacae
atgagtgaagaagagtcaaaagaaacggtgcaacctcaagttaagttctgcccgatctgtggaggtttaatgagccagattgactatctcggctcgaagtggtggctctgtgatgatgaagaatgcggatatatggaaaaggtaagctga

SEQ ID NO: 168858 - DNA, 1065 bp, Enterobacter cloacae
atgcaggaacgttttcacagcatccagtatttgagagggattgcagcgcttatggttgtcttcacgcatctaaaggagaatctgaacggtgcatccggaatttccgatattggatacaaattgttttcacacggaatttttggcgttgaccttttttttatcataagtggctttattattcatcagtccacactgaagagagagcacagcaaacctcttacattcgttataagacgagcattcaggatctatcctgtgtttctgttttgcgttcttgctttcatctctattgcgccagggacaccacaacccgttgatctagcaaaggggttgatgtttattcctcttaactttgacgctccagccccattcttcgggtataacttcctttacccggcatggacactgacgtacgaactattattttactccatctttgttattgcaatatgcttttcgcatgccaaaagagggattttagcctcagcagcaattttattttttgttgtcattctgcaactcatatcaaataagcatgtcgctttagatttttcatctccaacgctgtattcacaaggaatattcaaactgcttgcgtcgccaatgttggtagaatttgtttacggcatcgcaatctcattcatttttacaaacttaaaactaagtagagccttctacattttcatatcggccataacatttactgcgtttatattactgtttaaatttggcatatcaaattatcatggtccattaaattatgggcttgctggtatgttcattgtcatttctgggatttcatttgaacgatcagggttacttcctggatgttcatggctggataagcttggggatgtttcatactcattgtatttatcccatataataaccatatttgcaataaattattatattattactccaatgggcataaacactcatggcagtgtggtttatttcgcattctctgttgctctttctgttttattttcatccttaatatttagatttattgaagtgagatttatcatgatcggtaaatctttatcaaaatacgtttcatga

SEQ ID NO: 168859 - DNA, 252 bp, Enterobacter cloacae; identical to SEQ ID NO: 100793

SEQ ID NO: 168860 - DNA, 225 bp, Enterobacter cloacae
atgcagcacgttcctgcgaatgcttatcagcagtctggcccgtctctctgcaaaaccagcccggctgccgttctgtatccgacgatgacctctgcgcctggtgcaggcatctctgctaccggcctggtgaacttagcctttgtcagcaggctgatgcgaatggtatctggccctcacggtgcgatatcgatggctatgcacaatcctgcccacggcaactcctga

SEQ ID NO: 168861 - DNA, 507 bp, Enterobacter cloacae
atgacctctacaaaaggaacaactgacatgaccgacattatcaaccttaacgataacaacctgttacaccagaaatctgccgatgaagtctccgcactggccgccacgctcgtaccggacgaacagcgtgttggcttctggccactgcacttcggcaacataccacagtggataatccttgaaccgacagccttcgcctggatggaccgcttctgcgccagctacagtggcggcatctggcagttttacacgctgagcaacggcggtgcttttatggccccggaagcgaatgaggatatcgatgaaaaatggacgctgttcaatccgatgaacggcaacggtggtgaactcagcgccgaagccgccggaatagccgtctgtctgatgacttacagccaccacgccatgcgcaccgaatgcgacaccatgacggagcactattaccgtctgcgggactacgcgctcaaccacgcagaatgcagcgccatcatgcatatcatcgactga

SEQ ID NO: 168862 - DNA, 645 bp, Enterobacter cloacae
atgagcagaattatctccaccacagtttatacgctggatgaactatctgaatccgcctgggagaacgcccgtagctggtatcgtgaacatgcgctgaatgatgacgggtatcagaacgtgtttgacgagttccgcgacatctgcaacatcctgggcgtggatattaagctgtaccgagttcctcacctgtcaggcggcaatcgtcagcagccctgcatctggttcagcggtttttgccatcagggaagcggcgctgtttttgagggagattatgcttaccagccgcagacggtatgccggatcagggaacactttcctgaagacactgaccttcaccggatagccgattcactgcaggctatccagttgcacaacagcggcgagctttgcgccacgatccgtcatcacggccagcatatccatgaatcctgcatggcaatcgcggtcgaacgccacaacctgtccgggctggggatgtccgaaggcagtgaagcgactgccaccgaagcccttcgggatctggcccgctggctatgcggttggctggaaagcgattacgaatggcagacttctgatgtcgtaacagaccagtccatcatcgccggtgaatataccttcaccagatccggccagcgcttcggctga

SEQ ID NO: 168863 - DNA, 360 bp, Enterobacter cloacae
atgccagacatcaacaccacccaaaatgacaatatggatgcaccgagctggggcctgcatcgcgatatcacaccgtgttttggcgcacgactggtgcaggaaggcaactgcctgcattacctggctgaccgcgccagcatcaccggtcaattcagcgaggcggatttgcgccatctggatcaggtttttccgctgatgctcaaacagcttgagttgatgttggtatccggtgagctcaacccacgccaccagcactgcgtcacgttgtattacaatggtctcatctgcgaagcggacacactgggcagttgtggttatatctacctcgcgatttatccgggggaaccgccagcagcgtaa

SEQ ID NO: 168864 - DNA, 378 bp, Enterobacter cloacae
atgcaaacccaatctatacaccctgtacgggcgacggcgtcacgcccatctcctgtcgatatctggcaaaccctgttgacgtacctcctggagcaacattacgggctcacacttaacgacaccccgtttggcaacgacagggtgatccaggagcatattgaggctggtatctcactgtgcgatggcgtcaattttatcgtcgaaaagtacgaactggtccgtatcgatcgtcacggtttcagcacagaaacacagtcaccgcttattggcagcatcgatatccttcgtgcacgaaaagcgaccgggctgatgacccgcaacgattacaaagtggtcaccgacatcaccaccggcaaatacagcggggggacacgatga

SEQ ID NO: 168865 - DNA, 492 bp, Enterobacter cloacae
atgaaactctccctcacagtggaagctgatactgtcagcgtcctggccctcaacatgggccggatctccgtggatatcgatggtattgaactggccgatctgatcgatgtggtctgtgataatggctattcgcttcgcattgcagacgagcccggaaaactgctgattgaagatccgcttcctgccagcgcccgctaccatggcattcagtgcagcacggcgcatatcacctgcgatgacaacgatctactgtatcggctctcgcaacaacgggaagctcacgaggatgcggagtggatttgctataccggatcaggctatctcatccgtctgaatgcgtgggcttttccggttctgcaactgaaacgatgcggactgtcgaaagccggtcgccggttgattatcactctgatgcgtcgctacccattgagcatcattaacctcgatgcctttggtgaactgctaccaggctttgatatctttgactggtaa

SEQ ID NO: 168866 - DNA, 204 bp, Enterobacter cloacae; identical to SEQ ID NO: 100787

SEQ ID NO: 168867 - DNA, 846 bp, Enterobacter cloacae
atgtccgaacaatacacccacactgaatccgatgttctgacaggccataccgagcttatcagctccaccagcattgaacgtatcgttgtcgggcgcaatgccgcactggaacaaatcaaagcgattatccatcagctcgctgatatctctgcgctaaccgagagtattgggggtaaaacagccattgactgggcaatgcgtcaggaatttcgccgtggttgctggttacttgagaaagaacacaccgccatgaaagtgatcacctgcaatctcgaccgtagcatctggcgcgatttgatgaagaaatccggcatgattgcgctgatggatgccgccgctcgcgacgaatggaatcgtaatcttgagcaggatgatatccccgccatcagcgaagagaacattatcagtacctttaagcaactgcaccacagcaaagacgatgtgtttgagcgtgggatcatcaacgtatttaagagcctgagctgggattacaagtcgaactcaccgtgccggtttggcaaaaagattatcgtcgatggactggtgaattatggccgttggggatttagattacttcacgggaaacgacgggctcagttggcggatctggatcgcatgctgaatctgctcgatggtaaacctgttcccgaaaaccgtcatgatcttagcatcagattagatgatcacataagcaagcaacacagtaacgtatacgaagatgagtacgtgtcgatacgctacttccagaagggctcagggcacattactttcaaacgccctgatttggttgagaagatgaatgacattgttgccaggcattatccggggatgctggctgctaagtaa

SEQ ID NO: 168868 - DNA, 1038 bp, Enterobacter cloacae
atgggcaacaaaaaaactgacacttacgatgtcatttattccagcattcgccggattactaaactacgcgcgccagaaggtgaaattcgattcactgccacgatgaagttgatttatgcatacatctggacgtttcaggagaataaggatcgtggaaataatgatcccattcataccaacaccaacgttattgcgtgggagatgggcgtatcagaaaagactgtgatcgatgctcttaaggcgctggatgatgcaaaggtggttataaagcgtactgaaaaagtgcgtggtaacgttaattcaagtaactacgtggcgatcccccctgcgtctgttgctgccctggggattactccaccacatcctaacgaatcaacatccaagcctaagaagaaaaaagcagcagagccgacaaacgaggagaacaaaggcgatgacgagcaggcacagcagcaagaacacggacagcaatcccctgatgtgtcccccacggcgagtgaacctgtgcaacaggctgatagtgtggcctctgcatctgccgaggatgatcctgaacagcgatctggcttttcacagcctgctagtgatagcagcgatgatgtttccgctcatgatgcggtgaacagttcggaaacgccacagcgtgccgacatttttgatcttaagctctggcgcgaaaatggtcccgatgatttcggatttatggagtacggtgctgaacacggtgaaaccgatgttgacagggtcgtagctctgatcgatcagcattattttgaagcactgaagcagataacgatcttcgatgaagatggtgtggttactgaagagtttatcaatgctctgagcggtgacgctgcccctaatcgtaatgctgacggttcgttgcagagtatcaagtacgtttattgggttgctcgacattcacaagatgaacgtgaaggcatacctgtacggacacgcgaggaatacatggcagaagccgggccggaacacatcccagcgcacctgttgccaaaagagcaccgagccgaaacctga

SEQ ID NO: 168869 - DNA, 2145 bp, Enterobacter cloacae
atgtccaggctgactgatttaatagctaaagcgaaggccaaagacccgcaactgggcgctgatcttgatcgagaaatcaagatcctgtcgtcacgtcttcccttcgggctgaatttcgagcgacatagccctgaagtcgtagagttaccattgcgaccagtgcgcaagggagataaagtgcgcattttgccagaacgtggctccaccaagaaaggtgaccagcgattgtggcaagtgaaagcaatccataaagcgaagaagacagccgatctagaattgctgggcgcagctgatgtcgagactcagacagtaacgctaagtgacctagtggttatagctgaatttcgtgacacgatctggccgggtctggtcagtacaggaaaagtacagcgtggtggtgacaaaccttaccattcagtaatcaatggcgagaactaccatgtgttgaaagcgttgacctacacgcacaggggcaaggtagacgtcatctatattgacccaccatataacacgggagcaaaagactggaaatacaataacgattatgtcgaaggtgacgatatttatcgacatagtaagtggctggcttttatggaacgtcgtttgcttattgcgcaagaattattgaacccagataattcagtgctaatcgtgactattgatgagaaagaatatttacggctagggctgttgcttgaacaaacgtttcaaaatgcaaaaattcaaatggtcagtagcgttatatcccctcaaggtagcactcggggaactcagttcaaacgctcagatgaatacatttattttgtctattttggtaattcaagtgtgacgcccctgcggcttcctgaagaatggtcaaatgggcaagaaacaagtactgtgcgagggtctattcattgggctagtttaaaaagaacgggcactgaagctacccgccaagctagacctcaaatgttttacccgatatttttgacatcagattgctcgaaattccactccgttggtgatccaatagctataaatgttgaaagatcatctatcagtattcctgatggttgtgtagccatatggcctctgcgaagagattcttcagaaggtcgctggcaagtaggaccagaggcattacgtaatctaattcttgaaggccatgcacgattaggcaagccaaatggtacagaaactgctattgcatatcttaaggctggtgaaagagcaaaagttgcgagtggagaatataaagtaataggtcataattatgatggttctatcataactgaaaatgaaaatggggaaactactcaagcagaataccggccaacaactatttggaatgtctctagtcatagcgcagggcatcatggttcaaatctacttcggtctttgctcccgggccgtacctttccattcccaaaatcactctacgccgttgaagatgcgctcagattttttgtaataaataatcctaatgcagtagtgcttgactttttcagtggttctggaaccactgcccacgcagtcatgcgtctgaacaagcaagacggaggttgccgtcagtgcatatctgtcactaacaacgaagtagcggccgatgaacaaaaactgttgcgtgaacagggccttcgaccaggtgatcccgaatgggaaaaatggggtatatgtgactatataaccaagccacgtgtgcttgctgccatcacaggcaagactcccgatggtaaaccgattaaaggtgattataaatttaccgatttattcccaatctctgaaggtattgaggaaaatgctgagttttttaccctaacctacgaagctgagaaatcagttagtcacaacttggcttatacccgaattgcgccgttactctggctacgcgcaggggcacgcggcaaacgtattgacacactgcctcttgaaggatgggcggtggcagatacctatggcctgctgtcagtcgtagatcaggctacgcctttcattgaagccattagccaaaccagtgacatacgagtagcctttatcgtcactgacgatgaccgccacttccaagctgtcaccagacgtctgccaaaaggtgttgagccggtacgtttgtatgaatcgtacctgaccaatttcagcttcaccagtggggaattaacagaatga

SEQ ID NO: 168870 - DNA, 222 bp, Enterobacter cloacae
atgccttcttatgattcgcgggttcagttgacgtcaaaaagcggcgtaatctataagtttctggttcatgcggatagcccacagggggcaagagtcaaagtccaaaaccatctgagaaagctgggagattttgatttcagtgaaatttgcatttcatctatgggggtgaggggtgatgtcttgcttctaaaccctgacggtacaaagtgcctgattctttaa

SEQ ID NO: 168871 - DNA, 267 bp, Enterobacter cloacae
atgcgggaaatcagcattcccctacaccgccgccacgagatcgatgttgtgtcgtttggcaactcgcttcatgacccggattgctactacctgattcacgcctttgacagcgctgaaaacatgactgcggttctcgatgctttttatgctggcgctgactggcgcaacggcccacgtgaagacatcattggcagcacagaaaccagcattaaaacagtgatgaatctaccaccggaaagcgtggaagggctgcgggtgcaatcgtag

SEQ ID NO: 168872 - DNA, 1119 bp, Enterobacter cloacae
atggcaataaataactttaaaccattcgcgacagcagcgaatgctaacgtgatgtcccaggctgactgggaagggcttccggctctgctctctggttttacttcaggaaagtcggccagcgcagaggtaaataaggcaatccgacaggccagctttatcgcggcagcgctggcgcagtacaccgccaacaaaagtgggctggatgtgcttgatgatgctgatttgaacgggttcattaccaaaatgaccactgcgtttggtaaggatttccagactctggacgccacgctaacagcacttgccggcctcgctactggagcaaacaagcttccgtatttcaccggggcagataccgcggcacaaactgaccttacgcagatcggtcgggacgtcatcggtcagacaaccgtggcgaaccttctcacatacctcggtttgggagatggcacaggaagacttattaatgtccagacttttacggctagcggaacatataccccaaccgtcggaacaaaatttgttatcgctgaggttcttggaggcggcggcggtggcggcagtaacgcggctacgccaagttcaggggcggcggcaggtgctggcggagcttcaggtgcttatgcagtatgcaagcatacaccgacagggccggtaagtgttgttattggtgctggtggagccggtggaatatccactgctgctggtgctgatggtagcacgggcgggacatcatcttacggcgcagtatcagcacctggtgggcgtggaggccccagaggcgtggcgtttaataacttccctacgggcggaaacgttgcgactggttcatctggtgttactggttcagttattgttggtacacccggtaccggcggatcatatggcattctttattcagattcgaatgctacaggcggcggtggagcaaacagtatttatggcgcaggcggaattgccataacaatcaacagcggtggatcaggtacatcgcaaggggctgatgccaatggttatggttctggtggcggtggtgctgtttctgtgcatacggcgacagcagccagttcacgtggaggcaatggcacgccggggattgtaattatctgggagtacgcataa

SEQ ID NO: 168873 - DNA, 411 bp, Enterobacter cloacae
atgaaagagtttgcagtaattaaagatagtctggtggttaatattatattgtgggatggagaagataatgcctttgcgaaagatattgatggtgaacttatcgcaattccagaagaaattcaggtcggtattggctggggttatgaaggcgataaatttatatctcctcctgaaccagataaaactaaagagcagctaattcaggaagcaatccttgaaaaggtggggcgcataaattcagccaatgattacatgaacagcaaacaatggccgggtaaagcagcaattggtcgactgaaaggagacgaactaacacagtataatctgtggcttgattatcttgatgcactggaagctgtcgatacctccagtgcacctgccatcgaatggcctacaccgccgggggagtag

SEQ ID NO: 168874 - DNA, 555 bp, Enterobacter cloacae
gtgcttattggttacgtaagggtgtcaacaaatgaccagaacaccgcattgcagagaaatgcgctcgatagcgcaggatgtgaactgatttttgaagataagatgagcggtaagacatccgaaagaccagggctcaaaaaggtactccggacgttatcagagggcgacacgctggtggtctggaagctcgatcggctcggtagaagcatgcggcatcttgtcgttctggtggaggagctgcgagagcgagggattaattttcgcagcctgaccgacagcatagacacgtctaccccgatggggagattcttttttcacgttatgggcgcgctggctgaaatggaaagagagctcattgttgagcgtacccgtgcaggattagcagctgcgcgagcagaggggcggataggcggccgcaggccaaaactgacggatgagcagtgggcgcaggcaggaagactgatcgctgcaggggagacacgccagcgcgtggcaattatttacgacgtcggcgtttcgacactctaccgaaaattcccggtaggtagtggatag

SEQ ID NO: 168875 - DNA, 486 bp, Enterobacter cloacae
gtgtttaactttaaagaaaacacattcaagtcaaagagtgacgaaggaaaggagagttatctcggccaaattcacgagaagttataccttgatgtattgaatataaataaagagtttaattttattcttggggagatgttttacgtagtagggaatagcggctatcaccaatattacaatacaagtattgcagaaatggaatgtgcaataaaatctttgatcgatgaaagctataaattcagagggcaaaatgaatttttaagcaaaaaaatagcaaatataacatttggtgagattcataagctaaaaaacaataagaatgatgaagtttgcagcatatgggtaaataaatacaaaggtccactttatgaaatgataagccagtattattggataaagttcaatccggaattatcaatagaaaaaactttgctagacacgctgggatttaaaccatgcaagaggtgttttaaccctaaagtataa

SEQ ID NO: 168876 - DNA, 471 bp, Enterobacter cloacae
atgatcaaagacgctatattttcaccttgcagaaagtatcgttactcgttatcacggatatgggacgaatcaaaaccatatacccttttcattgggctaaacccttcatacgccgatgccgagaatgatgatcaaacattgagtcgttgcatatcgtttgccaagagttggggctacggtggcgtatacatgaccaaccttttcgcgttcgttcacactgaccgctttgagatgatgaaagccgccgaccctattggagccgacaacgacagccacttattgcagcttatcgacggagcaggccttatcgttgctgcatggggaaacgaaggtaggcaccttaagcgctcaacagccgtccgtcagctattgccagcaagcacaatgtgcttcgtcttaaacgccacaggtgagccgagacatcctttgtatatgaaaaatgacagtgttctcatacctttaaagcaatga

SEQ ID NO: 168877 - DNA, 306 bp, Enterobacter cloacae
atgagtcacgagtttttaatccagagaaatgacaacagcaatgaacaaggctatttccaaggatatgccgaaggcatattctattcagcctttaattgccaaaggttcaatagaggcgtttctggttctaacgaacaagaaactttcaccacagaagaaacaaaatcagcattagaaaaagtcttaaattctagcgagatagcaaactatcccgatcctgatcgtataagtagtattaaagatttttatttcaatattgtattaaatgctaaaaagaaagatatttttacagtgagatttttctaa

SEQ ID NO: 168878 - DNA, 438 bp, Enterobacter cloacae
atgagcaaaatttcacaaatgataaaacaaaaccaagagaagaagaaccagcaaaatttgatctatcaagagaaattgaaacagctaatacacaacaacaattcattcgttcaagagttgatgaggttagaagaaatcaacagcaattcagaaagtcgcttgatagaactcaggaacgatctggagtatgtagaagatctctacattcaattattcacaatattagaagatacgtcagaacgttttcaatccatacaagacagaatgaaagaagacaaaaaatcgaacacagacaaaaaatcttccttgaaaagctcaaaacccagcaagaaaaaaacaatcaaagaagtgtcgtcagaagtcgatttaaaccgtattagaaccgttctaaatactcttctaacccactacgacaaaaccttaaccgtgaacaagtga

SEQ ID NO: 168879 - DNA, 315 bp, Enterobacter cloacae
atgaacagggcagagattacaaaacttatagaacagaatcaacaatcgatcacagagcagatcagcagtatgtcgaaaaccaactcagacaccatagagaaaattttgacacagagcttaaaaaaagacacagcagaaatagaactcgctttaagccaacacagagcaaagaccagaaaaatgttgaatacagagttaaaaaagcaaatgacagtaaaaatgttagatctgaaataccagacaataataatgttcctgttaggaatgaacctgatattgatttttttcataataataaaactatcgaggatgtaa

SEQ ID NO: 168880 - DNA, 855 bp, Enterobacter cloacae
gtgggaagagcaaggaaggcaaaactttttgtggatgagcatggcgatacaccggggaatcattactggcatcggtttatgtcactgtactatgtagaacatccatcaacattgggtaagtatgcttacagtagattcagttcccttgaaccgcttgagcaggtgtatataggcgaattaaaaaatgcttttgagatatggtttgatgtgcttcatgccaaccccccctcagaacctacagcctttcagaagaggttccttgatgaacctatgtcaagtttgatgataatagatgaaacgctggtgtacgatatcttcttccgttttatctatgaaatggatatcaagcgggaagatgtctcagaacgtctggatgcacttcttgtcgatgataaaataccgtatccctatctttttgaagtttcatgctatttttacatcattgctacacgaatttttgccgacgaaaattttgataataaagagattcagttttttagagcaatgtttgaggctatcaatagcttaaaagagttcacaagcaagcatgatgcgtacctgcaagagaaaaacaaggaactgcataaaaaaatatcaggtaaaggaggtgagaacaaatggtcaaagatccgtgcagaagtcatccgattactgagagaagaaattagctcaggccaatatttaggacggtttaacagtaatgctgatttgactgaatacttacttcctatggtagaaaagtatattcgtatttgcgatataaaatcgcccgatgatttgttttatacgctcgaaagctggtcaacaagccctaaatcagatatctcggcactgtatgggctgttggtcatctaa

SEQ ID NO: 168881 - DNA, 249 bp, Enterobacter cloacae
atggaaattaatgataatctttggtttggttcaggatatattgacgagtgtagaaaaatacttcagggaagtaaagaaaaaacaatttataaattgaagatacaacatttgaatgggtttgttggcttttatctgtatgaagggagttctaatttccctttagagaaagggaaattagtcgtattccaattcaaagcggaagagttattacaaaaagaaagagtgttgattaatatagaattatcatga

SEQ ID NO: 168882 - DNA, 981 bp, Enterobacter cloacae
atgagccatcaactcaccttcgccgatagtgaattcagcactaagcgccgtcagacccgaaaagagattttcctctcccgcatggagcagattctgccatggcagaatatgaccgctgtcatcgagccgttttatcccaaggcgggcaatggccgacggccctatccgctggagaccatgctgcgtattcactgcatgcagcattggtacaacctgagcgacggtgccatggaagatgccctgtacgaaatcgcctccatgcgcctgtttgcccgattatccctggatagcgccctgccggatcgcaccaccatcatgaatttccgccacctgctcgagcagcatcaactggcccgtcaattgttcaagaccatcaatcgctggctagccgaagcaggcgtcatgatgacccaaggcactttggtggatgccaccatcattgaggcacccagctctaccaagaacaaagagcagcaacgcgatccggagatgcatcagaccaagaaaggcaatcagtggcactttggcatgaaggcccacattggtgtcgatgccaagagtggcctgacccacagcctagtcaccaccgcggccaacgagcatgacctcaatcagctgggtaatctgcttcatggagaggagcaatttgtctcagccgatgccggctaccaaggagcgccacagcgcgaggagctggccgaggtggatgtggactggctgatcgccgagcgtcccggcaaggtaaaaaccttgaagcagcatccgcgcaagaacaaaacggccatcaacatcgaatacatgaaagccagcatccgtgccagggtggagcacccgtttcgcatcatcaagcggcagttcggcttcgtgaaagccagatacaaggggctgctgaaaaacgataaccaactggcgatgttattcaccctggccaacctgtttcgggtggaccaaatgatacgtcagtgggagagatctcagtaa

SEQ ID NO: 168883 - DNA, 294 bp, Enterobacter cloacae; identical to SEQ ID NO: 162273

SEQ ID NO: 168884 - DNA, 234 bp, Enterobacter cloacae; identical to SEQ ID NO: 162272

SEQ ID NO: 168885 - DNA, 270 bp, Enterobacter cloacae
gtgctggctgatttcacctcgcccgatctgctgattatcgatgaattaggggcccagcttggcaatctctctgagcttgccatcttgcaggagcttatcaatacccgttacgagagcgtgctacccaccatcgttatcagcaatctgacactggagcagcttcgacagggtgttggtgatcgtatcgttgaccgtgtgactgacggcggcaacaaccgcctgatttttgactgggccagctatcgtggcaaagggagtacagcggcatga

SEQ ID NO: 168886 - DNA, 456 bp, Enterobacter cloacae
gtgctgttaattggggctggtggcgcggcgcgcggcgtgctgctgccattactctcacttgattgtagtgtgacgattaccaaccgtactgaagagcgagcgcagaccctggccgatctgttccgtcatacgggtagtgtgagcgcgttgtcgatgtcagcattgggtggccatgaattcgatctcatcattaatgcaacctcgagtggtattgccggtgaaatgctgccgatcccggcgtcgttagtgaatgcacatgtatgttgctatgacatgttctatcaaaaagggaatactgcatttttagcgtggtgcgcggagcatggcgctaagcattatgctgatgggttgggaatgctggtggggcaggcggcgcatgccgtcttactgtggcacggtgttttgccagatattgaaccagtgatcaaattactcaaacgcgagttgggtgtatga

SEQ ID NO: 168887 - DNA, 252 bp, Enterobacter cloacae
  misc_feature (187)..(196): n is a, c, g, or t
atggtcaacggtatcctatggctactcgaccacgatctccgcgggccctttaatatggtttccccctacccggtgcataacgaacaattttcgcacgccctggggcatgcgctggagcgccccgcaatcttacgcgttccagcgacggtgataagtctgctgatgggcgaatcgtcggtactggtannnnnnnnnntccgctggtatgatctggatgacgcgctgggggatattctcggaaagcgtgcttaa

SEQ ID NO: 168888 - DNA, 336 bp, Enterobacter cloacae
atgttggttaattcgctggtcgacatcaaagcgaagccgggctggctgattgtggtcagtgggcataccgataacaccggcaatccgcaactaaaccagacgctgtctttcaagcgtgccgaagcggtacgtgactggatgcgtgacaccggcgacgtgccggaaagctgttttgcagtgcagggctacggagacagtcggccgatagtatcaaacgacaccccggatgggcgcgcgctcaaccgccgtgtcgaaatcagtctggtaccgcaggctgatgcctgtcaggtgccgggcaaaacaacatcaccggctaagggtgatgttacaacttag

SEQ ID NO: 168889 - DNA, 363 bp, Enterobacter cloacae
gtgtttgccaccagtaacaatatccctgctgacggcacctccaccgcctccgtcaccgcccaggtgaccgacagcgcaggcgccggcctgtccggacagagtgtggtcttcacagccaccgccggggccctcattggctctcctgtcattactgatacctccggactcgccaccaccacgctcaccagtaccacggcaggaatttcttccgtcacggcctccgtcaacagcagcaccgggcacgtcgatatcacctttacggaagcggcactctccccggttatcagctccctgatatctgacaaagacagcattgtaaatgacggggtggataaagccacactcgtggccacagttacgtaa

SEQ ID NO: 168890 - DNA, 228 bp, Enterobacter cloacae
atgactcccgaaaccgatagcgatgaaaaatggacactgtttaacagcatgaacagcaatggcgctgaactcagtagtaacgctgccggtattgcagtctgtctattggtctacagccaccacgcctgtcgcactgagtctgacgcgatgacaaagcattattatcttctgcgggattatgcgctcagtcatgctgaatgccgcaccattatgcacattatcgattaa

SEQ ID NO: 168891 - DNA, 141 bp, Enterobacter cloacae
atgcaggtgaatgttcagatgggtatttaccgccacgccgattggcgtcatatctcccgggccatgccaggccaggcgcacaccaaaagcctgacagagaaccgccagcttcaaggctggggtaatgccgccaatctgtga

SEQ ID NO: 168892 - DNA, 228 bp, Enterobacter cloacae
atgcccagaacgctcactgaagcctttagcaaggccagagacgatgttgagtatgactgggcgcaaaacggtatgccacccagttgtcatgaacaacgttccttgtccgagcgtctatacagaacgcaagcaattgataccaaggtactactcggtcactcaagtaaaaccatgacagatcgatacaatgattcgcgagggaaagagtgggagaaactggccatataa

SEQ ID NO: 168893 - DNA, 228 bp, Enterobacter cloacae
atggtgcacgtcaccgcgcaccgtatcgatccgggttggtctggctgcatcgtgctggagttttataattccggcaagctgccgctggcactgcgccccggcatgctaatcggcgcgttgagttttgagccgctttcaggcccggctgcgcgtccttataaccgtcgtgaagatgcgaaatatcgcaatcagcagggcgcggttgccagtcgtattgataaagactga

SEQ ID NO: 168894 - DNA, 168 bp, Enterobacter cloacae
atgggtctgcctctgtaccgcccggattactctctggtcagcaaacgggcaaagaacgttaacatcagcataaaaacgccaaccagtggtgaaatctcgcagctggccatcgacgctaccggtctgaaggtctttggcgaaggcgagtggaaagtcaggcagcattga

SEQ ID NO: 168895 - DNA, 144 bp, Enterobacter cloacae
atggtgagcaaacagtttttgggcatcctgcagggagccaaatacgctctccatcatgcggtcgtgcagttctgccgccacagcattcgcttgttcagcggtcaggtcaggagcatcgaggtaatacgctacgccgcgctctaa

SEQ ID NO: 168896 - DNA, 153 bp, Enterobacter cloacae
atgcgtagcgcggcaaacgcattgcgtaaccatgcggctgaactgggcggaaacgtgatttacggtgtgagcagcccaacgcaaggcatgttgtccagcttcattcctaccgatagcgaaatgaacggccaggtttataagtgcccgaattga

SEQ ID NO: 168897 - DNA, 219 bp, Enterobacter cloacae
gtgattgatcttgcctgggcggtaaaagggcaggaagcgattctggctgcgggtggtgatgtgacgttggatatcgttgaggatttaggtcatgccattgacgatcgcagcatgcagttcgcgctggatcatttgcgctataccgtacctaagcactatttcgatgaagcgttaagcggcggcacgccgaaagatgatgatgttattgaaatgatgtag

SEQ ID NO: 168898 - DNA, 225 bp, Enterobacter cloacae
atggtggcggttgttgacgcgattttgaccgaagagcaacgccgtaagaaagcgggcgatctgcgcccaattccaatgcgtcctgaccacggtcaccaaatgctggacgacctgaagaagaaaaccaacccggggtactcggcgattggtcgcctgaaagggttggcggaagtgcgcggcgttgaactggcgctgaaaatgaccaaattccgcgacctgctgtaa

SEQ ID NO: 168899 - DNA, 168 bp, Enterobacter cloacae
gtgctggccctgattgatttggaaccgaacgccgatgtggatgcattaccggatggaatttacgcccaggtggcggtttactccgaccattttgcccacgtttcggtgatgcgtaaggtattactgcgcatgaccagctggatgcattatctctatctggatcactag

SEQ ID NO: 168900 - DNA, 159 bp, Enterobacter cloacae
atgaaacagggacgtattgcgcatattgttgacggcagccagccatgtacgccagaaatcatcaagcacgtcttcgatgttgaggtgcagatgctgcaaaacccgcaaaccggtaagccgctgtttatgccctctagcacccgcgtggaacctgactga

SEQ ID NO: 168901 - DNA, 177 bp, Enterobacter cloacae
atgctggaacacggttttgtggctccaagtatcaacatcgacgagatggacgagaaagcggaaggcctgaacatcgtgactaaagcgactgaccgtgagctgaacaccgtgatgtctaacagcttcggtttcggcgggactaacgccacgctggtaatgcgcaagctgaaagcgtaa

SEQ ID NO: 168902 - DNA, 138 bp, Enterobacter cloacae
atgaaaatcatcatctacattcagcgcaacccgggctgtaccaaactggccgagccatttttcaacttctccggttgccgcagttgtagcagcacctctggccatatccgaaacctgacgacccgaactgccggatga

SEQ ID NO: 168903 - DNA, 183 bp, Enterobacter cloacae
gtgggcggcagcttctttattaacagcgaacgtctggaaacgtgctccccgcaggcggcggatgtgttgagccgttacaccgtgctggataaaacctactttggtgaggcgctgcaaaacccggcgtttattgttgagctgactggcctgattaatcaggggtattggttcttcgcggaataa

SEQ ID NO: 168904 - DNA, 303 bp, Enterobacter cloacae
atgaaagaattacgtttttatggtgcaagtgatgaccttttcgaatgtgaaggtgccattcgcgaggaaattgactgctttaacaagccaggcatatatcacctgaaatctgccgacggtgaaatgcaagtagtcggctattacctcgactccgggttgtggagcgtgggtatcagtcaaattgccgaagacgtgccgctgccagcgtggccagtgcaatatcaggtgcatgagcgtggatatagtccattgctcaccattcaagttcctgacgatatcactctaaaaattgaagaccactga

SEQ ID NO: 168905 - DNA, 648 bp, Enterobacter cloacae
atgatttttaacggcgagatggtacgagccatcctcgacggccgaaagacgcagacgcggcgtgttatgaagcctcaacccgagccttgcccggcacctcgtggcggccactggtggcccagcaacgttttcaaaacaatggttcatgttgaagaagaaatgcagaacggcaaaggtggctggggtggtctggttggcgacgcgtgcccgttcggcgctgtcggcgatcgcatctgggtgcgtgaaacgtggacagaagctggtgctggagcaccggacctcaaactataccgcgcgaattaccctgcgcacgttccaactcattacgagaatgtccctccagttgacgaaatatgctggacgccttcgattcacatgccgcgctgggccagtcgcatcacgttggagattatcggcgtgcgggttgagcgcttagccagcgtcagcgatgacgatgcgggaaaagaaggttatccggcaaatcctgcaccttacggcggcgatatggataaatggctgtggttccgccagttatgggacagcatctatccggatcaaagcttcaagcacaacccctgggtctgggtaatcgaatttaaggtggttactaatgttccagctaattcaacggggtcagatttacgctga

SEQ ID NO: 168906 - DNA, 219 bp, Enterobacter cloacae
atggaaccagaatatttctgcacaattacttgcgaaaccaccttaacgcatcttttcagggaggatatcaactatgaagtctttctgattgacggtgattactttgtggctgaccaggaaaacaaccaaaaagaagttttcaaatctgattacaacgaaaacgtctggcttactattgatggcaaaagcgctcggttcatcgagtgcaacgcgagatag

SEQ ID NO: 168907 - DNA, 216 bp, Enterobacter cloacae
atgagcaaagtcgggaaaccaacatacgaagaactcgagcgccgtttccagtcttattgcaagcacgatggtggtcgtatgttcaacggagaatcagacgctatttgtgcgatatgcggttgggatacagccaaatgccagcaccgtaaagccgatgactgggacaaatactgccgcgagtgtggcgaatcgctgaagccggaggccacccaatga

SEQ ID NO: 168908 - DNA, 240 bp, Enterobacter cloacae
atgtcgcaagcgttgcagatcctatcaaccattcttggctttgtcggaactctgataatgttcctttacggatacaacctaattccctatgaaggaatgaccttcggtggagatcatacggcagagaataataaaaaaatcaggcgccaaaacagcagaattaaaaccatgcagaaagtcggaatgggtctgctaacactaagtttcgccctgcaaggattgtccttcattgttaagtga

SEQ ID NO: 168909 - DNA, 408 bp, Enterobacter cloacae
atggcactggtagaaatcgtggcaagtaacctgcacgccggtgccaacctccgcaagctggaggttggttcggtggtggaagtggacgatgtaacagctgagcgctggatcagcactggcaaggcgaaagagaccgacaagaagaaaggcgaaagactttccttcgaagtggcaactcctacagccccgtctgctgacttatctggcctgcaaaagcaactcgcggaggcgcttgataaccttgcagaggtaacaaaatctcgtgacgaggctcgcaaccgtgccgttcagcttgccgaacagtccgcagaagacaagatcgcttccgatgagaagttggctgagatgaccaagcgcgcaaaagatgcagaagctgcgctggaagaactgaagaagaaggtgaattaa

SEQ ID NO: 168910 - DNA, 288 bp, Enterobacter cloacae
atgggatttcaatattggttcacggtgtgcgcggtatttttggttggcccaatctccttggtacaatcgtttgtctactgtcgtcggggtgtttataccaaaacattcaaaggaacgctccgaaaggagtacattcacgtggatgaaaagcctattgaattctggttcagcattatctttcacatggtaatgggcatggcgatgattgttttaggcttctggtttttagatgacctacctgcttttcatagttggtacactgaaattcacgcaatgctccctttttga

SEQ ID NO: 168911 - DNA, 2148 bp, Enterobacter cloacae
atggctacgcaacctactaatctgcctgtaccaagcgaatctcctcgcgatctgaagttcaacgctggaaaaatcgatgagtttgtcagttcttttttccatacgtacgccgaccggtttggtaacgaccactatacaattgaaggtattcgctggcttgcgcagcaagctatcgccgcgttcgggtatgttacgattgattcatttcaggatggagcaacactgacgctgccaaatcaggtgctgcgctggaagttgcctgacggggatggtgattattatcgctgggatggttcatttggttctgcaggtaaagtcgttccggcaggctcaacaccagcaacaactggcggggtagggaaaggtgcgtgggtaagtgtaggttacgcagcagccctaaataatttgctgtcggcacaaccaggttccagcaatattcttggcctgatgctgaaattcactccggtagcctatggtgcattagctaacgctactgacgatacagcggcatttaccgcatgcatggctgctatgccttcaggcgcgacaatggatcttcagggcctgacgtactcggttactgacattgaagtaaccaagccgatgcgcatcatcaacggtacgatcaacgtgttgtatggctcagtaaagggtggaatatgggtacatgacacacatgatgtacgcgttgacagcgtaaatacaaacgttgattacttaaataaaaatttatacacagcggacaatgtatcaggtgttatattcgagaattgcactaatgtaacagccacaaacattaatgcagttggttcgaaatgtaatacatacttatctacaggatcctgggggtgccctattcatgcataccagtgtaatggtgtcgttttgcataattgcaaaggcagtcattctgataaagaaggtatcatgacgcgactgtgtaataacgtgaagatggggatgatacatgcagaagattgcgggtattcaggtgttggcacatcaggaggcaatggtcttatcgcatgtaatatctggtcatatcgttctgggaaaactaattgttctttcaatagtacaaattttgtaattgccggaatatattcagaaggaaatcttgatgagggcggcgtctgccttgggcataaccatgaagtagcgcagtatacaggtagcggatctgcatcaggaataaccattatcaactcagcaaagagtggattagtagtgggtaagcacaaaaatattactcttgatggtgtaactgttgatacctgtggaactgttgcagcaggggcagggatcgtgattaatgatgcaatggaaggtaattgcaatgtcctgattggtaacatcaacctaaaaaatataacaggcactgggattaattatctctacaatgggaatacgaatttaaccattgatggtggtgttatacagggctgcacgctaaatgcaatccaagctcagcacaatggttatactaatatcaaaaacgttacatttagaggtaacgcatatgatttagccgtgttcccatatgcatctgacggtacacaaaaaatgactgccttgaacgttcaaaactgcgacatggagttcacaaccaattggaacgttgttttccgtggtgtacaacatgttaagtttgatgggttaagtgtgcttggatttaactcaggaagtacatcaaccatggcctccattagatgtgacaccgttgtaggtagtacatttgagcttcctgattccattgagtttaatgtttgtcgttttaatggaaccgttggctctggagtggcggcaaccatcgtaattggagatgatgctctatccaccacagggaaaagattaaaggtaaatggatgtcatttcggagataccaccaaaaaaccaattcaatacaccgccgcaaggatggcaatgcagtggggaagaaatacaaggggaactgacaccggactccaaacggtgagcataccatcatcaggctctgtcgttgttaataacagcaacatcaccactgaaggtatgccagtcatggttgctcgtggaaactcgggattctatgtatcatcctgggcattaggaactatgactataaataatactggcgctacttcgatcaatctgacgatacagcactaa

SEQ ID NO: 168912 - DNA, 1092 bp, Enterobacter cloacae
atgaaatcattgaattaccagaggttgactgcaaatcaatctgtatcacttgatacattgcgtggtttagccgcagtgatagtagtgatctgtcattgctctcaactgttcattaatcaacaccttcctgaatattacaggttcttcgctgttctggctcagtcgtgtgtaatgattttctttgtgctaagtggttttttgatcacaaaatccataactggcaacattgcacgtaatgggtcgctagatttaacagattatgcaataaagagattcgctagaatttatcctccgctgatattctcattcattattgttgcggttcttaccattctttctaaaagtttttttatttctggtgacggaagcctttcaacagcaaatggatgggtaaacaaatatggctttaatgttgaactatttggctatctcccctctgccattatgtctaatgggtttgtaggtgatatgtcgccagcttcaaactctccactctggagcctgtcaattgaggtgtggtactacgttatagcagggctgatactcagcggaaggaaggagttgattattgcaggtttagcgattgggtacgtgggtatttctaataactcaccattcttctactattcaatcgtgtgggttttgggtgcaattctatgccttatgcatgacggagtgataaaggcatctcgactagcaacctccatggcattactttgtgctgcggcttatgcattttacaggctctttatcatctactataatttcacaaactcaaatttaacccttgttaacgtcgctcttggtatgcttatggcggctttgttgcagaaggttgtgatagagcgagatatcaggctttcaatccttccgtctatggcatctttttcatacacactttatataatccacttcccaatactgctctttgtgtttggatgctctcaggaatacagccaggacaatcttaataacgcgttaataatgtctgctattggcttttctacgagtatgctcatagcatatatttctgccagattcgttgagaatacaaagctctttacgtcaatactaaaacaaaaggccgcatag

SEQ ID NO: 168913 - DNA, 309 bp, Enterobacter cloacae
atgccacgcacagcagacatgcgcaccgcctttgttgcggtagcagagccattcatttctccttcagcaagcatcattgaaacgcaggaaggctttgatgtcattgataacgcatcggcattcagtcgtggagatacattgctgatctggttttgcggccgccagcagcacgcctattgggcaggtgatgctctcattaccgacgatggggaggccatagaaggtgatgcgcttgatgacgttcgcatggttggtgttgtaactcataccattagcccggtatgggttgatgataacccggtgatgtga

SEQ ID NO: 168914 - DNA, 1014 bp, Enterobacter cloacae
atggctggcaaacgtaaaaatcctgcagacgcaatacttccaccgcgggtctatcgagggaagtcaaaatatgaatttcatccggctagcggtggttctgtatctctctgccctctcgactcacctgtatcattgatatgggccaaatatgaggctgcgcttcgagatatagagaaaaagaccaacttgtctgtattatttgatgaattttttaacagtgcggattatcacaagcttgggacggaaactcgtaaggattataaaaaatacgcacgtaagctcattctggtatttgggaaaatggatcctgacagcattaaaccacagcacatcaggctgtacatggacaaaaggggtgtggttgccccggttcaggcaaatagggaaaaggcattcatgagcagagtatatggatgggcttatgaaagggggatggtgaaagggaacccatgtaagggagttcgtcaatttaaagaggaagaacgcgaacgctatgttacagatcaggaatataacgcgctttatgaggtctcgccgattgtagtgaaagtagcgatggagattgcttatctctgcctagcgcgccaaggtgatgtccttgccgttcaaaaagcgcatttactgccagaagggatctttatacgacaaggtaaaacggctgcgaagcaaattaaagcatggtctgaccgtctggcaaccgccatagcactggcaaactcactccccctgaaagacggtgtgtcgagtatttacgttctccaccaacaaaatggacagagatacacgcgtgatggattcaacagccgctggcagcaggcaaaagaagaggcgcagaaaaaataccctcatctgctttttgattttacttttcacgatttgaaggcgaaaggtgtgtctgatttggaaggaagcctgcaggaaaagcagcaaatttccggtcacaaaactattacccagacggctcgttacgatcgaaaagtgaagattgttccggtggttggtgggcaaaaatga

SEQ ID NO: 168915 - DNA, 222 bp, Enterobacter cloacae
atgactgatgacattttaactaatgatgcaattcgtaagctgaccgggtacaaacaacccaaaaagcagtgtgcatggttggcagctgcaggtatttggttcaaagaggatcgcaatggttatccacgaacgacctggaatcacgtaaataatcccatctccttacgaatggagaataaccttaatcctgagttaacgactcctaattttgacgcaatgtaa

SEQ ID NO: 168916 - DNA, 243 bp, Enterobacter cloacae
gtgcggctgattaatcgcagcgcgaaagatatcatcggcgggtcagcatgtgccgccgccctgaaatcccactacgagaaattcggggatcatggacgtagttacactcagactttttacaccgttatggttggtaaacataaagtaaccgttgaggtcgttaataggcgtcgcagctatgttgcaaccgcaatgacaggagccagacagattaaacgcatggcagaactgggtgatttctaa

SEQ ID NO: 168917 - DNA, 1926 bp, Enterobacter cloacae
atgtctgttgaattaaaagtatttggcggagcttatttcccaaaagataaagcattaaaaaaacacccgaatttaaaacccctcgccactgctgttaatgcttctacaaaagccatcgcagaagccattattttcggtaagctggcggccgaacagcctgaacatatcgatgattacttcaaggtcaaaatctgggagcaccgcgaaggtcttccctgccctgtccttgatgttttctcacctgagtttttcgacagagtggcagtatggaatgtgaatgcaggtgaaccagctgcggcaccacagtcagaaactgatgaaaaagcagactgggaggataacaaggcacaggaagaaattaaaactgttgcgcggctcgaccaggcatcccgagcagcttgcctggcactgttcggcccggtccctggcatcactacggcccaatacggccagatcgtcgatctgctgaatgatgatgaatcgagttatgcccgcgaactggcagaagctctgtggaaagaaacccgcgcgctggcattggcaccagaacggcagaagcagttactcgcgtggctacgggagaacacaaaagagtctgcacaatggcctgacattaaaaagcagatcgccaaatggattgataccccggtagataagcgccctcaggccgccaatatcgcaaaagaagaagtggttgtcatccgcactgactcaggcgcacgcctgtgcaccggcgcgcctacagaccgtaatttcaagcacagcaaagatagtctgggtaacgagattgccttgggtattaaagcgcgcaagcaagaattcaacatttactccgtgccatcctccctttaccaacaggccgaagctattcgcctgtcaggtactaatgaggagtacgaggcctggtatcgcatggttatctctacgcccggtggaatggacatttcgcgagcgatgattattgcaatggttaagacagcacctgaagacatctggaaagaccgtgtcaagcatcgtgaatacttcaatcgcgtcatgaaagaatcagatcatgctaaccctgatccgcttatcgtcgatattgcctgtggtaggtcttcttctccaatgccacaaatcattaaaaagaacgcttcccatgatgaaaccaaaccgactgtaccgggcgaaacagagttaccagcagtttgccctggcaaagctgtgcaactcgacaaagaactcaacgatgcattcgctcataacccaacatcagaagagcaagccagtgatcagccccgggtggagaacctgagcggcggagtcttctctgtcgatgcgttgttaaacacccctccctcaaataaggatgaaaaacaggaagtgccaccagcaccagacgatcgcgaaattgcaattgcgcatgcacttaatgacctgatttctggtcgcaccgatattatggggaaagaagaggcagagggcgtagtggcttgcaccggccatatgatttccgaagtaatcccgctgctgatgacagatatctccgtaacagaattcagcctctcgcctgatttctccgaagatgaaattcatgatgtggccacaaccatattggacggctggtctgacgaaattagcgtgcgtcagaaagttgctcttgatgcaatcgtacagttccgccgcccggaaccaccaaaatctgtcgtgctcgatccgcccaccgttactgtaaagccgaaaaacgagcccgaaccagcactggaaacaaacaatccgctttcgtctgtcacctatctgcaacagctaacgattgcagcgctccatggcttgtgcgctaacccggcatattgcaaccagtacgatgaattgccaggtatggccgtgggtctagcacgtagcgtggagagcatgcaccaggaggaaaacgcacgtgcggctgattaa

SEQ ID NO: 168918 - DNA, 255 bp, Enterobacter cloacae
atgcaaccacaaacaaaaaacaagttatttggcattaccaatcaggcagaaatcgctcgtcaattagagacgagtcagcaaaacgttagtttatgggtcacatcaggcaagtttccgccgcgtaggatcttgccattttgtcgggctgttggatttgctgtgacaccacaccagcttgatccagccctttacccaaaccctactgatgcgctgcctgtgcaggctaccacccatgagcaaaaggagtctgactga

SEQ ID NO: 168919 - DNA, 138 bp, Enterobacter cloacae
atgagcaatataaccagagagcgcttaaagaaaatactaaatttccacaaccagatggcgttaccaccatcacatgcagaaatcgaaaagctggcgagtatcgcgctgtcatcgctcgaagcggagcgtgcgggctaa

SEQ ID NO: 168920 - DNA, 795 bp, Enterobacter cloacae
atgcttgaatcacttaaagaatacttttcctcaatcgtcaatactgctgccaacagaataactaacccagtatttggcgctttcgctatctcttggtgtgcatttaactggaaatcaatactttaccttttcctaagtgattacggcgtcttcgataaaatcaattacatttcagcaaatagtgattggaaaacagtgattgtctacccgtgcctgtcagtattagttctatgcggaggaatgccatgggtgaataatgtgatttcaaagtggcaggctaaaccactcgacaacaacgactcgattgagaacttcaggaaggcaaaactaatccttcgtgccacacgccttcaacgcctcaaggccaagcatgatgtaacatatgataaagttaagactggagctgaaaagaacattcaggagatgaaggaagagatcattcgatcaaagaacagcatgggagagttaaccgccgaactgaaagccaaagatgatgaattgagatctgcgagtgctcagctagcaggtcttaataattcattaacagaaatctcagatacgcttggaagaatgaacgaagcatataaaaatcttaaaaatgatttcgatgaatacaaacttaaataccctgcgaaacctgaattaggcacacttacttttagcaatggccaatctgttagcagttatttagaccagcatggattgaatgttcaatcaaaaggcaaaccgaatatttccaataattttggcattctaacaggattgtccggtttaagtgataaagataagaactaa

SEQ ID NO: 168921 - DNA, 237 bp, Enterobacter cloacae
atggacacgatgaagcacacctatctcggctgtgaaagcaaagaccgggtggacgtcgtgtccggcgaggtcactaccgtgcaaaccctgcgccatacgtccgagctggaagccggcgggatgtacatcttcttgtgcaaagtcgtagcctgggcgatgagcatcggctgccatctgactatcccccaatattgcgagtatcagcagttgctcgataagcataaggtaaaaacgtga

SEQ ID NO: 168922 - DNA, 369 bp, Enterobacter cloacae
atgcgcaaagttagttatacccagatgagagcagagctgtccgatattcttgatgcaatcaggaatggcgaaaccgtagttgttactcagcggggaagacctgacactgtattgaaaggctccactagttccgaacttagttacagccctattacgacaagaccttataccacgaggttaaatccctcaaacacaattatagaagtggttagagacgctcatggtcaggcttactatgttaaaaaggcaccaaatggcgaaattatcactaaggtaaaagcggacaatacgaaaatatcattcagcgatgctctaaagcttacacagacaaaacacgcaaaaatcatcaaggccttggaagataaataa

SEQ ID NO: 168923 - DNA, 408 bp, Enterobacter cloacae
atggatgacattgcctttttaacgcctgatcaggttgttgagattcaaacctcgaccttacctaatagtggcccggcagatgaagggaaactgcatggagcactatttcgtgtccagactcttgccgagtatgaaggctgtgatgatatctttgcatttgcagcgatgtacctcattgctatagccaaagcacatgcttttaatgatgcgaataagcgcactgcattccaagcaaccagcgtgtttttactgatgaatggagtcgagcttaacgcctcgttcgaactggtgaagctgacggtgcttgccgctatgggcgaggctgagttagataacacagcctttgctctacgtatcttgtctgattatcgaaatgatatcgtggcagagcatgattatttagcgtga

SEQ ID NO: 168924 - DNA, 213 bp, Enterobacter cloacae
ttgtctcgtaaaatgacaggaattgtcaaaagttttgatatgcacagtggtaaaggcctaatcatcccttcagatggtcgcaaggacgtttttctccacatttcagcctttaataacaacgaaaaagaaacgctccttcccgggattcgcgttgagttctgtcgcatcaacggactcagcggaccgatggccgcaaatgtctatctttcataa

SEQ ID NO: 168925 - DNA, 366 bp, Enterobacter cloacae
atgattaataattttatctgtgataaagaaaaaaatgaattgcattgggtatataatacacacgaagtaactatcgttatagatgatttagatctggcaatgatagatgaaaagagaaaattaatttttgtattgagtaaaccattacccttgccggtgttattaactgttttaaatattgatgggactttactttcaacatttacgcctccagaaggtgcgtctttttcttatttgacattaaacgatataaaagaggttttgattgtctgctccttttcggaaaaaataaatggttggtatgattggcattattctttagatttggataaaaaagtgataacaagaatggcgccatcttattag

SEQ ID NO: 168926 - DNA, 198 bp, Enterobacter cloacae
atgaatattcatctacgtagtaccaaagcaggtaaagtcatgactcaggaggaatggctacactcgttaaatgaatgggaagatgaaggaggcgctcctggtcatgctgatgaattcatagaagtttataagaatgatgaagaaaatgaggaaactgttccactttctggtggtaaagctcggcatatgaagtcttaa

SEQ ID NO: 168927 - DNA, 1407 bp, Enterobacter cloacae
atgattaatgtactaattgttgaagatgaacgagaatatgcaagaatattagatagcttaattggtggaaactcccatcgttattatgctgaaaattgtgaaagtgcttgtgaaattataaacgcaacatttttagatctgataatattggatcttaatatccctcttaactcaaaccctaactcaacagaaagcccaaatcatggacatactgtttttgcacacgcaagggctaaaagtccaggtacgccgattattgttctaactggttcatcagcggaagattttatcagttcgcttatcgaaggaaatactcggatcgatctctggggaaatggccgtgaaatgagtatggttgcgtttcacactaaacataaccttgacaaattccctatccttttagaaaactatttgagtgctttaagcaacctttcaaatatagagctgaataaaaacaaccttacattaactaatgaacaagatcgtctcataagaattttctcacttaaatataatggagctagagcggaagtaaataaaatatcaggtggcctatcctctgccaaagtgtttagaataaagctcacaaatggttcaggggataccatccttgactccatatgtaagataggatctagtgatataattaaatgtgaacatgtgaattatgaatcattcatttcaagattaaatcaggatgcaaccccgagaaaattagcagttatagaacatggtgcaaaagatcatgccgctgtattttacagtcttgctgatggttttacacatagtatatttgataaaattatggacagtcaaaatataagtgccatattaggtaaagtcgaaacacatcttattagatggaatgcaacctcagaggttagaatttcaattcgtgaaataagacgtttacttctagaagatgacgactttaacgatataagtatcaaacctgcttgggttgaggttctagaaaacaatagtattcaagttaaaatgggttgtgctcattgcgacctacatggttttaatatacttgtttcagaacaaaatattcctgtattgattgactacggagatatttcatcagcgccaagctgtctagaccccataacgcttgaactttgcattcattatcatccagaaagtccttttataaattcggactggccaagccttgagcaagcaaaaaatttatttaatcttgatatttatttagatgaatgcccatttccagaatatataatctcatgcagaaattggtcagaaaaaatcgtggctggtaaaagagaactcgctgctggtttttattcataccttctaaggcaattgaaatatccaaattccaataaaccccttacacttgcatttttggaagcagtcaaaaaactttatgatgaaacttaa

SEQ ID NO: 168928 - DNA, 894 bp, Enterobacter cloacae
atgttaacaagagaaactgcgcttgaattattatcttctgaatcttctcatcaaaggttcttagcagttcgcatgcttgaaaaatctgcggacagtcgtgatttaatcacacttatcagagctaagaagaatgaaaaagatgcggtagttcttaaatggattgatagagctatagaaacatgtcaaaaacaagatgtagtacaggatgtttcagtaaatgatgtcaccgacacgagtgattttttagcgattaaagcccaagcagttgaatgggttgcagggatgttgttacatgaaataggaaataagcttggattgattgcattttatgcatctcgtgatgttgctaattatgaagacagtaatacgcataaacacattgcgaatctacaacttatatttgatggtatatcaaaattgaagcagtctgcaactcaaattcaaatagaacaattcgatctacatcatttaatagttgaaatggccgagtttgaaagattgaatcattctgtggaaatcaattatgttggaattagacccttcattattgaaagtggcaaacaattaataagccttgcacttagcaatggtattagaaatgctattgagtctatgatagagatgcttggcgataacaatttcgattattcaccgcaactcacaatcatttgggaagaaactcccaaagaatattggatttcaattaatgataatggcacaggattacctcctaatatgactgcactttttaatattggcaaaagttcaaaagaagggcatgcaggctatggcttagccattgcccgtcaggcacttgaaacaatgaatgggacggttgagttatcaaactccacgactggcggcgccaaatatttaataaagtggagtaaataa

SEQ ID NO: 168929 - DNA, 633 bp, Enterobacter cloacae
atggaagttctgaaaggaagcgggattaaatataatgagatagctccatcgatcgctagttctttaagcccaagagctttattagaagcggttgataactttgatgttgaacttattactgtagtggcaaacatatcaactgaacgagccaccagactattggcacatttacgatccagtgatttatcctcacttagttctgtaacaattgaagatgatgcaacacttcaacttttagatggaaatgattataagaacataagtttgttatcaacgggacagcgctgctctgtaatactgccaattgttttagctcataatgataaaatactcatagtcgatcaacctgaagaccatattgataatgcattcataacaagcactctgataaagtcattactggcaagaggcaatgatggacaaattattttttcaactcacaacccaaacattcctgtacttggtaatgctgacaatgtaatacatcttggttctgacggcagaaatggtttcgtactctctcaaggaaatcttgaagataataaagttgtaaatgcaataacaactgtaatggaagggggtgaagaggcattttcactgagatcacaattctacagcaaaagtaagttctga

SEQ ID NO: 168930 - DNA, 3462 bp, Enterobacter cloacae
atggataattcaaaaattaacttactcgtcattgatggcgacaatatcgtacgtatttcagaactcccagcccaggccgaaggcgcgccggtacgggtgaaatcacttaaaaacggaaaatttctactggttcggggcacaaatgagcctgccccagaccatatcattgtcaaacgcgatggcgatgatttgatgatatttacgcaggagggagatgatactgcggacgttatcattgaagacttctacctacagcagggtgagctgtacggcatggcgcaagaggggagctatcacctctacgagagcagcgattcagataacgaagcattcctgctgcttgaagaaggcggtagtgacgccctgcatctcagtgaagggggaaggctggcattaccggaagtcacgtccagcgaactatcacatggaatgatggccgctggcgccgttgcggcggtgggattattgacgggtattgttgccgcgctgaatgcgggaagtagcggtaagacagcccctactcccgccgtcccttcagagatacaggcaactgatcacgtgggcattattgtaggggcgatggcatccggcgtgagcacagatgatgcacgcccggttctcgacggtaatggaacacccggaagcctgattcaggtttatgacaatggcagtctggtcgggagcacgatggttaaccctgaaggaaaatggcgctggcaacccgagaacgcattaccagaaggcgaacacgactttcagttcgcagcgctggcgagaggtaggcagagtgccaaaagccccgccctgaactttactgtggacctgactcccccggataagcccgtcaatatcagcatcaccgacggcaacgataaggatctctcctccggcggcgtgaccaacgcaaacccgttacacctcagcggcaagggtgagccgggcgataccgtgctgctttacgacggcgacaccctggtgggcaccacggtggtggatgccggcggccactggcgcgcggatatcatcctgccgtcagagggtgaccacgatctgcgggccggcttccgtgacccggcgggcaacgcgggcgcgaagagcgagccggtgacggtcgattacgacgtaaccccgcctgatgctcccggcgccattgagattgccgacggcaacgataaggatctctcctccggcggcgtgaccaatgcaaacccgttacacctcagcggcaagggtgagccgggcgataccgtgctgctttacgacggcgacaccctggtgggcaccacggtggtggacaccggcggccgctggcgcgcggatatcatcctgccgtcagagggtgaccacgatctgcgggtcggcttccgtgacccggcgggcaacgcgggcgcgaagagcgagccggtgacgatcgattacgacgtaaccccgcctgatgctcccggcgccattgagattgccgacggcaacgataaggatctctcctccggcggcgtgaccaatgcaaacccgttacacctcagcggcaagggtgaccctggagataccgtgctgctttacgacggcgacaccctggtgggcaccacggtggtggatgccggcggccactggcacgcggatatcaccctgccgtcagagggtgaccacgatctgcgggtcggcttccgtgacccggcgggcaacgcgggggcgaagagcgatccggtgacgatcgattacgatgtgaccccgcctgatgcccccggcgccattgagattgccgacgacaacggtaaggatctctcctccggcggcgtgaccaatgcaaacccgttacacctcagcggcaagggtgaccctggagataccgtgctgctttacgacggcgacaccctggtgggcaccacggtggtggatgccggcggccactggcgcgcggatatcaccctgccttcagagggtgaccacgatctgcgggtcggcttccgtgacccggcgggcaacgcgggcgcgaagagcgagccagtgacagtagactatgacatcaccagccccgatgcgcctgtaccagaggtactggaaaacagtgtcgggaaagatcttattctgcaagggctgagcaatgatggtcatgtgaatatggccgggaaaaacggcgatgcaggggatatcgtaaaattgtacgacggtaataccctgatcgggtcatccaccgtaagagcggacggtagctggagtgtagccggtgagctcattgggggagacggcaaccataacctgaaagccagcttcaccgatcctgccggtaatgaaagtgaaaaatccacgcccctcacggtggatctggacacggtcgcggaagcaccgttatttaccctcactgacaacactcccactcttacaggaagcgctggcagtgtcgagccgggcgcgctggtgactatatacaacggcacaacccccgtggcgtcgttttctgcaaatgctgacggtagctggacgtggcgtcctacgccgacactgagtgatggcaattatcagttttcggccaaacagaccgatcgcgcggggaacatcagtgctgccagcgaatggctgggctttcgcgttgccaccaccgtggatgacttcaacgatacaaccggacagggctggacctttgccaacgcatgggaaggcgtcggtttttttgacggtcaacaagttcagctttcagggggcagaaacgccggtcactctaccgctggcgatattatgtcccgaacaatgcacgttgaagcgggacacacctataacgtcagcgtcagaagcctggtctgggcgacgacaggtatcattatcgataacccttcacacttcctgacaatcacggtagacggcgtgaaggttttagataatgtgcaggtcattaatggcgtgtacggtggaagctggacagccagtaccaccggcaatgttgtgatcacgctttctgacagcaccgacaccaatggcgtcggctcgtggatcgttctggacaactttacagtcagggatcagggggtaaccgcgagcaatctcttcagcgacaacgcgctgacaaacgagccgttcagtctcgtcgaacatgtcctggcactgactgacaacatcgccagcctcgacctttccagagcggctgacctgtaccaaaccacggcgcaggaggtgcatgccatctcgctcaagggccatggacagaacctgctgaacattggtattgatgacgtactggccctgggccatgaaaatcagttcctgaacaatggcaataagcagttaatagtcaagggtgacgaaggagaccgtgtgacgctcgacaccatcgcgggtgaacacgggatagcgcactggaacgcgcaggctgatgtgatggttgagggagaggtgtatcacgtctatcaaaacggccaccatgatgtggaagtcttcatacagcagggaatacagattcagatacagtaa

SEQ ID NO: 168931 - DNA, 492 bp, Enterobacter cloacae
atggcgattccagcttacttgtggcttaaagatgatggcggtgcggatattaacggctctgtagatataatgaaccgagaaggtagtattgaaatcctcagttttggacatggattacatatccctactgatggcaatactgggaaattgacaggtacacgtattcattctccattaaccattgaaaaagaatttgattcttcatctccctatctttaccgcgcggtagcgacgggacaaacgttaaaatcggcagaaataaagtggtatcgcattaatgatgcaggaatggaggtggaatactttaacatgttactggaaagcgtaaaggttgtaggtattacgcctgtaatgcataacataaaaaatccatcgatggagaagcataatcatcttgaatcagttgagctccgctacgaaaaaattacgtggaaatattgtgacgggaatattcaattttcagacggctggaatatgagggttacagcgtga

SEQ ID NO: 168932 - DNA, 648 bp, Enterobacter cloacae
atgaaatcattcgtcagaataatttcgatcttatttcttttgggctctgttagtgcctgtgtcagtgagcaacctaatactctcaaagctccctgggacaaatggtactttgcctttactactcccaaagctttaccggcacagattacactactgaagcttttggatgtcgatggttatgcgtcgacgtatcggactattgatcagcctcgaggcaacagtgtaggtcgatggagtgagcgaaactctgctgggaatacacagttcaataaggccgatagattgccgaaaataatgatgttttgctgggattcaattattgataaaaaaacataccaatcaactttatttttctctcaaaatacatgggctaaaatggttagcccttatcctgatgtcttagaaccggggaaaaaagcatatcgacaaacaatgctaataggactagcgccggaaggaaaaatacgggtctggttaaggcaatatggccattcggatatcccattaattgataccaaaataacgactgttacaggtaaagatctcgatatgtgtaaaggggttacagggcatcctgatggatatgtttactatggagatactcctgattttattaaagataaaaagtatccttatggaaactggtga

SEQ ID NO: 168933 - DNA, 648 bp, Enterobacter cloacae
atgaaatcaatcaccacaataatttctttgttattacttgtgggttttactaacgcctgtgccagtgagcaacctaacagtctcaaaactccatgggataaatggtactttgcctttactacccccaaagctttaccggcacaggttacactattgaagcttttggatgttgatggttatgcatcgacatatcggactatcgatcagcctcaagggatcagtgtaggtaaatggagtgaacgtaactctgcggggaatacacaatttaataaagccgacagattgccgcagataatgatattttgctgggactcaatcattgataaaaaggtttatcagtccactttattctttactcaagatacatggaataagatgactaccccttatcctgatgtcttagaatctgcaaaatatgcctaccgacagacgatgctgataggcttggccccggaggggaaagtacgagtctggttaaggcaatatggccattcagatattcctttaaatgatacaagaataaagacaatttcaggggaagagctgggcatgtgcaagggtgtaacgaactttcctaatggatatgaatatagcgagggtataaagaaatttataaatgggaaaaaatatccttatgggtcatggtga

SEQ ID NO: 168934 - DNA, 1155 bp, Enterobacter cloacae
atgagctgggagcgtcagaaatcaacaatatcgactaagcctgaagaaccttcattcatcctgtggatgatgctagggattttcgcgctggtcgggtgcgtgctgttgtttgtcctgcatgccaaccaactggcagggccacttcaaacatttaatctttgggccgtcaccgcatgccctgcagttatctggtttttctttctctgtctgcgtggctggctctataacaatgcggtggacaaacacgaatttgaatccgatgaagcagaatttgcgcaacgacagtggatgggctgggctggtcgcaatatcgcagtactacacagcggtgtaatgctgcctgcaaatctgacacctcaaatttttttggcagccccaccaacgctggagcaaaacacatctctgacccaacgaatttgtctgcacgatcatgagtctcatttttttgttttggttgcagggttaaatccagctttggcaaagttgccttcagatacagtacccgtcgtcacgctgctgaccgactctcacgatgatttgccagcattgcaggatgaatttgcacatgcctggcagacagccatgcctgagcgtctggtgccacagttgaccattcttaagtcaaagtccttcctctcacttgatgagcgaattaaatcaccgacgctggatgtggatttaatcctgattcaccagacacagggaggggatgcgtatagtgatgcgctagccgtcctgctgttgacatccgatgatgtcggcacaaaatataatctttcgcttaacgcccgtcttttgcgtccaatggctcttgatatgacgatttcagaaaagtcactggatacgtttttctcgacccaaactcaggcctgcgccacagccagtattgttggcgacaatgtggaatggggaaatgcattctccggtctgcttgaagcagcacaaagttatggcggtgactggaaacctgaccaactccactggctggaaaaatatgccgggctcagcggccccttctctccatggataatggccgcagtagccagcgatatcgtgaatatacaaaaagcagactgcctgatgctgtctacagatggcgagcagaaatttatcaatacagtgcaaacagggaacagagataatgacaacaggtaa

SEQ ID NO: 168935 - DNA, 192 bp, Enterobacter cloacae
atgagcacgctaaatgccttactcagtacctgtcaggcagagcaggcaccactgcttgccaggatgatgaagcgtcaggccagttatgctgccatgagggatcgttttatcgtccggtctgctgtttttgaagtgatatcggtgattatggacatgctttttctccgaaacccggtatgccgtttgttttga

SEQ ID NO: 168936 - DNA, 261 bp, Enterobacter cloacae
gtgaaagtgcataccgtttttcgtgccaacaccagtgacgccctgttacaggcgctggagtcaggcatcgggattggcggcatgcagctgccgcttgcggcaaaggcgttgcaagccggcacgctggtgccggtattaccggcctggcggttacctgaccggtatctctatgccgtctaccccgacgcccgctttatcccacaacgcgtcagaagcgtgatacaggtgatcgaacaaatcctgccgtcgcttgccaaataa

SEQ ID NO: 168937 - DNA, 588 bp, Enterobacter cloacae
atgactaatccgaacgttaaaaaattaaatttagttaatattgttcatacctccaaagatgtccaggaaagcgttcgtcttatcaggaatgaagatcaggtaagaaaatggatgtataccgatcacgtcatttcgacagaagaacatggcaactggcttacacgcttgaatacggataatagaaatattgtttttgtggttatcgaaaacgaagagcccgtaggtgttgtgagtgtaaatgccattgataatacacatcaaaaagccgattgggcgtactatcttactgcaactgcgcggtcaggtgttggcgcagtgcttgaattttttgttattgactatgttttcaatgaactcaacctcagtaaattgaactgtgaagttattgagcacaatgatgcagttgttcggttacatgagaagtttggttttaaaaaagaaggtttcagagaatcgaacattttaaaaaatggcgaaaggctcggtgttcattatctggggttgacgaaagaaggatgggaagctatccgtcaggctttgaaagataagtattcgaagatcttctcccaatatgaagttattatctga

SEQ ID NO: 168938 - DNA, 1101 bp, Enterobacter cloacae
atgaaaatcgcttttagggtcgatgcttctctttccattggctcaggacatgttgttcgttgccttaccctcgcggatgctttaagaaaaaaaggggcacattgtgtcttcatcactaaagcacatcctgggaatctaatagaacttattaaatcacgatcgttcgacgtgtttattattcccacaggacctgattccggtgaagaatatatccaaaatgaaaaattttggctgggtggaacgcaacgcgatgatgcaatcaagtccatcgacctttgtaagtctaataactttactccggatgctatgataacggatcattactccttggatgattcgtgggaaaaaattttccaatctcatttccctgaagcaaaaataattgtaattgatgatttatgtaacaggaaacatgaatgttatcttttgattgattcaacgctggagagacaaagcgttgaatataaaccctttgtttcatcagaatgtattttattaatgggtactgactacgcgttgcttagagaagattttgctcaattgcgttctctagcctatgaaaaacgcaaaaatattgcttccccccggaaggtattaattactatgggcggcgttgatataaataatatcactggtgcgcttcttaaaaagatttctaatagtatagatacgcaaatagatctgattacggtagtcctgggcgtaagctgtccccataaagatgaaataatacgtatcgctaaagagtgtaagtttaatgttgaggtattaataaatattaataacatgcctcaggtaatgcttgaaaatgatatcgcaattggagctttaggcagtaccacttgggaaagagctgttttaggactacctacaatcaacttggccattgctgaaaatcaattagttatagttgaaaagctgatcgataaaggcttcattgtattcagcgatactgatttttctgaagaggatttatcgtgcgcctggcataagttgcaggatgaatatcaggaactggtagccaggtctttcgcgttgtgcgacggcgcaggattgcagcgcgtagttacgtctttatgtaaaatgcaggttaatatctaa

SEQ ID NO: 168939 - DNA, 705 bp, Enterobacter cloacae
atgaacgtggcaatcattcctgcgcgtggtggcagtaagcgtattccacgcaaaaatattaaagaattttgtgggaaaccaatgattgcctggtccattgaagccgctcaaaagagcggcgtctttgatcgaatcattgtttcaacagatgatgaagagattgctgaggttgcacgtgaatatggtgcggaagtgccgtttatgcgccctgccgagttatcaaatgactatgcgggaaccatcccagttattcatcatgccgctgactggatcttatctcagggtattaagccggattatgtttgttgtatatatgcaacagcgccttttatacaacctgaagatttagaaaaaggtttagaacttatcaagaaaaagaatagtgattattgtttttctgtcacgagttttccttatcccattcagcgcgcgttgaaaattagtgctgattacgaaatcagcatgttcgaccctgaacaattcaatgtccggtctcaggatttagttgaggcatggcatgatgctggccaattctactggggaaacattgaggcgtggttgatggagaaagctgttttcaaatcgcatgcaactccactgctcttacctagagaacgggtacaggacatcgatactttggaagactggcgtttggccgaaatgatgtttgagattaacagagtcaaagatgaaaatcgcttttag

SEQ ID NO: 168940 - DNA, 1155 bp, Enterobacter cloacae
atgagctgggagcgtcagaaatcaacggtatttgagaagccagaagagccttcctttgttctgtggctaatgttgggagttgttgcagttgtagggagtgtgatgctgtttgtcctgcatgctaataagctttcagggcctttacagggatttaatatttgggtcgtcacagcaagccccatagttatctggtttttcttcctttgcctgcggggttggctcttcaatagtgcatttaataagcacgagttcgaggctaatgaggctgattacgcccagcaacaatggactgaatgggccgggagaaacattgctgtgcttcatggcagtgtcatttttccggatgctctgacgccatatctttttttacaggcccctgctgagcaaatgcagcaaacaacattgacgcggcgtttacatcacccaactccagaaaactgcttttcacaactacttgaatgtgccagtgatgccctggccaaggttccagcagatttacccctcaatgcctctttgctgacggattcgcaggtagatcctctgatacttcatgacgcatttgcaaaggtctggcaggacaaagttcctttgcgacctgtccctgttttgaatatacagaccgcaaagacctttatctggctggaagagcggatcaaatcgccagcgctggatgtggagcttattctggtgcatcagactcaggggaaagagtgttatagcgacactctggcctcattgttgctgacatcagatgatgttaccactaaatatcaacttatacatgatgcctgcctgctacggccaatgttgttaaatatgggtgatatcgatgaatcactggatacgtttttctcgacgcaaactcaggcctgcgccacagccagtattgttggcgacaatgtggaatggggaaatgcattctccgatctgcttgaagcagcacaaagttatggcggtgactggaaacctgaccaactccactggctggaaaaatatgccgggctcagcggccccttctctccatggataatggccgcagtagccagcgatatcgtgaatatacaaaaagcagactgcctgatgctgtctacagatggcgagcagaaatttatcaatacagtgcaaacagggaacagagataatgacaacaggtaa

SEQ ID NO: 168941 - DNA, 267 bp, Enterobacter cloacae
atgtctaaaggtttcgtattactcggtgataaaactacacatggtggtcaggtgatttcagcatcttcgaccatgattgttaatggtaaaatggttgcactaattggggataaagttagctgtccgataattggccatggcataaactctattattgaaggttcgcctgaatggtcctcagacggtaaagcgattgctgtggatggctgccgcagtgaatgtggttgtcagctgatatccagcgcaccggattgtgtaataggataa

SEQ ID NO: 168942 - DNA, 633 bp, Enterobacter cloacae
atggtcttatgtatgcaattaacttcccctgaatttcttgttgttttttgttcgttgcttctttcattaaatgctcttgcgagtagccagtattattttgttgaggatattaagaatctcaatctgtatttatggaatggtccaaatgttaaagatcgaatgctcattggatacaatttgtcaggtggtatggatttcaatgcgaccactggggttatctgtgatggggttgataaagcaagtagttatttatggattgcaaatgttaagtctggggttaagaaaacgctgtttccatctagagatgtgtactcaagtgttgctcccatgagtaatgctattatttcttcaagtaatggccaatgtatctataccgatggacatactatttattcttacagtatgaacacccctatatctagaattatgttttccggggcagcaagcaatgcctcagagagagctcgtcgagttttctttgacgataaaaataatgtaaccattgctctttttgataagcacttttctcttttatcaaaaagcatgagtactaataagctgaaaacggtcagttttccaaaaaacataaattattcacttaaagctcttggcgactttgcctcatctttctga

SEQ ID NO: 168943 - DNA, 906 bp, Enterobacter cloacae
atgttaaacaatgaaataaaaaaaatagtcatattgctcgctttttcccttgtcgcctgtgacaactcttcagaaaaatcagagttagccagtaaattggttgacaagtcactctcaaacatgatcgctgttaaaggcggggaatttttgatgggagacttcggccctatggttggagagggtataccctttagcattcaacaggatgataaaaaattacataaagtgatacttagcggttttatgatttcaaagtataaggtgactaataaagactataatgcatatcttgaaataacaggtaaaaaacgaccacctgttagcgcttttaccaaggactatccactgcttcttggggatgactactctgcgatcgcaacctggcagcaggcaaaagattattgcttatggcttggagaacaatcaggtaaaaaagttgatttacctacagaggctcaatgggagtatgcggctcgttcagaaggtaagtatttaccttttgcaaccgacaatggaaaaattgagcatggcagaaattacccaacatatgatcaaatgcaaaaattcacgggaggattatatttaccgttttatcccattggtaaatacccaccgaatcctttaggcatttatgatatgggtttaagtggtgaagaatggacaaacgactggtatgcacgagattactatgaacattctccagtgaataaccctcagggtccagaaactggagataaaaaggttctgcgtggagctgtaggtggagatgatcagtatgctttaacaatgtttagacaatcatcttttccaattcccagacctaatttcaaaacggactcagttttcaattatgataaagatgggattctacctacctatgttttccgttgtgtagttaacaactag

SEQ ID NO: 168944 - DNA, 2256 bp, Enterobacter cloacae
atgactaaaggtacacagcaaagtagtctggataacgtgagtaaaaacactgttgtcaacggagagcatggccctcaggtttattttcatccgggcagtgcaacgctgctttgcgttgatgcaaaagataaccgcttactcatacaagaacagctgaaaatgacagcgttgctggaggaccagaaaaaagcgcagattgctctggatgaactcaatttcgaaatgttgactcaggcaggcaagcaaccacaacgtgcttatgagagcaaacttcagagtacctatcaacaactcaatgacgctaacgaaaaattaaaagcagagcttacaacgttgactgcaaaggttcctgagggggagttgcttgatgaaaactcaaaagagtcagctatcggccttatggagttgattcctcttcaaaagactgccggatttaagagtgcttatgttcgctcggataaaattcgtagtcactggcgaaaatataaacttagtgaagttgataagaaaagcggtgaagccagcttcattaaatatacagataaagaagttactggtgttgatgctaatgggaatgaaacgaaaaaaacagttcgctcgggaaagattgataccgaagagttaataaaacaattaaaagaagcgtcagtcagccttaagtttgaagatgaactattagaagacagcaatgttgttcttactgactgggcgaaaagaatgaataaagggcttacctggcccaatgaaaatgataagcccgacgatgagtctacttatcatcaatatgtcgacatcagcgcacaagctcaactgatgcgatacagccagggggcagggctgtctgctgaatttaaccctttagaaaagaaagcctccgcgaaaatggagggtcattcaagttttgcactgggtgaggcaaaagcgtccgctgaactttttattcccgatcggcttggtattgcattgttgtttcctgccaaagcaactgcgggtgtagcaggtggtgtctgtaatatgggggctattcgctacacgataaatgcggtgttgaccggtaatgccggggcaagccttgggattgaattgggtgtagaagctgattttagtggagaaatggcaaagggctatgggattaagggaagtccggcgaagctgacccctccgccacctccaggtcagagaaagattaatttgaccattccgcagccggatgttcaggctggtggagaaatcggcgcttttgctggcgtacaggcgggtggcaatgttagcggtgctattgaatggtttgatccgcaccctgatgacgataagcaaatttctcacgatagcaacaagcaaattgtgaataaagaggcaaagtttactgctattgccaaactgtcttttggagcagcggcacaggctggtgctggcggatctgcagttttttacgtaacgtatgttagtagccgcttcagaatatattgtaaggccgcactatgttggggtgtcggtgccaaagggtctttaggttttgaagttgacggtaattcatttgcggcatttatgaaaagctttatgtatatgctgagaaatgttgactaccagaaacttgaggacatgatgcagccaggctcatttcaggccttgtgcgctataccaataatactggctgccagaggtatgcaggcgggaatagatacggtttcatcgatgggcgatagggttactgatgttttaagtaccttaaacgaggcactcaacaatgaagataaacgagtaaagctaatggagagcattatcaacaatccggatcagttgaagtataccccccctgagacgaaaggctctattatagctcagctaatggatgtaaatgtgcttgatattattgatctcaaaaatcaaaaaaaagacacaaaaaaatggggtgtgatgcaattaaggaaagaagcgataatgcgttgttttacttgggtacagagtcaggctgattataacaatgtgatgcagcatatgacgaccagacctgcagaaggaaaagggagcgcagaggccaatgaaaaagcattgttagaattcctgggaatgacggagtttggctttatgggaagctattccacccaatatgagcgcaatcttcatacgctttatgaaagactccctcgcacagttgatcctgatgaaccatttaagcgaatcccagaagatgagatggttgaatatgttgccttcattaatgagtctcacaactctaattcacaaatggcgtag

SEQ ID NO: 168945 - DNA, 459 bp, Enterobacter cloacae
atgaagctgtttgcagcgaaggggaaagtcgaaatccaggcacaggatgatgcgcttgaggctattgcgaaaaaagacgtcacggtaaccagtgtggaaggcaaagtggttatcacgggtgcaacagagctgattgttaactgtgacggtgcatttatgaagctggcaggtggaaatatggagcttggggccccgggaaatattttactgaagtgtaccaatgtccaaaaaatgggaagtgcggactatgacgcacctaaaccggaacttccccaggggtatagcgagaactttgtggcacaagataaggaatctggcgatatcctggctaacacgcgatatcgaataaccactgctgatggttccgtttatgaagggcgtactgacagtgaaggtaagacggctgaaatattcggtgcggcaaaaagcaaaatcaatattgaactgctcggtggttag

SEQ ID NO: 168946 - DNA, 528 bp, Enterobacter cloacae
atgataattggtgtttatggcatatctggagttggaaagacaaccttttctaaaaaattacaggaaagatacccgtgtgtgtcaagatttagtgcttcagagctaatagctaaatttaatggggtaatagattatgataatcttgagtgcgattctgtaattgaaaatcagcttaagttaataaaggctatggagattatatctaatgaaaaaaactataaaaatgttgtgattgagctccataatgttatagagacaaaagaaggattaattttcattgatgatcactatctcaagaggctagggttagataagtcattttttttaaaaaaggatccaaagttgatatattcaaataggatggctgatgtgaaaaaaaggcattctgctaatgtgaatgagattgataatattcaaaataagtcattagatcgttttattgagctatacaataatgtaggcgagagtatcatttctggggtagatgaagatataagttctttttctgaattgtttggtaagtgctaa

SEQ ID NO: 168947 - DNA, 1254 bp, Enterobacter cloacae
atggcaaaaagtttagcagtttggataggcaaatccaacgatacgccggctaaaacacgtactaacaatgaaagcgtcagcgaagcagaagaagcagaagcagaagcagaagcagcgacaatggaagcagatgcttttcaatctaacgcaacagttcggggactagagctacactttaactactgggtgttaaatgataaaaacttaaacaggaaaaagcccctcccgcaagataacacttggcttggccccttcaaaataatattttgggcaatccactttttatgtgttttttttaaatggctaattagttttgcaaaagaaagagagaccacgacttatctcgatgttggagtcagattttctaaagtagaaagcagtgaaactattaatatatttttccctttcaaaatatctcctcaagactacgatagccagttgggactcaaagttgctaacgatgttcttttgctttctgcaatatttaacactgaagtagagtctattgaatttagagacaatctttatcatcattcagatattacttttttaagcgctgagaggaagagtaaaaaaggagttcggttttatacaaatatagacttacaagtaagtgaaaataacccgctaggtgcaggtgtcaaactacatgaagtagttgatgaaggtagcatattatctttccctgttaagaattttatattagatgatacctttaaagatggttattttagattcaggcttattcttaacactttaagtaaaaaagctctttcaacttattatgtaccgtctgacagtttcatgcttactacagaagaagcaatggaaataatagacttcagagttaatgaaatacgcaatacgccagaaaatgttaacgccttactaacccctagcaacattcttaaaaaagttcatttttttatcatcagagaagtaaagtccgagtatgttatgtccgatactagctatacaaggagtaggcttcttgagggcgacttatggaaaaagtatcttcagtcatatcatacaaagcctataaaaagcgtacctaagatgctgatttaccattggaaatcaaccaatgaagacaaaaaggaacaccttgaaaatttctctgcttttgccaaatttaagcatacgaggcgctcagcatggatcatactgaggagcatactgatcggcttggttttcagcatatttgcaaattggctgtacgactttctcaaagacttgcttaaatcttcatga

SEQ ID NO: 168948 - DNA, 477 bp, Enterobacter cloacae
atgaatacagctaagcgtttgttgcttaacgaaaaatgtccagtatatgaaattactactaccgccgagttcagcaagcataatgttagggattttttaaagcaggtcgaagctcactaccctaacttcaggtcatggctggatttcacctttgctcgtcagttagtcgacggcaatcgtaaggcgttaatagttaaagataaaaatgaaatagttgggatctctcttcttaaaaaaaatcaagaagagaacaagatttgtactttctatgttgctccacaacatagaggaaagggcatcggcaaaatgctgatggaagagtcgctttcttatcttgaaagtgaggcgcatatcaccgtttgcgaagagcgctgggctgaaatgcgtcctttcttagaaaagtacagtttcaaactggatattgagttgcctaatttttatcgcgatggtcgtactgagtacttttgcagccgataa

SEQ ID NO: 168949 - DNA, 789 bp, Enterobacter cloacae
atgagtggcggtgttgtagagtcagtaaagcaggtattagaagaaagaataaaaaacccgctttggggttttataataatagcgtggttttggtttaactggcctaacttggcaatgctgtttatgagtgatgcccctgtaaaattcaggatcgattatattttatcgcagcaatatttctatcttcatttcttagctgctcctattgtctctggaggatgtttggctattgttactccatatgctcaatggttactttctaaggctcataagtgggcagaagatagacatcgttataatgtatttcttagtagatcggcagattatgaagattcaaaaaaattgtccaaactcaaagttcaagctgaccgagctgttgaggctgaaaacgcgaaaattgatgctgacataatggcagaaatagaacgtggtaaaagggaatcgttggtaacagaagagcttgaggcctccaagcaatctatgattgttgaaatggataatttgaaacaatctatcttattgttaaagaaagacagtgataaaattcaagatttaattattgaatctctatccgtgatggagaagtttttcaaagttaataatagtggctctattcaacagttaagagaagaggttgaaaaactctattcggcaagcgggattgagatatcaataattagaaataatttaaagaatggagttgagttaaatgagcaacaaaatatggtgttattagatagggcagctgaggcattgagaaatagacggcaaactcgtttggatgattga

SEQ ID NO: 168950 - DNA, 540 bp, Enterobacter cloacae
atgagtgaaaatagacctgaaagtataattgttctaatttcagaagtatggcggcggattaaattgatccgctcaaatcactttttttacatttattttattctaatcattgttcttgcaggcacttttggaatttggtgtgtgattttctcctcaggagaaccactgtgggcaagactgctaaataacatgaacacaataaatcttgtttcgttttcggttccattattggctacaacagtatttgacaaaataatggcagaaaaagccagtgaacagcttgaggcggatagtatccctgtacagcgatggttaaaattaggttcgatttttatttttttcaccattgcaattttttatgggatcggtgctagtagcgaatctgtattttcatgttggtcattcgcagcttggtttttatccctattctattgggctttatctaacattgaaaatcctagttattcaatgaatattgatcctaaatcatcgtcaggtggttctgagatcggttctgttgacagtttaaggagggggtga

SEQ ID NO: 168951 - DNA, 789 bp, Enterobacter cloacae
atgagtttttatacaggaaaaactataaaagttagacagccatttggtgatttttatatcgcatcaattcctgccaaactattaattcaggtatgttactcattcgcagcccagtatggtaatgaagtattaacaggagtacagcgaggaattaacgaaaatagagtgaagacaatagctcatttttgtacgacaaatgatgcaatgtttccaacttccattatattatctgctaatttagatgcgaatggagaaacagtaagtagcccttggtatatagattctgattctaacctaataattccatcatcagaaaaaaatgcatcgattgtggatggacaacataggatagaaggattaaaaaaagcaatcgaaagcggtgaacttactgctgatttcgatcttgtatgtgctatttactttgagctgccagcacctaagcaagcagaagtattcgctacaataaacttcaaccaacaaaaagttgacaaaagccttgcttatcaattatttgggtatgatcttgattctattgatagtgagttttggtctcctgatactttagctatttatttgacgagactgctagacaaagaagataattcccctttaaaagggagaattgattttggcatgaaaaaattagatcttagccatcaaaacaaaaactctatcgataacgattggtatatttcaacatctacgatcgttcaaggtattacctctttaatctctacaaatgctgtctcttatacacatctgacgctgccgacgatactccttgtgtag

SEQ ID NO: 168952 - DNA, 1008 bp, Enterobacter cloacae
  misc_feature (7)..(16): n is a, c, g, or t
atgccgnnnnnnnnnnctttaattgaagatgaaatgaatgacattaataacacattaaaaagtgaggataaacggttaattattacttttgaccaactagataatatagtaaaaccattcttatggaatgatgtaatttcgcctcttgttaaaattgcaatgcgtttttcttacgaaaacatacatccaaaactgtttttaaggagagatttatatcaaagacttggtaacctaacaaataaaaactcttttactccgcgtattatagacctagagtggtcacagaatgaaatcttctcatattttttaaagattgtattcaactactcgaaggataatttcttctcattcctatcggacaacttaccaagttcaacattagtacagcaaatccataggaaattaaaaacgaaaggcataatccataaccaactcccgttagataaatatcttatccagccagttataaatgctttctttggggctcctagacctaaaaataacggtagactaagcactgcgtatgaagatttattccggaatattcaaagtgcagacaaaacagtaaaccttcgaccatttattgatcttttgacaaatgccattagagaacaggatgaacaagacatcgagaaacaataccgtaaaaattccattatagggttagcttactgcacgagtaaacaagttcgaaaaaatgcagttgtaaaatatctcgaagatttatggaacgaaaaaggtaatgagttcgttaaatgtttctgtttagatttatccaataataaagtaagtcctggcttcaaaaggaatgtactcaatgagagtagttttgacagacttctagaagagattaagaaaaatcacgatgatgacgatatcattaagactggaactctctcagaatttaagcaggttttgattgcaaataaaattataacaccatatatggtcggtagcaaaacaagatatgggtttgcttacttatacaccaactactttggtatttaa

SEQ ID NO: 168953 - DNA, 942 bp, Enterobacter cloacae
atgaagaataaaatcgacgttagtgtcattatcccggcttacaacgccgttgagaccattggtaatctggttaataaaatcctcagcgaaacccacgtagctattgaacttatcgttgttgacgacggttctaccgatggtaccggcaacattatccgtcaaatccacgatgaccggctcattctcattgagcaggccaatcaaggtgtctatgctgcccgaaatactgctctagccttgcaccagggagagtgggttatattccttgatgcggacgacgatatagcagatgggttcattgaaaaaagatggcaagcagctagtgcgtcgcagaccgacgtcatgatcttcaatggctggcattctgatgctgaccaccaccatcgaagagcagtccatcgaaagcagccatatggggcgcccctgtcaggtcatgagtggataaggcactgtgtaacacgccacgaatggccacattacctgtggctgcaaatggtcaggtcatcttatgtcaggcagcattcactgcgcttccagcccggcaggagccataaagacattctttggacggttcatcttgcggtgagcaatggtcagttctgcatattggatgttaaggattatatttatttcagcaatacagcctctatcacacatcgaccggattactacgatgttcgggcaatgagctatgttgaggtaatcgcggaaatcatccgcttggcgggactgggtcaaaacaaaaaaataaacgtgtttttatacaggcatgcactggtggagtctcgtcactttttggggctgtatcggaaacgagtccataaaaaattggatgtgataacattcttcaaagcgaatatacccaccactattttattaaaaggaatcagtaacgtcagtgatatatttttctttatcaaactaatggctaaactattctga

SEQ ID NO: 168954 - DNA, 306 bp, Enterobacter cloacae
gtgctcttcgccgcgcttgtcctccatccgcagtttattcaggccagctgtgcggataacgttacgcgtgctgttggcttcagtgacgtggtcaacgtggcgggagtcatgcattgcgtgcgctatataaggacggtccggatcgccttcgtggaatgcaatggcaacttcagtgccctgtatcagcgggaagtggaagccgtatttgtcaccgccgtaaggtttcgcaaaacgtaccggcatgctttccatgccctgacgcttgtcgtcacggtcagcatcaaatttcacccggtacatgcctga

SEQ ID NO: 168955 - DNA, 270 bp, Enterobacter cloacae
atgttgtgttatgtaaggagatgtatatacatcttcatatatgacaccaaccggaaacctattgttatcataaactttgcgtttagccacccgcgcccacgcaaaattaggcatccgagccaaattttcgcgaccagcatactcaattggaacatgttcgacacattgagcgagttctttcaaatcattgctattaaaaaactttatgaaattaaaatagactacatccgcatcattcaatttcaaggcgttattaagtacttcaattaa

SEQ ID NO: 168956 - DNA, 252 bp, Enterobacter cloacae
atgtatggtgattacgatacgatgcgcaaactggcgagcctggtcattgttatcgatcctgaaaaactgggtaatccgctttttgccgccaccataaaaataatgcgggatgaactccgggcggttaaaccggttcctggcgttgaaaaggtcctggcgcctaacgatcctcaggtacgttataaagagaaatgccagcgcgaaggcattccagttgtggaaagtatttatcaatatttatctgcgttgtga

SEQ ID NO: 168957 - DNA, 219 bp, Enterobacter cloacae
atgcatattggttctggtcttcgtgtggcgttcaacaatgcggtcacactctttggcccagcttgcgacatcttcacgcaaggtggcgttctgaacagccagttccttaccaccaaccagaccaactatgcgttcaatcagtctcgtttcacggcgaaaggggtgcgctgggtaggtggactttgggcagagtatgtcgctaaggggcaaattgcgtga

SEQ ID NO: 168958 - DNA, 129 bp, Enterobacter cloacae
atgaggataagaaacctcctgagcctcgatcaacaatccaatatttacctgggggaattgggcctgcaccttgtattgcgccacaagttccttgattacggtaagttccctgtccggaatgcgccataa

SEQ ID NO: 168959 - DNA, 858 bp, Enterobacter cloacae
atgatttggattgaccttgagcacaagcaacccaccgataccgacattccgaattggacaccgtggacacaagtgcgatgggaggcctggttggcgaaatcagctcaactggtgacagatttggcagctctagatgaggcgggaaagcgtgatgaacgcaacgcactgattgacgccaatagtgctcactggggagctttgaaggaatggctgctagccttgtcggccggtaaatgttggttctcagaggtacgcgagctttactcgcattacgacgtagagcattttcgacctaagaaggaagctaaggctctggataccaccctacgtgatggttattggtggctagctttcgattacatgaattttcgcgcctgtggcaatgttggtaaccgcaaaaaagggggctggtttccactcaaggatggttctctttgttctacttattcagcaccctgtgaagaatctgaaacacgctatctgcttgacccgattgatgacaatgacgttgcgctgatcgccttcgacgaagaaggcaaggtcattcccataccgggctcttctgagtgggagcaggagcgtgtcaacgagacggtaaagcgccttaaactcaatgaacatgtaccattagcagaagcacgtcgcaaagtatggcaacaagtggatcggctgattgacgattttgccaaggccaaagcccgctgctgtgctggtaataacccagccgctaaggcgaaactaaccgagattcgagcgcgtgcccgcgaaatgaccaaccctacagcagagctatctgcggtcgctcgttggtgcttgttaatgcgcaacgatccacagctttccagattggtggggtaa

SEQ ID NO: 168960 - DNA, 1752 bp, Enterobacter cloacae
atgcaactgttgcgcatctgcatccccaactttcgcaatctacgtggtctcgatattgccttcgcgacgcatttgtcagccgctttaggcgcgccagctgatgctcaaccaaagccgatccgcagccacgccctgattggccagaacgggaccggcaagtccaacttgatcgaagcgctgatcaccatcttccgtgatgtcgacctggatcgtgaagctgcgttcgattacacactggaatacagcattcgtgatcatgttgtacgcattgaagcggatacggtcacacaaaagcgcccttacgtgtgggtcgacggcaaagctgaaacgcagggctatttgctgaaaaatcgcgagctgctacccacacatatctttgcttattactcgggccgcaacgagcgcattgaggccttgtttcaagagcatcaacgccgcttcaacctacgacaggaaatcaccaccgacgaggtgctttcagagcagctgttggaaaactttaccggatctgaggcggatatccgcgcggtggaggaagccaaacgccgccgagaatcacgactgaaacaagcaggcgacgaccgcctgcgccgtctgttctactgccgtggtggccatagccagttggtgctgctggcctgcttgctctccgatgaccaggtgtttcagaaggtactgaaaaacctgcacattgaatcactggaatcggctttatttgtactgaaagagccacatcgtctgcgcgaaaaacgccgcagcggcaagttcgacgagcaggaactgatcgagggcgatccacgcttctggtattcccgtggcaatgtggtaagcgagttcctcgacaagctctggcaagtatcttgggctccgattgaacaggaggcaactaagcaaattgacttccgtggccgtagcgaaaaacaaaagcagctgtatctgttcgtgccgaatcaggacaagctcaaacagttgggcgagcttgtcggcagcactgatagtttcttccgctatgccgagggcgcttacatcggtgacttgatcgacgaggtgcgcattacggtcaagaagcgcgatgaatatggcggaaaggtgagtttcacccagctctctgaaggcgagctacagatgctcaccgtgctgggcctgatgcgcataacccgagaggaccactgccttttcctgctcgatgagccggatacccacttgaaccctatctggaagctgcgctacttcgacgatatcgaaggtgtgttggcctctgatgaaggtgcactggtacagggcgagtcgcaaatcctcatcaccactcacgacccgatgatgattggcagcctcaagcgcgagcaggtgcatattctgcgacgcgacaagggacgctctatcgtggatacgcctgatgaacatccgcaaggtatgggagtaaccgggctgctcaagagcgagttgtttggcctctcgtccacgctggatattgaaactgagcgacgccttttccggcgcaatgagctgttcgtaaaatcaccacgctccccagaggaagatacagagctatcacgactttccactgaattggccgatttgggtttttctactgccgattttcgcgatccggactacgcgctattcgtgcgcaaaatggcacagcatcgtcgtttccgcaagcctacgctcacgcccgaggagcaagccgagcaggacgccattgccgattcgattattgatgaaattttgcgtgaggaagaggaccaatga

SEQ ID NO: 168961 - DNA, 1974 bp, Enterobacter cloacae
atggatgcgcagcagtttttggcagagtttgggcatattgcgaatgcgccaggtggtgtggagcggttgcgggaattggtactccaccttgctgtatctggcaatctgatagttacggaatcaccagttgatgctgcacccttactcgactctattgtgaagcagaaacaagttcatactgaaaagaaaagaatcattgcgaagcagccttctatttcgcgtaccgttgtcaaagccccgccccactgggctatttgccgcttaggtgatttggcactgactatcactggtggtggaacaccgtcaaaaaatcacacagcttattggggaggcaaaatcccttgggcaagcgtgaaggacatgaaggatcataagttcctggatgagacagaggatcacatcacagaagaaggactaaagaacagctcttcaaatctgattccaccaggacgagttattgtttgcacacgcatgggacttggtaaggttgcgatcaaccgtgttgcaatcgctattaatcaagacctgaaagcattggaattgccgaaagaagtgaacgccgatttcttcttgatcttgtatcgaacccgtgaggtaaagggcacaggaacgacagtttctggtatcaagcagaatcagttgttggcgttgcccgctgcgttgccaccactccaagagcaatcccgtatcgtcgccaaagtcgatgaactgatggccttatgcgacaaactggaggaacaacagcaagcccgccgcaaaatgcaaaacgccctgcgccaatccaccctccaagccatcgccagcgccaccagtccgcacgaactgcaagccacgtggacacgcctggccgacaacttcgcgaggctgtttcatgcaccggaggatgtagcagatttcaagggtttggttctcgatttggctgtgagtggcgagttgctgaatattaagaatcgccatgcttctaccggagcggagttgcttgattcaatttctgctaagcgcatcgaatggtcaaaaaaatcagacgggcaagagaaaaaagaagcgttggcaatgctaaggaagctacgtacccagcagatctccatccccgaagctgccttaccagaacattgggaatgggcatcgctccttcaagtgtcgcaagcagtcgttgattgccacaacaagaccgctccatatgtcagcgaaggcattcacctcattcgaacgacagacattcgtaacggccggatgcatttatcgaacacacggaagatttcggaagaaacttatgcctattgggcaaggcgcatgccaccaaagagtggcgatattttcttcacgcgcgaggccccaatgggggaagcggcaattgttcctgaaggggaaagagtatgtctcggccagcgttcaatgctgattcggcttttcccagtgctattcagcaatcgatttcttctgtacgtgattcaaagcccgagttttcaaacacgcatgaccgaagccgctattggcatgacggtcaagcatctgcgagttggtgacgttgaggatctccctattccggtaccgccaaaggctgagcaggatcaaattgttgccattgtcgatgctctttttagtatgtgtgatctttacgcggagcagcttgctcgaaagcagcgtattgcaaccaatcttgcgaccagcgcgatttccagcctcactggcatcgccattgaacaaggagaggaccccatgaaagccccgcaaaccgaattgattgccccgctgtgcttgggcacagcgcctgaccttaaagcgcaagcgccgctggccacaattctggcccggcacagcggcaaaatgagagccaaggatttgtggcaacgcttcggcggcgagatcgatactttttatgcgcaactgaaaatcgaggtggcgcacggctggattctggagccagcccctgccgaaatgcgcgagaagcctaccaacatagtgagagcctga

SEQ ID NO: 168962 - DNA, 1779 bp, Enterobacter cloacae
atgaatctcagcagtaccatcaaatccattcaggacatcatgcgcaaggacgacggcgtcgacggcgacgcccaacgccttggccaactcacctggatgctcttcctcaaagtattcgatcaacgagaagaagagtgggaagatgataaccagcaatatcaatcaccgctgcccgagcgctaccgctggcgtaactgggctgcttatattgttgacgctgacggcaaaaagaagccgcagatcgccgcgagcgacttggtgcccttcgttaacaacgaactttttcctgctctgaaagaacaaatcgacgccagccagagcccacagcacaaggtcctcaaacaggtttttgaagacgccaacaacttcatgaaatccggcccgcaaatgctggccgtgatcgaaaaattggaagacgccatcaacttccacgatttcaaaacccgcgccaacctaggcgatgtttacgaacagatgctcaacgacttgcgcggtgcaggcaatgccggtgagttttacaccccgcgcgccatcaccgccttcatggccgatcgcgttaatccacgtctggataaacgcgaaagcgtgatggacccggcatgtggcaccggcggcttcttgaccgccgccatcgaccatttccgccatcagctcagtaccaagtccagcgccgaagacaagcacgccattgaaaacttgatccacggcatcgagaaaaaacagctgccccatctgctgtgcaccaccaatatgctgctgcacggcatcgacgtacccagccagatcgaacacaaaaacaccttggccatcggctggaacgaatggagcgctaacgacaaggtcgattgcatcatcaccaacccaccttttggcggctatgaagacgatggagtgggcagcgattacccggctgatctgcgcacccgcgaaaccgccgacatgttcatggcgctcatcatcaaaaaactgctgaaagaaaatggccgcgccgccgtggtgctacccgatggctttttgtttggcgatggcatcaaaggcacactgaaaaaaatgctgctgcgtgattgcaaactacacactatcatccgtctgcccaaaggcgtgttcgccccctacactaccatcaagaccaacctgttgttcttcaccaaaggcagcaccgtggatgacggcaccgagcacttccacaccgataccatctggttctacgagcacccttaccctgcaggctacaaaagctattccaaaactaagcccatccggcttgaagaattcaagcctgagcaggaatggtggggcaacgagtccaatgattttgccgagcgagtggagaacgaattcgcctggaaggtggatttcaaaaccaagcgcgaacaagccgaagccgccgcacaaccgcactggcaacgcgcggaagatctgaataaccaggttgccgccttggaaggtaaggctcgcgacctgcgcaacagtttggtaggcagcaccaatgccgttcaccgcgaaaaaatcgacgcccagattgccgaactgcgcgcccaggccgaacctttgcgcctgcaagcgcgggatgcgcaggcggcgggggatcgcctctactggccgatcttcaaccttgatttgaaaaatcccaacgtacaggaagaagaaacacacgacccagttctgctgctggagaagtacaaaaaactactgggcgagattgaagaaactgaaaaccagctcaagagcgaactggcagcagcgctggcgcatcactttgtgggtgaggacgcctga

SEQ ID NO: 168963 - DNA, 258 bp, Enterobacter cloacae
atggccaaaaccatcgtattttgtgatgaccaagaccacgccgagcgtatgcgccaagaagcgctactcgataaattcgccgaccacggcgtgcaggatattgaagatgccaaagcgctggaactaccaccgtttgaccagttcggcagtaaaacccaaatccggcgcggcatattcggcagcgtcgagcaatacaccgaagccctgcaagagcaggaacaagcactctacgaccaaaaagaattgaaacaggcctga

SEQ ID NO: 168964 - DNA, 234 bp, Enterobacter cloacae
atgtcgaaagaagctgttttcacgatgaaactggagcctgagttgcgtgccgagtttatggctgaagccgccagtgaggatcggccagcatctcagatcatgcgcgagctgatgcggggctatatcgctcagcgccgccgagcccgcgaatataacaatcattcgcgccaccgaattgaagatcgccgtccctcaacgtactccgatccaggccagtcgaatgggcgcaaatag

SEQ ID NO: 168965 - DNA, 225 bp, Enterobacter cloacae
atggcgttggaataccataacgaagagtcttttttcatcactgaggaagtggaggccggactgatcgcggccgggcatttgtttgagctacagccgattgtctgcgctgaccgacttcacgatgtgctggagcgcataactgatgccatgttgtcactgcagccgggcgagatcgctgacgaagatcgcaagcaacggcagaacaagccatgttcagctagctaa

SEQ ID NO: 168966 - DNA, 1281 bp, Enterobacter cloacae
atggcgattaacggagagaacggtgttagtgcagtcaccgtggatgaactactcaagcaaggccttcggataccaaactatcaacgcccatacagttgggatgtatcgactgctctacaactggtggatgatatcagcgaagctcttcgagataccgaacgaaaagatattccctatgttttgggtgcaatcattcttcacgatgatggtgagtatctcaatgtagtcgacgggcagcagcgcctgctgactttgcgaatgattcttgcggccttagatccgataaatcatcaaatttcgatgtctggtaacagcgaaactcctgtctccctagtttggatagagcttcaaaggcgcctgtcgcagttggaagataaaaaagagtttttggattttatctgtcacaaatgtcagttggtgcgtattgtgacggacgatattgatgaggcatttcgtgtctttgattcccagaactatcgcggcaaaccgcttgcccctcacgacttgctcaaagcacaccacctgcgcgaaatgcacgatgagtccgctgctatgaaagtggctgtcgttgaggcttgggaagccgtaaacgatgaggatctggacaggcttttttctacttttttataccggatatccaagtggtcacgaggcgaaagctcgctcgaatttactattcgggacatcggcatgttcaagggcatttcatcacgatcccacaggtcattttcgccaaatctgcgatatcaccttgcagcacaagccgctatgccacttctaagtgcatggtcggtatcctctacacatgatgcacgaaatgccgggcgcagccgctttcagcttgatgccccgataatcgcaggacgctcatttttcgagatggtgacattcatgcttgacgaattgaagatactggaacaagaggttattgacagaggtttcaaaaactttggcccatctcaaagtcgctaccgctacgtgtacgaattgttcattgccgcgctgctttgctatacaaacaagtttggcgatgaagatgtagatgaagtgcgaaataggttattcgcatgggcatatgccttgcgggtcgagttacttcgtgtgcaatttgtatctgctgacaaccgagcgcgaggtaaaaacgatgcaaataaatcgccttttgttttgctacgtaatgcgatgactggaagtgttgtccgcaaacttccaataacaagtaagccatacagcgataaccacgaaaaggaactcgttgcttttatcaaggggctgcaatga

SEQ ID NO: 168967 - DNA, 1953 bp, Enterobacter cloacae
atgagcaagaaggagttgaaacctgaactgttaacagtaggcaagttattcactgacaattatctgattcctatttatcaacggaactatgcttggcgggccgaacagattgagcaacttattagcgatattcaagactcggtggtagggggccaggacaactattttcttgggaaccttgttgtaatcaagcggggtagagaggatgagttcgaggtcatagatggacaacaacgacttacaaccctctatctgcttcttaccttcctggagcaagacggtgagggtgagaagccgtcggttggccatgcaggccacttgcaatatgagtcgcgcgcacgggcaactgaggccctgctgcgagtagcacaggaggcggctaaggagcacgttcgaccgcagggctccacgagtaatgcagatgctggcattcatgaaagctacagcatcatcaatcagttcttcaaacaaaatgaaaaccttaatcgctcacgcgaaaaattctccgatttcttgctaacgaaggtgactgtcgtccgtgcctcgctgccacccaataccgacctcaatcgctacttcgagatcatgaacactcgtgggcagcaactcaagcaggttgatattgttaaggctcgcctgatgagcaaactgcccaatcaatatgaacgcgaatgctttgcgtgggtttgggattcctgtgctgacatggattcttatgtccagatgtctctgacccgtggtgacacaagtttgcgaaacaaagtatttggtgatgaatggtcctggctggaggtgaccagcttctcttcgctaatggaaagtcgtccgcaatccggcatcaattcatcaaggcaatcctccgaaggggtatcgttgtccttggatgaggcgttgtcaaaatacgctaaagagctcgagtcaaattccactgaagacgagggcaacgagcggtttcgttcaactattgagtttccggcctttctgctacacgttctaagaattatgaaaggcgatgaggtcgaagacgaaggcctgcttgacgacaagcgcctcatcaagtcatttgacgacgccgtaaataatgtacccgatgctaaagccgattgggtgcgtagttttgcatttatgcttctcaagtgccgcaacctcttcgatggcttcatcttgaagcgtcaattcacggcaaacatcggtgacgatggcgattggtctctccagcgactgaaaaaaggaggcggggacaagaagccaaccccgacgtacatccatgttttctcggccagcaatggaagcttagaggaggacgggagtgctgacccacatacccgagatgtattgctgcttcagtccatgcttcggattacctacacttctccgcgaacgatgcactggattaccaaagttcttcgctggctctccgttaaagcccctcgagacgtgaaacatgcggatcttgccgatttgttgaagggatatgcccgcagcaaggttaaagagacattctcctttgagaaagatcagcaaccacaagggtttggtatcagccgtatcgtcttttcgtatctcgactatcttctgttgagtgactcctcaaaacgagatttcaaatttcagttcagaacttccattgagcacttctatccacagcatcctgacaaagaacagtcgggcgcggttgtttcaggttctagccttaacctgcttggcaacctcgcgctcgtaagcgtcagcgcgaactcaaaattcagcaatagcctccccagagcaaaggccgaaaacttcaaggatacaattgaacttcaaagtcccaagctcaagagaatggcggaaatcacccgaaatacaaactgggacgatcagcagataacagcacatcatgaagcgatggtgacattgcttcgtgatgatgtaagtctggtggaggcaagcggaagatccaacccagggcgttga

SEQ ID NO: 168968 - DNA, 231 bp, Enterobacter cloacae
atgagtaagaataacggcggtccggcattcccggtcgcaggtagtgagcacaattatcctatcgagggcatgacgctacgcgattacttcgcggcgaatttgatgcctgctgtcattggcacattaaacggccctgtaacctgcgaacactgtccgggggatttcgattactacgctgtttgtgcgtatcagatggcagacgccatgctccgtgcccgggaggcatcatga

SEQ ID NO: 168969 - DNA, 612 bp, Enterobacter cloacae
atgaatatgaaaactgaaaaaatcgtgatgatggacagcgatgaagcggccagcatccagactataaccggctgggtggaccgccacggccgtttctggggtaaaggtgaacaccaggcgcgttggtgtggcgctactcatcgcaagtgtaaaaacaaacctgatgagcatcctattcatagcactcatggctattgcgaagaatgccaccgcgaaagccaccaggcgaagttcgccacctatgaacgcgcggtatgggccggagagccgctcgttatctttgatgatgaccagtactttttcgatgctgaatcgctggccgactattgctatgagcactccctgctgccgagcgagttgcagttaatgatctgcgaacctaactacccgccggagttcgaccttgagcagcactgcgaagagatcatgcctgatggctatgactattactgtttgccgcaagctgtgcgcgatgctgctgaggcgctgaataaggcgctgaaagaaagtgatccagtatcgtggagcgccagcaaccgtgtggcaatcgtctctgacgacatgctcaacgacgagcaaaaggccgaaattatggcggagcgagccgcatga

SEQ ID NO: 168970 - DNA, 582 bp, Enterobacter cloacae
atgtgtgaagtggaagagttgagaagaacctgtgatattgctggatccttactactcaaaagccctgaacaagagcttattgactggataaagcaatgtacagggcaaaaccttgcgattaaagaatgtcagcaggcgttttatgactatttctgcttcccacaatctggtttgttttgtccaccctataatcatgtctttagtaatggcttacgtcatggagacatctggcaatttcctgcagcaagctttgatgggggagcagaagaagaggatttctatcaaaaattcaattttgctccctctatgcttaacatcaaattgccgatggtacataaacatgttcctggtgaccattttggtgtggaattgctttttataagttgtgtgctgacaaataaaaatttaaacacccccgagacctggagtattttaaagggatttatatgtgcacacttacctgctctacaggggtatacccatttattaggcagccaaactgaaccctatattaaagtcgtagctgaatgtctggaggagtgcttgtcaggacttgattatttactttcgattgattcttga

SEQ ID NO: 168971 - DNA, 3027 bp, Enterobacter cloacae; identical to SEQ ID NO: 78827

SEQ ID NO: 168972 - DNA, 1008 bp, Enterobacter cloacae
atgatgacgaccattttaaatattgcacatcaatctccatttggcttgctttttattaattactcgctattgttaggtgcatcaggaggtctcgctgttatctggtccttccttaactgggggagtcagtcaaagactaaccttttacctgtggcattggcttttgcattagcatttggaggcatattaaatgtattagcagaggtacagcaacccggccggttaatttatggatttatatatggttgggaacactggtacggttcaataataaaatatggtgtactgattttacccctgttttgcctgttactaatcctgcaactcacgccattaaagctgtctgttttcgttgataaattaacgaaaatccttcttataggaactgggatatttttagggatgtactctggaatattcatgactaatgagcatggtattgcactctggaataccccactgtctgcagtcttaatgttacttagtggactttatactggattcatagcctacagtttagtttctaaacatactaatgaacaaccggcagtaatttcatcttattgcgggcttggtgtgatgcttattactatgtttattttattgctattcacatggtgggggcatgtctttgcgggagaaactatcagcacctcctttggtttacttgattctaactatttagcaacgcagataattactgtgggagcgttggttttagcttgcgttatgattgctgtaattagatctaaaaataaaatccactacataattatcattattctatctgctatctctgcctggggtgttcgttttcttttgttggttggggggcagggaacgagtcgtagcagcgccggagtctttacttatcaccctgaaccaaaagaatatttatattcttttggtagtatatttttcatggcaggtattcttgctttagtcatattgttttatgagaatttccaacacaaatatccggcacatacaggaggagaaattaaatga

SEQ ID NO: 168973 - DNA, 771 bp, Enterobacter cloacae
atgaataccgatgatgacgactatccaaaagattcccaaaaacggaaacttatatctacattagccattgcgactggagctgcgcttgttatagctcctactcaggcagcccccagacttactgaaaaaaaacagcactggtgtatggtcatagatctgcgtaaatgcgtgggttgtcaggcatgtactgtcagttgcaaaatcgagaatcacgcaccgccggggcaattcagaacctgggtcgccgatattgaagttggtcaatatccaaaaaccaaaagacagtttcttccgcgtctatgtaaccattgtgaaaaccctagctgtgtccctgtttgtccaacaggtgctacgtttaaacgcaatgatggcattgttcttatcaatcaggatatttgttggggctgtggtgcctgtgttactgcctgcccttatgatgctcgttttattaatactgaaaccaaaacagctgataaatgtaccttttgcgcgcatcgcatagaacaggggctcgtcccagcctgtgtcgaaacttgtgtcggtgcagcaagggtttttggtgatctgaatgacaaagaaagtgaagtgcataaattatattcagagcatataacaaatgttttgaatccagcaacgggtaacaagcctcaggtattttatattgggttaaacaatgaaatgactgtaggagaagaaataaaaagtaagacttggacgaaagagttttctgatgttttcgatcaggaactcccctgggtaaatcaggagtaa

SEQ ID NO: 168974 - DNA, 498 bp, Enterobacter cloacae; identical to SEQ ID NO: 78819

SEQ ID NO: 168975 - DNA, 1224 bp, Enterobacter cloacae; identical to SEQ ID NO: 78818

SEQ ID NO: 168976 - DNA, 336 bp, Enterobacter cloacae; identical to SEQ ID NO: 78816

SEQ ID NO: 168977 - DNA, 1590 bp, Enterobacter cloacae
atggctcatctcaggatccgtggcgtaagaagctatgcgccagacagggaaatctgctttgatctcagcagcaaagtgacgctcatctatggccagaacggctcgggaaaatccacggtatctggctatttttatgacagtcaggccgataaatatcggcattgtgcatttgagagtccgcatatcagccactttcaggtctttaatcaggaatacattgacaacaaattcgcccgttcggactatcagcctggaatattcactctcagcgaggccaatcaagaaagccaagataaaataaacagtaataataaagaaagagcaaaactgagtactcgcatagataagctcaatgaagagatcgcagaaaaagaagggatgaaagaaacggtcatcgaccattgtaccagggatatatttaacagaacggtaaatgacagaaaaatcctcagcgatttccttgatggagctaaaattaaaagatcgttttacgaacgtatggtggcaataccactttcagacgttcgtaccacaactgaggaactggctgataaatggcggatgttaaatcaaagcgaaggaactcttgtcgccgaaattcatattccccagaccaccgccttaactgaagacacacaaaaactgatgcaggaacctgttatgcctgcaagcagcacacaattctctgcgctcattcagaaaatcggtaacgcagactgggtgcgccagggacagcattatataaacgacgatatttgcccgttctgccagcagccctttgatgtcattacgttttcgcgcgaactcactcagatgttcgatgagacatatcagacttctcttgggatgctgagccaggcagcagaacgacttgctgaggactgtgataacttggccgaatttgaacgccgtgttgcgatccatactttcgttgatgatggaagtcagattttgtctctggtgaaagcggtaaataaatgctttcagattttgttgcagcaactccttaataaaattaaagaaccttctctgaagatacaacctgagaacattcaagaacccctgttgttactccagaatgaagtggatgctttcaatacccgggtacgggaaaataaccgtcttgctgaaaatttcacccaagaaaaacagaccctgtacgctgatgtcatggcgcacctcagaaggatttgcgatgagttctttaccgaacgcgacaggcagcttggtgagcttcagaatgaagttaacagcaggttgcgtgaagctgagagcctcgctgcaaataagaagcagctggatgacgagacgaatgcgttgaccagacaactctccgacatacaaccaaccattgacattatcaacgcgaatctcaggctgctggggatcactggctttgaaataatctgccatgatgctgaaatgaaactataccgtctgcgccgaggaagcgaacctgaaaaggcggaagtattcaaattcccgaaaccgttaatcctgaaaataaactcattgtcattgacgatccgatttccagcctgtcacataattatatctatgaggtcgctgcactcatcaaacgtaaaataa

SEQ ID NO: 168978 - DNA, 507 bp, Enterobacter cloacae
atgtttttcttccaggaaatactgttaaacagcggccgcctacaggataacagagaagcaccggtaaactggtctttgcttcgcatcgttaaatctgactacagttcctgcgaaaagctttccatgcacgagatgctcaatgaatatcaggcgttatggcagaccctgaaagatgtcagggatgagaaaacccagcccgttgtgctttttaatacgatgaggaatattcttgagtactatttcagtttctcctgcaaaaatgaaaaactgaaagatgcccttgagtctctggcaagcgaacacagtgatgctggagaatatgattcattttaccgggcaatcaaccggcactctcattccgatggcagaaatattttatcgaccggtgccatcgataaggaacgctatctgaaaatgttcagaagagtatttattcagactgatgacgatgaacactatcttgcaatgatgggggagtctgaagaacagcgagaaacaggtgtttaa

SEQ ID NO: 168979 - DNA, 255 bp, Enterobacter cloacae; identical to SEQ ID NO: 78803

SEQ ID NO: 168980 - DNA, 513 bp, Enterobacter cloacae
atgaccatctttaaggagaatattgtggacacaagtctgattggaccgatccttacggcgctgcttgccgctgcggggttctactgtaagttttggtttacgcgttatcaggcctcccgtgatcaggcccagaaagtcagccggacgatcgaggatgtcctgagcaatatggccgcgctgttcggacagaagaaacctgcccggatactgagagaggaattttccgctgttattgcgccgcttcatcaggaaatgcgcagccttgacgatatgacgtcccgtctgccgctgaaatggctgcagcgcgaacagcgccacattctttatcatgcccgatggctgcagcggtatctggattcgcgcaggggcggcagtgacggggactttatcctgctattgcacgatgtggcgatggggaccgattatcaggttgctgacattctggcatcgcagcatgactgtaagcggcgtcgtggatcacagctgccggttaacctgaaaacctgcccctga

SEQ ID NO: 168981 - DNA, 207 bp, Enterobacter cloacae
atgtattccgatatactgatcaataacattttgtccgatgttatagacctgtgtggtgaacttgacttggcccgatctccacacaccggattgacagtcagttgtcagaaacacacggcaacgcaatttgcttgcccattaccaacctttggagccgacaacgtccatgtgccatttgcgtttctaaccaaaacgcacgctcggtaa

SEQ ID NO: 168982 - DNA, 801 bp, Enterobacter cloacae
atgaacgaaattgttaaagagccagtaagtcagatagctcagtcatttagagacagaatttcaagtccattatgggggtatgtttttttctcttgggtatcctgtaactggactaatatcttatttgtctttatgagtaaggaagatatcgagactagaatacatacagtactaattcagcctaatttatgggtgaattacttttggactcctattttaataggggtgatgcttttcgttcttatgccatttgcgcaatggggtttatctctatgccataactggatttctaaaaagaaaaaagaaagtgataaactaagtgcgctggaaaagtaccaggatgatattgaccttgccgataaaaaaatcgaggctgaaaatgctgaaagcctgtcaagacagaaagaaaatgcgaaaaaggatttggttgaagcaagaggtcagacccgcttgtctattttaaatgctagaaaagctaagattgataattcgatagagggactaaaaaacgcattcgctgaatcgcaaaagaagctagatgaaattaattatgagctaaaaacaattgaagataaggttaattcaaaactggagcaatatcaatccgcgagtgaaagagtgaatgcaatagctgaattgtattttacttatgaaaacattgaatcaagagaggggtttgtttcattcttaaatgatataaaagaaaagaaacttatcgcgcattcttttcttagtcggaggtatgatttgatgttagacaaggaactgaagtatttagatggaagtaaagataatgaataa

SEQ ID NO: 168983 - DNA, 138 bp, Enterobacter cloacae
atgacacaaaaacgcgaactaaataagccacgccgtactgtgcgtcgctccgctgatcataaagcgcgtctgagtgcgggttctgccatgctggctgaaaaaatggaagagaagcgtattgcatgggcttcaaaataa

SEQ ID NO: 168984 - DNA, 285 bp, Enterobacter cloacae
atgagcaaaaaaaacaacaaatatgaactgatgagcactcgggaaatctgtgggcaattgagcatatctccacgcaccctcgaacgttacagaaagagaaaggcaagcgagaatccatttcctgagcctgattgcgcctatatgggtggccccaataaatggttaaaaaccaaagttacagcctggcaaatcagagagatgtccaggactacccgcaagcctatgtctcacctgaatttagttagggatgaattagggaagttgcgtcggcctgagaatttttga

SEQ ID NO: 168985 - DNA, 231 bp, Enterobacter cloacae
atgctcgaaaagcaaaccatgaaggttgcctgtcctgattgcggtagccagatgctcaagcgccccgacgattttgactttgacactaatttcgttggcgttagctgcgccgattgtggtcgagaaatcaccaaggacgatgttattaagcaagggaagggtgcggtcaagaaacaggtcgacgacatgctcaggaacacccttaaaggcagtggttggaagttcaaataa

SEQ ID NO: 168986 - DNA, 171 bp, Enterobacter cloacae
atggtagttcaaggaatcacgtcttgttgcttctataactttatcgtcaacaacggtgggttgatggctactctctacattgacatcgcgataggtgtcatcaccacttatttgatatgtgattttataaattggcatttcatagtttccttttttcacggcattaactga

SEQ ID NO: 168987 - DNA, 405 bp, Enterobacter cloacae
atgagtaacaaggtccagtttcaacgcgtggccacaactgcgatagttgctcaggccggtaacctgtttcagcccgcgaccgcgatatttccagccatcaccagcgacctgattgccaaggtgttcttttccccactctccaccgtataccagattggcgatcgctttctgatttgctggttgcgttgccgttctgccaagtgcggcggcctgctgttgagtgatgcggtggctgccgaatgtagggaccaggttttcagccgcataactcaggttttccaccagccgggtaaatctggtgctttcatgccccatctgggcaataaacatggcctgatcaagcggtgcggtgatgccgtattccttcatagcggcgtcgatatgcggaaaccagcgcgcagctaa

SEQ ID NO: 168988 - DNA, 174 bp, Enterobacter cloacae
atgcaaaagcgatttgtaaaatttgcgctgaagtttgtcagcaatgtggaaatgagtgtggtaagcatgagcatgagcattgccaagagtgcgctaagaaatgcaatcgatgcgccgagctgtgcctcgcaatgtcagcctgacaaaatatttcgcaaagcgcgatttttctga

SEQ ID NO: 168989 - DNA, 804 bp, Enterobacter cloacae
atgaaacttgaagcttcactaaaacactttagccctcagggtatgcacatcagcgacgacgtgaaaggaacttctccggaccgccttacaggaacagatgtaatggcggcgattggcaccaccagcagccgtgcgcgcttcggcctggcggcgttcttcggtaaagcgggaatcagcaaaacggatgaacagctcgcagttcaggcgctggcgcgatatgcgatggatgccgcaccgaagaatgttcgcaaagcagctggtggccagttcggatggtgtatgcatatgttggcacaatttgcctttgctgattactcccgttcagcggaaaccagcgtgacgtgtcacagctgcagcggtaccggtttgacgtcacgctatgaggatgtgatcaaacatcctggcattgttgatgctgagggtgcggaggtggtagccccgaagattaagcatgagctggtgaagcacacctgcgcaacgtgcggcggaaagggcgtcattcatgcccggtgccgctgcggcggtaaaggcgaagtgctcgaccgtgtagcgacaaaggagaagggcgccccggtattcaaaatctgtgagcgttgttctggaaatggcttctcgtctgtaccctcgaccgctgcgcacaaagtaattcttaagcgtctgccggatctgcatgtgaggacatggacccgtaactggaaaccctttcttgaggtgctggtgggcatttgtcaccaggaagaagcgaaggccgacagggaatttcaggctgcgacttctttttgtgaagataacaacaaaatttag

SEQ ID NO: 168990 - DNA, 240 bp, Enterobacter cloacae
atgaaatggggggatctgatggcacttacagcgatacgaattcctgagtgggttcacctcaaagcggtacacgttttaagccagttcagggcaaggcgcattcacccttgccgtatgcacggctccgggaatttgagcctcaaggttaaccaccgctggcggctactctcccgcgatggcggtaagaactgggaagtaatgtcccatgagcgttattcaaaagttaaggatcggaaatga

SEQ ID NO: 168991 - DNA, 405 bp, Enterobacter cloacae
gtggagggcaataccacgctgtacgctctgccccgcgcggagatcgtcgaacgctggcgcgagcaaaccagcgacgacttccgcttttgctttaaattcccggcgaccatctcccacaacgccgcgctgcgcaactgcgatgatttaacccacgagtttttcacccggatgtcgcctctggccaaccgtattggccagtactggctccagcttcccgccacgtttggcccgcgcgacctgcctgccctctggcagtttctcgacgccctgccgcatggcttcacctacggcgtagaagtaaggcatccggaattctttgccaagggcgacgcggagaaagcgctcaatcgcggcctgcatgaacgatcggtcaaccgcgtgatcctgaagagacctttctattga

SEQ ID NO: 168992 - DNA, 477 bp, Enterobacter cloacae
ttgttaacgattgccaaaatccaagatgaagctacaatgtttcgaaaattgatcaagaactgtgacaaaaagaacaccagccttgttatagactgttttcctgttatgagttgtaaactttcttcgatgcttctttcttatcacttcctgatgttatggcctgaccttgaaattaaaggagtaagtgcagccacaggcaaaaatgatcggataactcactactggcttgaaatcaatgatattgttgttgatataacaggagaccaatataatctcatcaatgattacgaacttactaataatattataaagggcagaccattcccctcaatacatgtttcgcataataatgaaagctatctctacaatatatttaaaatcaaggaaacacactcatttgtctacggcttccctgaaatagctgatgatttcattgatgaaatggctcatgggtataatcaattattatataaatga

SEQ ID NO: 168993 - DNA, 837 bp, Enterobacter cloacae
atggcaaaagttaactttttcgacacacgtatagtaaaaaaattttcagactacacatcaacaataagcactattttttcacttttattgatttttgttgacattccaacagaaaataaaattacgcttgggattatattcttattcactttgtcattgttgtattttggaatttggttgaaatcaaataatcttacggaagttaatttagatgtagagggaagtattgttactgtaaaagctggggatctatttctacaagacggattcaaggttatagcttttaatgaatactttgacactcaagttgatgacaatattatctctcataaatcccttaatgggttatacattgacaaccatttatcaggtcctatctctgatttagatcagcgtgtatcaaattataagtttgatgaagatgaaatccttgaagtcaaccaagaaagaaaggtaggaaagaaacaaaaatattcgttaggaactatcttcgtaaatgaagattatctattaactgctttttcaaaatttgatgataaaaatagagcgtttcttaccatgcctgactatttaggttttttaataaatttctgggacaaggtaaatcgtatatatgctcaaaaaagcgtttcggtccctatctttggctctggaataacacgaataaaagaacataagaatataagcgatgaagatttgcttaaaataatgttgtggacatttagaatcagtgagatgcgattcaagtttccggcaaagctcactattgtcattcacaaagataaaattgataaaataaatttattggacattaaatcagcaagaaatggcctttag

SEQ ID NO: 168994 - DNA, 447 bp, Enterobacter cloacae
atgacttctgcgaaagacggattgttgaagaagagcatatcaggggtaaagagttccaagcatagctgctttgtctatggtgatacctcgttttctttcagtggggttatggaggctatcttcattagtgggctgttcttctatgcgccgagagatgctgccggtagccttgatgagctgaaagcgagtttggccggactggaagaagaactggccgaggtgcctgaaacagaatcggctgataatgaaacagataaagaaactaccatagtcgtagccgaaggtgcttttgattcgctcaccgctcacatggaaacagaagctgaggagtggcaatccattaagaagctgtgccagcgagaaggtgagcttcccatacgcatcggtagtattaagatggctgagcctgctgagctacgcttgtgcgggaaaattatacgtggatag

SEQ ID NO: 168995 - DNA, 174 bp, Enterobacter cloacae
atgctgaaagtttccggtaaagctgaaataaaaataggtctggaaatttttaagaaaaataatatttgtgaaaattcatccaccagcttcaaagacgctttcacggatcccgatatggtttactgtaaggctacaaggtggaaaccagaatcaccgatgagcgaagcaaggtga

SEQ ID NO: 168996 - DNA, 756 bp, Enterobacter cloacae
atgagtggtattgaagattcaaaccagggtgcaggctggaacgatcatgacacaccgtatggcccaatccatagttatgacggcaatgatcatagttatggtggatcaagcggcggtaacggaggtggccacagtggtatcgatgacaagtccactatcaacattgcctctaccagtgcctacaatggcaccatgatgtccatgtgcgtcaacaaccttaaaaagcatgaagggtttaaaaacaccatgtacaaagataccgccgggaatattactgttggtatcggccatcttctggctaatgctgctatggccgcgtctctgccatttacccgtactaacacgattcatgctcatggtgatgatatcgagtcagaggtttcgatttccaaaggggatattacttccgcgttcaatgctttcaaaaccgactctaaaaaggctccgctgaatatgcacttatcgaacgatgcgatcatcggtcaatgcattagcgatgtgcagacaacggttagtggactgaagggactttatgctggttttgacagcttccctaactctgcaaaaactgcccttgtggatatggggttcaatctcggcatacctcgcctacattctgagtttcctaagttcaacagcgcggtaaatcgcaaggactggaacacggcagcaaacgagtcccaccgcaccgggattggtgataatcgtaataacgatacaaaggctcagttgcagcaggccgcgaccggtcactga

SEQ ID NO: 168997 - DNA, 219 bp, Enterobacter cloacae
atgccatttatcttcagtcagaagatgggcttgactggtattatcatagaaatcgatttcaggaagatacttttaaaatttgcttcgatgaccaaggtgttattaggatgttcgagcgaaacgctcagctcctatggcctgatggattatcagtggcagagatatcaaatgaagaagtgccgcctggattggatggagcgggaaactggcaattcataa

SEQ ID NO: 168998 - DNA, 561 bp, Enterobacter cloacae
atgactaagatagatttaaagcgccacctgcatgaatgtttacaaacagaagtgatgaaaagtaaaaaaccttttacttggactcgagctgtccataaagctttgaaatgtcctgaaagacgttttaatttttggtggcgaattgcatcttatctttataatgctaacattagtaaaaactttgcgcgcagaataaacagaaaattaaccattaaatacggttgcgaaattcaacttggagcatctattggacctggattagttataagccatttccatggaatagttattaatggtagcagccgtataggttcgaactttagaataagacaaaactccacaatagggataggtgggggaataatgcctgactccggagagccaagtattatcattggagacaacgtcagtgtcggggctggttcatgtattattgcaaacgttataaaaattggcagcaacgttgacataggtgcaatgagctttataaacaaagacatcccaagtgattgtgtcgtttataccaaaaaaactaatgaaatccttttcaaaaattcttaa

SEQ ID NO: 168999 - DNA, 321 bp, Enterobacter cloacae
atgtttgctctctgtgatgtgaattcgttctacgcatcatgcgagacggtgtttcgtccagatttgaggggacggcctgtggtcgttctctcgaataacgatggctgtgtaattgcacgcagcgccgaagccaaggccgccggaattataatgggcgagccattttttaagcaaaaagagcttttccggcgcgctggtgttgtttgcttcagcagtaactatgaactctatgctgacatgtcgaaccgtgtgatgacaacactcgaagaaatgagcccagagttgaaatttacagcatcgacgaagcattttgcgacctga

SEQ ID NO: 169000 - DNA, 486 bp, Enterobacter cloacae
atgaaaaactataaattattaattattctttttggcttactggtgattgttgtcaggtacttaacattaagtccggctatttctgctatatatcaaaagagctattacgatcctcaatgggggcgtggcgaatgtaaatcaactgttgttttggttgaacatgcccctataacccaacaacaaaaaattggattatggaactcaagcaaacatgacattttaaaaaaatggaccccactaaacaataataaatgcgatgacattttatttgtgaacaacaatgtagaacaagtaattgatagcatggggatgaaagaatggatgggagaagaacaaatatgtttagaaggcaaattgggtgcagggaaatgcatatctagaaatgaaaggctgttctatattgtgagagacaaaccgctttctaatcatgatatcagggacaccacaaatggcgaaactttttacctacactttgtcaataactag

SEQ ID NO: 169001 - DNA, 1923 bp, Enterobacter cloacae
atgcccgttgatacacagcggagctatccggtaaaccgtgaaggatcatggcatggggggatccatattccccataccgataccggggagcaggcaaatccgttgagggccattgcagatggggttgttgtctatgccaattacccggcatcatcggataaacgcgaccagccgttaaactatggcggcgcgacggataacggctgcgtactgatccgtcatgaaatgctgattggtgaagaacccgaagcattcactttttactcgctgaccatgcacatgaagcaggtaaggtctgaactccgggtaaagaacggcgtgtctgttcgccgtggacaggtgatcggtacatcaggaatggttagcggaagaaacggttatcacttccagatttgttgcgccccttcagcgcttgaagcgctcagcgggcgtgcaaacggtgttcttgatctgctgagcaacgggcgggaattacctgtatacggaaatcgctattactatctcacggcagggctgcccgtatttgataacgttcacaagataaatatttccgcgctgactaccactgaagccctgttcgtcatccatgaagggacaaagacccggactctgcgtaaaatccaggacggatacgagagtgtgggtgacattgccgtgacggtgaattttgtcagcgaacccgcctctgcgggagtattgactaaaaaatacagcgaatgggtaaacatcgaaacggcaacgggtcccttctgggtggatgtatccgatattaatgtaaaatcctacagcgatgcagatatgcccgactgggctggctggcgtatagctgatgatgatccgacaaaagacagccagtgcaattctgaaatggtcaaaaagcatctgaacagcccgcaggacctgcttacacatttcatctgtaaatttccgtttgaatgggatttttcgacctttgacacccgttttgcgtgggtgaccgcccccggttccccgcgtgaactcagcggaacggattacagtgaattgaaagcccacgcaaaagcactgtgcttttttgataaactttccccggaggttcaggcagaactgagcggtgaaatctggcattttgagccacgtacgtttattacgttattgcaaaaagcagagccgcgcctgatatattacagcgcgaacggacgttcaaaacgacagcttaacgattttattaccgatgatatgcggcacggtgacctgacgcgggagcagatactggctcagggtcagctaaataaaatcaatctgttcggacatgagttaagaaccaatatcttcgattttaataaatccgttgatgaacattttgccagcatggaacaaatggccttctggactgcatggggagagtatgccccgctcattcagattatgattaagaaattccgcaaaaatgaaggtggcatttttcgacacgagttgttgaataaagcatttctggatcacaagacgacaaaagagtgtgttattgaaataaataaaatcatatcagaaacgctcgatgataatgacttttctaaattatcaatagataaccttagtgacattaacaataaaatcactgctagaatcacattgcctaagttcaatgattgggactggtttaacggtttggggatcaccattcacgatacctactcaacgaagatttatcttgattatatggatatagatgtgccgtcggatacctacggcccgcgccgataccgtgcaggcctgcgttttcagatacaggatcattttgggctggatgttccagaccttaacggcaaaggatttgagaatattccctggttttgctcatggttcattttgcaacgctataaacattatgattttaaaccatttattaatgaagcaagcttcatcattcatataaatgggtga

SEQ ID NO: 169002 - DNA, 2424 bp, Enterobacter cloacae
atggatttcgcagaggccattaccgacacggggcaatcccgctacagcctgcacataaacgacagccgcgcagagcctgatgtgctgcgttttcgtggacgtgaggcgctcagtgccccctttagctggcgtattgagttcaccacatcacaggacgatattgacggaacggatgtactgaaaaaatacgccacctttcgtatgcgcagcggtaaaacggtggagggcgtgattaccggctttgaagtgctggggacaacggcagaccagtctcattacagcgttaccctcagttcccgccttgccctgctgtctcacacccgccgctgcgccgtttaccagaatgtttccgtacctgagcttgtggaaacgctgttactggcgcacgggcttgaaagcagcgattttgagtttcgtcttgaacatacttatccggcccgcgagctgattacccagtggcgtgaaactgaccttcagtttatccagcgtctgctgtctgaagtgagcatatggttccgttgcggcctcaatggctccaccgggctggatacggtcatttttgccgacagtcagctttattacacctttaacgtccccctgccatttaacgagccctccggactgtatgacggcgcagaggagtccgtctgggggctgcgaacgtggcataaggtcgtcaccgggcaggtgcacacccgcagccacaattaccgggatgctgccatgccgatggattccgtcgttgccgtgcgcaacgaggctacaaccaccggggaggattaccgctacggtgataattttctgaaccccggagacgaccaccctgccgccataccggaaaccgaaagcggcgcgttttatgcccggcttcatcatgagcgcgaactcaataaatccacccagcttcacgtcttcagtaacgcctcacatctgatgcccggacaggtgctggaaacgccaggctgcgggcttaaggatttgcgggaagggatggttatcacgctcacggcctttatcgcctcacgtgattcgcgtctgcatacgtccgtatggggcattccttacaccgagcgctactgctatcgcccgcccgccatcccgcgcccggaaatttccggcacgctgcctgcgcgggtggaaagccgtgatgctcatgacccgtattcgtacctcgatgatacgggatgctatcgcgtaaaactggatttcagccgcgaagatgcagagcccggttttaactacctgtgggtacgtcaggcaaaaccgtatgccggggatacttacgggtggcatatgccgctggtggacggtacggaggtcgggattgccttccatcatagtgacccggataaaccgtatatcgcccatgtcttccacgactcagaacatgctgacgtggtgaaccgcaacaaccgcagccagaacattctgcgcacggcgggagcgaatgaactccggatggaagataagcggcaggaagaacacattgccctgtccaccccgtctggcgcaacgcagcttaatcatgggtatatcaccaacacgcagggagaacagcgcggcagcggctttgaactgcgcatcgacgagcacggcgtgataagtgtggcaaagggcctgtttgtcaccgctgacgggcagcagaaagccgtgggtgacatactggatatggacacagccctgcacgagattgaactctgccagcagcaactcaaagcactgaactctgccgctgtgcaggcgcgggcactggaagcggatattgccagccagcaggcgatgtttgcggaacgattccgcgagctgaacgagatgattcattttcacggccctgaaggggtggcattcaccagcggtgaacacatgcagctggcggcgacggacaatattgccgtcaatgcgggaggtgatatctgcacagggtcaatgggcaataccactctgctcgccggagagtctattggcatgttttcacataccggaaaactcagtgtggtttcggctgaaggtccggtacaggttcaggcacaaaatggtgcgatgcacctgagtgcagagcagaaagtcagtatcaccagcctgagcgaaatactgattgcgggaaaaaaacgggtaacgctgattggcggcggcagctacgtgcggaccgatgcagcggggattgagtacggcacaatggagatatatacccgctatgccaaacggactgctacgtccggccccgctgcaacagaaattagtttcccttcacaccctgaagcaggtgaccccgctccccataggataatcttttattttcataaacaaggaacgtattcatgcaaatttcacctccgatccatttcccgcatgctaataacgaaacgtttggtgagtgggttacccgttgtatgcccgttgatacacagcggagctatccggtaa

SEQ ID NO: 169003 - DNA, 846 bp, Enterobacter cloacae
atggtatcagagggcctcgacccttctcacgaaaagcaggcccagaaacgcgcccgccgggagcgtaccgcaaacacctttcaggccattgcctctgaatggtttgcgcacaaggcgcggacgtggacaccgcgttacctggctgaccagaaagcccgcattgaggggaaagtgtatctcgccatcggtcagcgcccggtatcagagattaagccgctggaaatgctgaactgtctgcgcgatatcgagcgcgcgggcaggctcgaaaccctgcgtaaaacccgccagatttgcgtgcagttttttacgtatgccattgtcaccgggcgtgccaccagcaacccggcagactacctcaatacggcgttactgtcgccacagcgcggctgtaaccgctgcctgacggcggaacagcttccggcctttatgagcgacgagctgcattctgcgcacccgatggcaaaagcaacccgtctgctgatgctgaccggactgcgtaccggagagctgctggtggagctaaaggcgctggcagaccggacaggctcgccgtatatcctgccgtccgcgcaccgggcagaaaggccgcgcggacgccgctgcatcaatgattttctgagcctgacgggctggcatgagcacaccaccgcgcacggattccgccacacgttcagcacgctggcacacgatgcgggctttaactccgcatggattgagctgcagcttgtccacgtcgataaaaacagcatccggggcacgtacaaccatgccctgtatctggacgaccgccgcaccatgatgcagtggtacgccgatacagggggcatttccgattttattttttaa

SEQ ID NO: 169004 - DNA, 195 bp, Enterobacter cloacae
atggcactgaccgcccgccaggtggaaaccgcaaaacccgctgacagggattacaaactgaccgacggcctcgggctctatctgctggtcaaaaagaacggcgaaaaatactggaacctcaaataccgttcggcggtaaagaaaaaaactgtccatcggggtttacccgtccgtcacgctggcacaggcacgtag

SEQ ID NO: 169005 - DNA, 1440 bp, Enterobacter cloacae
atgagtgaaaatggtaacgtctttacctggtttaaggtttcggcacagttagttactaaaaggaatcaaaagaaagaaaaaattgatgcgcagagattaaataataagaataaaaggctgccttacccttcatacgaagaagcctgcattttgtatgccgaacctaagagcaaagaaaaaccacaggaaagatttatagctgaaacgtcattgcttgcgactcccggcgcactggaatgtggatattcacagtgtatagactggacggcaggcggcattttagatgacaatatttacaaatggattggctggtatgcgcgcaccagattaagacttgccgggacatgcgttgaaataagtcagggcaaggcattcaaaatgcgagatttttatcagtgcattgaatcctcagaaaaagcgaccatatcatttatcctcggcggatttttctgctatcaatcggcaacttactggctaacgttcagacatgagcagatagcaaattttattcacgcagggttgattaagaaagcttctttgacgttttacccggatgaagagaagcgaaaaacgcctgattatcttattgaaacgcacaagggtaaatggcatgtttttgagagtaaaggtggaggacatagctctcgatggcaaaggatggaagaggcggtcaaacaattagaaagtgttactcatgttgtccgtaaagatggtacacctgaaaagatcaagacttttgtctgtactcatacctcgatcgatgcagacaaggatattgccatcaacgttgttgatcctgtttcggatcgcgtgcaaccccttattattaatcccgacgtttgtatccttctctcgaaactcacgttaattagtcttttcgatgccttgtccgccattgaaacaagtagtaagtatgagatcgagggaatggatgactgggcatttgtgcatgccccagaatatgatggtgttcagtttggtatccctaaaaagtacctggagttcaaggatgaaataaaatccagccttgggatctatcttgcgctgaaagaggtgattgatcttaagcttattgagaataacgagacaggttatttcaaagaggggttgataaaactcgctgaactatttccttcccgaacagcgttacgcaatgttattcagagagtaaaaccaacgctggtacaatacaggaaaataactgaaaataattatggccattttttaaaaagcctggcgaactccctcgcgcttcagccgcaggcagaaagaattcttctaacagagttcctgttagtggataacttaccggaacccataaagaaacacctttctccctggggtggactgactcgtaccgcgccactgccgggttatgatgacccgtggtctacgccgaaaagtaagtcgtcaaacagaccaaagaaacccagcatgtaa

SEQ ID NO: 169006 - DNA, 747 bp, Enterobacter cloacae
atgaaagatttttttaaaaattatctccttcttaaaaaaatagattcacatgctcttagaatcttacttttatgtttgattaccattatttctttaggcacgatactttttgtgatttcatttatttcaactggaatgcaggaaggtttttttagacgggatttttgttttcataattcctgcattttaaatttcactaaaggttactcacagtcaatattaatattgcaagcaacttttatattgttggggttagtggctagcataggtggaataattgttgcgttacttggatataccaatagtgtcagcgtgtcagccctcggtaaccatatatcgcactttaagatatttcaagagtacttatcatacgaaataaataaaagagatcgtctatctgcatcttcatttgacatattcaaatggtataatattatttttaataagtctcgttctggctctacatccatatctcaagactactgcaatctgattttaaaaataaacagtaccataagtgattcaaatactgcctgttcacaagccaaatcaggttctttctcttacgtaaaacatcaaaataaaatcacaacgttgcttcgagattttggaataattcagcctcgattgcctagaaatgattactatgaggtcgaagatcaagtttttgaattgatagacaatataaatagagagttttgttattcatcatctatagaaccattagtgaaaagactgtatagataa

SEQ ID NO: 169007 - DNA, 2136 bp, Enterobacter cloacae
atggtattgcctgttgatggctatcgttcagcaacagagttcatggaggccttacagggcagtgagggagatactcactggttgatgaagaaggccgaacactggcatggtggaatccatatttatgacagttttgcggctaatgctgtatttaaacccgacagccacggtctgaaatgcatggctgatggtcaggtggtcgcctggcgattaaatgatgattaccagacagcaccgttcaaaaagaagatgctgaaattcagcaccacctttgttctcatcaagtcaacctgtacccctgataaggacaaacccgataactcactggacttctatacgctgtggatgcagatagccccgctttctgagtatggggttacggacacaccgacagccactgtgaccgccagcgcattgaaaatccgtcaggacaacacattttcgggctggatgcgtaacggaatgtcccaggggataaacgttccccgcgatgcattgcgtcactatgaagctccacaggacacgcatactacattaccgcgcggttcagtcgtagagattgaacaagaggcgacttttattcttaacggcaaaccggctccatttattttcattactgttgtgtcagtccccgaaggagctaaaaccggattatctgtcggagagtctggctggatttctgggttggataagtttgttaagagacaagacattacattaccagcgtggatgcaggaagcacgtaaacatggcgtatttaatgaggtcgtaacggtatccgtggaagatgcacttccgattaaggccggggatgttataggtcaccttagcctgaacgaacaaccgtatggcaattctcagtatttctgtcatctggaagtattcagccaggatgcacgaatgaaggattttctgacaaataaggctggcgtgacaaaaggagtcgcagaactgcatactctggcggataaaatgcgctggcagcatcgtgacagagataattcctttgtcgtggctggtgtcggcggtgacccttcgccaacaacagcagagcgttacactcccgaaactcagtgccgccgactggaggccgacggaaaaacctggtattacattcccggcgagctggcatggatggcggcggaagatgtggagagggcaaatcaatttgatcttgaaaaacggggatttatacctctggaagaggagggcgccccacagagcattttccagactcccagagaaagctggctacgacaagcgttcggacgtcttgaagaattagccaggggcgaaacacgggatatgtattcctccagctacaccgaaaagtatcagaagctgctaaagcagatggattcaaaccaggatggtgtaatcgatgcaggtgaactgtggcggtttctgcacaaccgtcagccacatatccagtatcaggtgcaacgcctggtggtgaagcatcacagcgaatggcttaaagacggtacatcagctctttggcaggcagcgcttgatgaacaggcgaagaaatatcctgatctggcactattcaaccgtgacttcatcaataaactggtgtggatgaaggatgtaccagagatccgtagcagtgaagctctgtggcatatgcatccggtggtatttcttgatgcgctaaaaatgcagtctcgaagaggtgtaatcagaccccgaaatgtccaagattttctggacatggcttcggattcagcagaacaagccgctgctaaatggggagtaccagcttccgtgttactcgcacaatcagctttggaatccggctgggggaaacatgtcaaaaataatgcatactttggcattaaaggcaaatcaccaactggaaacagtacgtcatttggcacaacagaagtcatcaacggcaaggtaattcatattaaagatacttttcgtgcatacgcagattacgcggaatcggctgatgattacggtcgttttttgaacgaaaacaaacgatataaacccgcattcattcacacgactgagccaaaccaattcatcactgaaatagctaaagctggctatgcaactgatcctgattatgcaccaaaacttatccgtcttatggagcgatatgatttatatgaatttgataaataa

SEQ ID NO: 169008 - DNA, 645 bp, Enterobacter cloacae
atgatttatatgaatttgataaataaaatattttttatatcttcagtttgttactgcctctctgcgcttggctcggaaaacgatgaaatggtgctaaaggcatatgatgctatccatgataaccgcctaacgtcagtcaaggatgaatgcctagcatttgatgttgatgataataatgatggttatattctaatccctgttcgcgagaatcattcaaagccacaatgcggcggcgatactggaacatcagcaaaattatttgacctgcgcataaggaaatctgatggtcgtatttacacaaaccaaggaagtgatccagatgattttagaacattgcctgctccgaattcaaaatgcagtggcgctaatagaatagcggctgcaatgcagaaaaaaataccgtctgacaattcaggttatgtcattcacaatgctgggagaacatatttttatagtgcacctgatgaaagctgtaagattaaagatctctttttagtgcaaggggacttagtcaacgcttatgccgattataatggtttttcctcaatcatgtatttcacaaaaaatggcgatcctgtgtccggttggattcattcagacaccctaaaacccacaagggcaggtattggtccaaaaaagccgtaa

SEQ ID NO: 169009 - DNA, 1269 bp, Enterobacter cloacae
atgttaagtcgtgaatatattaaaaagtttaatattaaccttgttttcattcttattgtgttttcaattggtagcgatctttttatggaggcctacccaagaaagttgttttacataggttgttatctttctatttttggccttatttttttggagcgctggaaggattttcgtcagtggcttttgagcaataaaatcgcgatagcttttttattgagcattgtgcttctgggggccagtaagttaatttggtctgtgaaatttccctcagtgcacttacaggacattaaagataactattatgctggtggaaaattgctgattctttccggagttatggcattttatttgctaaagtcagtaagtaatatctcacgtcaaagctggaaatttgctgcttccatcagtcttgcgctaagtttactcacggtttggtttggttatcaggaacaaactgctggtgtaaccagaattaaacttcttgccgatgctgctacgactgctgcttatattatggttattcagtcagttctatgtttgtctttaattaaaaaagcagtttcaaatcaactttaccgtactgtattttaccttttaatattttttgtattctcttatttattactgatgacagaaacccgtggtgctataggtacttttttcatcgtctgcttcgttctggcctgttttgaactgagaaatgtaaagcctcgttattggtttttagcattgctggcattatcggtgattggatgtggtatcggctataagatgcaaaaaagaattgttgaggcctatgataatatccagcaattacaacaaaataacgctaatacatctttgggtgcacgttatgttatgcttgatgcaggactgcatgcagcgaggttttctcttttcggtcaggatgcagaacagcgttataataatgcaagacaatatattgaaaacaactataaaagtgcagaggcagtcagggcaattaaatatcacttccacaatgatataattgaaagctttagtttgcaggggttgttaggcgttattgctattatactgttttatattattggttttttagcttcatgtgaaaaaaagaataagatcaacgttgggttgttgctttatatgtcagcgctacttctgatggggatgacagatgttctctttattcaacgaaatacagctatggtaatcggcgcttgtgccgtgatcttgcttctctgccagagtgaagagaacaaaaggattgaaagttcgggacaataa

SEQ ID NO: 169010 - DNA, 1023 bp, Enterobacter cloacae
atgatgaatccaactatccttaatttaaacgaaaatgtattgagtgcgcaagtaacggattttaatttagatattgaagttcaatattcagcagtcgtttatggtatcgacgaaaattttttaacacactgtgggatctcgttgttatcaattgttaaaaatacatcggaaatacctctgcatttttttattattacagataaaagcaatgaaggagagttttccagactacagtctgttattaaaggtactcagcatgcacttacaataattattgtgtctgctgacgctctggatgttttccctaaaaattcaattttcccggtctcaatttactttcgccttttagctccgtatttaattaaagattatcgttattttttatatgttgatgctgatattgtagcattaaacagtatttatgagttattagaacatgttaaaccgataaataaaatttgctgtgctgtcagggagccagagcatcaggttgctctttcaaagtctattaatatctctggttgcgattattttaactctggtgttctctatgtcgattccgaaacgtggaatgaaaataaaatatcgcaaaaagtttttgagtgtttattggaacgagggggagattttaagtattttgatcaagacgcccttaacgttgtcctgtacaaaaaagtcaaattaatagatgaaaaatataattgtcaaataaagaccgggcacaaaaggggggatttcatgcgtgagcctcccaaggaaacaattttgttacattatgttggtagtgataaaccatggcagctatggaaccaacagaaaattagtgctcactatcgcaaatataaaaaaatgtcaccctggtgtgatgttgaagatgtaaaaccacgttgtgcgcaagaacttaagaaatgctataaaacgcttaataataagaaacagtttttagaagctttctgcatgttcgttcggtatcatttagtacgtttcctggaaaaaaggcaagcaagacatgttaagtcgtga

SEQ ID NO: 169011 - DNA, 270 bp, Enterobacter cloacae
atgggttttgggaacttcaaaattctgaattctgaattcagttcaactactggcattaaacaaccacctgttaaagaacttgtggaacataacgtcgcaggcgggtttgatgaagaacactttgcgctgcttagcaagaacaaaaatctgatcggctcgctggcgcagcagatccttgaagcacattttcctgaaagcattcaggaagagatcgcggatgagatgggctttgatattcagtatttccttaaagtgcgcgattcatcatag

SEQ ID NO: 169012 - DNA, 2328 bp, Enterobacter cloacae
atgtgtgagacgaaattttattgcgtttcaaatttagagattattgagctatttcggttcgataaggacaaacctaagacattgtctcaaaagattaaattggataatgctaatgttggattgctgattgatgctgacgagaatttgttttatgaaaagttgatagatgctattgttgaaatattagatgtggtattgggaaataaaaaattcatatataactctggtttgtctcaattccaaattattatggagacatcagttgatgatccccaaaaatggcataaaaactttatccctgcatcttttgagtatatccggggtgcatcaaaatatagcgagaatttaaaaagtaagacagaactttggaaagaggcagcattttatagtaataatcccgagagattaaatactcttgggggaaaaattaattttaaccatgtatttacaccaccaattcctctaatacctaatgattccatagcttttaaacagcaggtcctttcagaagccttcgaatgtggccgtttatatggagctggagatgatattgccgaattagttaatgacattcttgctccaagaggattgggaatagttgaaactgatatggaattagcacaattaatatctatctttggaaaagtttcactaggtcgcgatctccagtctgacgaattggtactcgacccggctagtggtagtggaaggcttttgacagctttaccagttcttgctttcccttcaattcaaccttatcagctttgggctaatgaaatagaaaaacaattttctgaatcattatcactgaggttaggattagctttttcacagataatttcgaataaaaattcatcgaaaataactatctctcctatagagtcattctcaagagaggattttagcaaaattgcactggttgtgatgaatcctccttttgtatcaggtgttcaatcaagtatccgtaaaataccttttattaaaaaaattgaagagttgacaggcaataattctttattaaatcatgggcaggtagccttagaaatattattccttgaattaatgtggtcgttagtaaaagatgatgtgtcaattgtaactgtatttccagctcaacatttataccgaatctcaaaagaagcgcaggcatttagagattttttgatcaataaattttcgctttcatatattgttctttatccaagtaaaggacttttttccaatgtaataaagcaaacagttcttcttataggtcgcaaaaatatcgctcatgaccacgtgaaagtcgttgaaattcagcgacaggttagcgatattgatctaaatgaattaatgactgggcttgaaatgaattcagaagatcatatgccgggtattcatatccataaaattcctaaagaaaatttactggatagtaatgaaacaggatggaggaaccttgttggaggaaagagggctggtacttttataaatgactatatgagctcactaagtgtggtttctgatttgccaaaaaaatatgtgaggcgtggtaccattggtaatggaggtaatactaagttaacggtatttcacacacaaaaaccaaattttcctgagcagtcaactataattccaaaagattggttaatgcctgtgcttaatacaacggaaaatatgccgcgaatactcactttaaataatgcacctcaaatgtcattcttgcctccgatcgaggcatacttagaaggaacggcagagaatttacaattgcaaaatattgtaagggcttacatggagatgccgattgtaacgaagggtaagcaggctaagcgaaagcataatttcgaggagatagtaactaaattacaaagagatcaaaaagattttggtggtggctgggtactaatccaacgtgcatctcgtgtaaaaggagatgtgagcgttcttgaagatgatggagtattactctcaaccaatgttccaatgatcaagctgaataccaaagaggaacgtaggttatttgcatcttggatgctttccatatttggtcaattacagctggaatattactctactcctcaggagggtatgcgtaaactggaaatgggatctatcagcaaacttaaatatcccaattttattaatattgaatcacaaataaaaaatcggttgttagaactgtttgatgatatgccagccaaagagttcttaaatccaaagttgaatgagtctgactacttatgggctaaaataatacatccatcaaaccctgatgaatgcttggaaattgcattggatatcttctctgaacttattgatgaaaggcgcggttttggtggtaaataa

SEQ ID NO: 169013 - DNA, 1200 bp, Enterobacter cloacae
atgtttgataaaaaacaaaagataacagatttatcattggtagacgctcatcagttcgaacttaaagtcgagcctgagtactctggagaaaccttcgacgcccatccgtgggatccagaaaaaattcgaattacaacaaaacatttttctttacgagaagtagtcgatcaaatcaatgaccaggatattgatctttctcctgactttcaaagggattatgtttggggtacccagcaaaaaataagattgattgagtcaatacttctaggcatacctttacctgccttctactttaatcaggaatctgatggttcttttcagatagttgatggagtacaacgcttaagcaccatatctgctttcatgaataatgaatattcgttgtcctccagtaatcttgaatatcttaaagatcttgatggcaaaaagtatgatgatctcccccccttagagctacgtcgctttcgctcaacacagattgtagtccatgttatagagccctcaacgcctaacggtatcaaatacgatatttttagcagagtaaacacattaggtagcccattaaaaccacaagaaattagacatgcaatgagcactgcccggactaggaatttcctcaaatgcttaattgaagacgaatctttcgatttagctacgggttacaatttttggaaatacgaagatgggaaacgagtaagagatagtgggagaatgacaaatcaagaactcgcattaaggtattgtgcctttaagcataattcattagatgattatcgttctttttccagcttggatcgttttttgatcgatttcactaagcgtttagatgggagaaattcagaagagactggccttcagtctatttcttctgaagaaatgaaatctttggaagctacattttttatagcaatggaaaatgcgaatattgttttaggtgatgatgcatttagacgtattgaacctagaaaacgcaaaggtccaataaaccgagcaattttcgaatcccagagtatagctctctctgaatattctcgtgaggttataaccttacataagattcaaataagagagattttattaaacctttttaacgacgatgattatctgaaagctgttacagtcggcacaggttcaccgaactcagtatcaattcgactaagcaaacccaagaatgcattgagggagtattttaatgattaa

SEQ ID NO: 169014 - DNA, 1125 bp, Enterobacter cloacae
atgattaaacacttctctatttctggatttaagtgtttctctgaatgtacttttaatttcagaccccttactctgcttgcaggaataaatggtgcaggtaagtcctctctaatccaatcattacttttagcaaaagaagcaatgaaaggcactcgtacaatccctcttgatcttacttttggtgttaatttaggagtatcgagcgacgtcatcaactggaattgtattgatgaaacaattatattaaaattaagaaatgaatttaatgatgtttttgaatgtaaacttaaatcaccaaacgactctgcattatatcttgatataattgattcaataaaaaccggcgacaatgactttaacaaaggtaaagcgagattttttagttatttgtctgccgagagaatgagtccaaaagccgaatataaactttcctcaatgcatatcaacgacttagagataggtatttttggcgaaaacagtatacaattattagaggctttgggtagcaatcttattacagaacctgatcgtattcatccggaaactccaaaagatgaagcaaaatttttgttatatcaggtcgagagatggctttgtgatattgtgcgtcctttaaaaataaagtgtgaaaaaacaggatcaagctcaacagctatactacaattcaaaatgggatcaaacgcgtgggttaaagcctcaaatatgggttttggagccagttatgcattaccaataataattgctggattaactactccaaaagatggtctattaatcatagaaaaccccgaagcacacctccatccagcaggccagtcagcaatggggcagtttattgcatggttagcgagcaaaggcgtgcaaataattcttgaaacacactcagatcacattcttaacggcgtgcgaattgcgattgcttcaaaaaattcagttaaatctgacgatacaaatatcatattctttgataatgataacgatgcgcaaacatttcaggaattatatattaatgaatcaggaggcatttcttcttggcctaaaaccttctttgatcaatttcaattagatacagctgctttaggacgcttaagacggagtaaactaaaaaatggcatttgtaattga

SEQ ID NO: 169015 - DNA, 1005 bp, Enterobacter cloacae
atggcatttgtaattgattctttaagctggaactttaatggtttagatgttggtcacgtaactgaaaaattagaaggattattagcacgtcttgatgcatctacagaacgaaaagaagaattttattttggaagtaatttgcaacaacaaatagtttgtggtgacatggacttatggtccttcctttatagcgatctaatgcaagatttggataattcaataattacagagcttgcgtcatatcttaatacaggaaaatactacgaggacgaatatgatatttggcctcatggttttccagaatatgatgtttatgatattaacggtaatacagtctcactagattactcttttgtacatttcaataatgttactggcaccccctttgcttgtatatccttaaacaaaaccagcacaatatatctgttatccgaacaaaataggtcttcactgttcttcataacgaatgaagttgaacataaaattttttggcgcacaattgctctaacgacattacgagacacccaaagaaatctagaaatgatttcttctcattgttatccaaacttatattttcacaaaggagtttggaaaggtattgatgatttccgaggtggatatgctgcagtttatgataaattacagcagtatttatccgtcttagatgattatggtttctgggcatttaaagccccccctcctaatatcaaccctcaggatcccgttcctgataacatcgatccattgttatcacctacaaatcaattaatacaaaatagattctcagctttgggtattaccgtcaccccagaaaaaccggaggttaaagcaaataaaaactgccgagaagcgagagagataaacattgggacaaaaacattatattgtgaatggcacggtaaactcgaactccataagaataggattcatatataccctcctatagaagaaagtaatggtaaagttatcatcgctatatttcacgatcatttagcattaccttaa

SEQ ID NO: 169016 - DNA, 471 bp, Enterobacter cloacae
ttgataaataaaatagcacttttctttattatatgttttttagggttgctggtgctgatttctcatgtcatcccgatacgaccctccgtaaccattataaattatactaataaatctctgtacatctacgcaggtgagagtatttataatgtagaccctgagccagatgaagttgaaaaagttgtaaaggcaaaacctgaagtaatagcacctggtgggaagggagaattcaaagcttcatttatatctctgttcagaaaagacgcggcgatcgatatcggttggaggataggtggccagtatgaatataattcaaccggcggtggaggccagaattttattctttcttcaaaagagggggcttgttctttgtcgataaaaatacaaaatggatttaataatgacacgctagaaaatgctcctggtaatatgtgttttaaaaaaataaaagcattcaagtatgaatattaa

SEQ ID NO: 169017 - DNA, 630 bp, Enterobacter cloacae
atgaaattgttatatatatcagtttttctcaatattagtttcttcgctatggcctctattcctgaagctaaagttgaaagtgtttcagtaaccagagtattgacttcagattctaacgcagatatctcttcatcatccagttttgatgcatgcaatgtgcatttcagtgattacaaattcccagcattgtcagaggataagtactttgaaaaaaaatcaccaatatcagactggaattgtttatattctggtgaggcatttgaagggggatatgatacacagcaagttagcactaaaggagttaatgttagtagcgctaataatagaattgtttatgattataaaaataaggcatggaaattaacaccagaaacagtttatgtaaaaaatggaaatatcaatcatctatcccttgtgcaggtaaaaagtaaaaatgcatctggttttatggctgttaacagtatggcgaaactcagagatggaactttaggtgagaatatttatttctgcttgatacataaaaataatgctctatgtggttcaggcattaattcccctaatgataaaaatgaagaactctctaaagatgcgttgaaacttcttgagagtatttcattcgatgataactaa

SEQ ID NO: 169018 - DNA, 201 bp, Enterobacter cloacae
atgatttcatcctccgtgctgacgatgctgacgatgctgacgatgctgacgatgctgacgatgctgacgatgctgacgatgctgacgatgctgacgatgctgacgatgctgagttcaccacgggctatgagctctatcaaattattttgtgcctatgcttatatccttttcggaaaatctcaggcagctataaagttttag

SEQ ID NO: 169019 - DNA, 468 bp, Enterobacter cloacae
atgaaatatattaaattactaattgtgttgtttgtgtcgatggctttctccacttttgcaatgagttcaactgcaaaactaactcctcaacagacagtaacgaatttcattagtgactatgagcagtggaataaagaagctacaaggaatttaagcgagaatactggttttcaggcaaaagatgaatacattaaattactgagtagatattgcacgcaatcttcagacaggattggttatgatgtatatggacagtattctttacatgtagccaatagtgaaaaaatacttagcataaaaaaatacaatcaagaaattttaataaagacaggcgtgccttcaagatttggtgagacagatgccgatatggattattttgaataccatttagtgttgaaaaaaaacaagtatttaattgaagaagtgtatcaattgtcgaaatcagggaggaaaactaaaactttatag

SEQ ID NO: 169020 - DNA, 159 bp, Enterobacter cloacae
atgatgcagaagaggttacacggagaattaatccgggaagaatggcctttgaagacgtcagatggcctgcatttaagcatgcttggtatgcacttaatgattctacagaacaagaatccgattattttgccattaaggaatgagtatgaaatatattaa

SEQ ID NO: 169021 - DNA, 939 bp, Enterobacter cloacae
gtgatcaatacagagcatgaaacgctggtgccggcagatgcgccattatggatgacggtcagttacccgggggggaagggggtagtcaatctcgctgaccctggtattaaaaagtttagtgacgctgattttccgcactggacgggctggcaattggtcgatgacgatagtgacagcgacagccagtgtaattcagccgctatcaagaaacttcaggaagatggtgagtttgataaccagtgcgggaagctaatctgtcatttcccgttcgaatgggaaaaaagtacgatcgatacccgtttttcatggctgaaaactgggagtgacgaacatgacccgatgacggcagaagattatgcaaaatttaaggctcatgccgaagcgttgtgtttcgactccggggtattcagtagcggaagtctgtggtatttcaatcctgtaagttttattaaacatatgagactttgtagttggctaagcctgagcgatattattaaactggtcagaaagtatcaaagttcacctgtgtctgtttatgatcgtcgacatccattgtccattgatgaattgacgaaacgtttaaccgaggagggaacgaatagtgcaggagagtttaaacgtccagccgccataaatgaggcgctttctaaaatattaaataagtatggaattaacacaccaatcagaatttcgcatttttttgggcagatggcagctgaaacagggcgattcgatagtctagttgagttaggttctgcgaactattttgctttgcattacgatccggggacggatcagggccaaaagctagggaatactcagattggggatggtgctcgatttaaaggaagaggttctattcatttaactggaagagccaactacggtcattacagtgaatatcgtcaaggttcaggctctaattacttcactatataa

SEQ ID NO: 169022 - DNA, 513 bp, Enterobacter cloacae
atgaataataaaactttactgttaggttttattagtgcccttaattttttttcattgagtgcgtatgcgaacgatttagatgtatcatcggcagttaaaagctatacctacaaggatggagaaccttacggcctatcaaaagtatatcaaattgatgcaccagataccggttttcctccttattatattttccataagttaggtaaagggaacgcatatccatttgtttataatcgcgaaggactaccaggtaaagacgagccatacagtcaatgtaacgtagtgctaaaagttaatgaccactatgttatacctaacagaaattataaactggatatgccgaagattctgaaccatgcctcagcgtcgataaaatgcaaatcattaaagttagaaaagattttaaatggtatgtcaccgaggttttatatcagtcggagagtgatacaccaaataaaactaaagaagtatatttttattcgagcggtttttttgcttctcaaaagaaattag

SEQ ID NO: 169023 - DNA, 771 bp, Enterobacter cloacae
atgacgtttaataaagcatttttaacttcaatgatgtactttatggctacgtttagctcttggggtgcatattacaatactattaaagttgatggttatatgattggtctcaataaaaataatcaaggggtggttgatgtacatagtgaaacctcgaacgtttccgcttcatgtaaaattaaaaattggaatggaaagtactatttaggagctggaataatctctttgacaagtgataaagttggtgtgattgttgctgggagtaatatgtttttaaaaacaaaggggctggaggcttgtaataacaaattcgtaaatttatatagcgtagattatctagatcaaaaattatctactattgtcgatgttaatttcgataaaaaactgattctcgctttagttcccattgatgcccaatcaggggcgcatcaagcgataatatcaagttttgatgggaaaaagaatgttatctctgggaaaggtttttggaatccacgagttaaggatgtaaatatttcggatgatacatttcctgtaactgatgacttttacatcgggaaaatatcaactaatggaatgtacgttgctcctaatgatcttgattgttctgtaaattcttttcctggtgtttgggatgtagcaaaaaaaatgaaggttgtatttccatcagataaagataattcagttgttgaaagtaaatgccaagagctattttcagggagtaaaacactgaatgagttagggggaatgctcctccccaacaaaagttga

SEQ ID NO: 169024 - DNA, 2172 bp, Enterobacter cloacae
atgattatcagtcctccgtttctgagaaacagaactgcatcccagtctgatgccgactggactggcgcaatgatgccggtaaatacagaccagggattcccgttgaacggagcacaatcctggcatggtggtgttcacattacacatacagatagtggaacgccgcctgaaaaaatacgggcaattgctgatggcgtggtggtttcgttccgccagccatcgtcgtctaaagatgcagaaccactcaattatctcggacctacagatgacgggtttgtgttgctgaagcatgaaacggagacaggaagcggagataacgggaaggtcgtattttattcactgtgcatgcatatgaaatttctggaggcagaaataaaacaggatgcaaaaatataccgtaaagcccccctgggctcttcaggctcgtgcagtggacggaatgaattccatttccagattttctgtgatgacaacaatatcagcaagctgacgggcagaacgacccgtgaactggacgtgtcgaaagatggccgcactgatgcggtgtacggtgatattcatttttatctgccagcaggaacaacgttttacgacaaggcgccggcagataacagtacttctctgaccgggctttctgaactgtataccagcagtgcacctctgtatgtcagcatgaccctggcacagggcaactgtacgatggtgacccggcaaaaaaatacgcagactgacgggaagtatgacctgctgggcgagccgctggttaatgccgatggtgaagattatgaatacaatctttataaaaccgcgatgcggaattataaggagagccccagtgccggatttgaattgctccgttttggccgggtgatcaatacggagcatgaaacgctggtaccggcagatgcgccattatggatgacggtcaattacccgggggggaagggggtagtcaatctcgctgaccctggtattaaaaagtttagtgacgctgatttcccgcactggacgggctggcaattggtcgatgacgatagtgacagcgacagccagtgtaattcagccgctatcaagaaacttcaggaagatggtgagtttgataaccagtgcgggaagctaatctgtcatttcccgtttgaatgggaaaaaagtacgatcgacacccgtttttcgtggctgaaaacgggtagtgaagagcatgatccgatgacagaagctgattatgcaaaatttaaagcccatgcagaagcgctatgctttgattcaggaacgcttggtaacgggagactgtggtatttcgaaccaatatcatttattcgacatttcaggacatgtagttggctcgactgtgatgtaattgaaaaaataatggtagcaaatactaagtcaacggcagagttgcaaatcagtaagataagtgagaaggtaactgaatattactgtgatataaattccatacttaataaatacaatctttatagtgccaatagaaaatgccattttcttgggcagggggctgttgaatccggaagtttgctgttaatgcaggaggttagtcagcaacaactgatagagaatggtgtgcacaaaggtggtggaatcgttgacctatcaaccaaaaatgaagcggagctcgggcattggtatggagatttgacagaagaaaaagacgattatttttctggtaaaaaatacaattcaaaagggaatgttatcacagggtcctacagctggatcaatgggaattgtggtgatgttgatgcacagaaattcagagggcgtggttttaaaatgctcactgggctcgatacttattctagctattgggtatatcgagggtggctatcaataagtgactttgatcgatattggtgggatgatcctgaatacaaaaagaaaaacgcagccaaaatgaaaaaacgtagtcctcagatagactcgccacaaaaaataacagaaagtacttataattgcattgatactggcggtttcttcatcgttgggtttaaaggtaaaactgtgaaaataatggatggggataaaaatggcaaagcagatgatgatcaggttattgaaaatgttacctctgcaataaatggtgctgacaaaggtcttgcagagagaaaactctttacgaaaagagctaaggaggtgattggtgatgacgtttaa

SEQ ID NO: 169025 - DNA, 609 bp, Enterobacter cloacae
atgacaatgcaatcaggcgtgtttaataaatatgacccattagaaaaatggggaaggtatactgctgagaagatcgctacccttcctaaggaggaactggaattatattatattgcaaaatcacccgatatgaatgttgtttttctgaaagatgagaatggcaatgactggtatcaatggttaaaaaggctttcaaaagaaacgcttaagttatcttttaatcctgaatcaaaagaaattgtccatttttcttatgatgctagcgctatttttccgattaatcaaattgtcgttgaggttgatccagacaatgtgcctgatgagttcactaatgctggaaataatgcgctaggtggcgcgtttatttttgatggtgggaagataacccttgctccagtggattatcgggaagaagcacaacgcaaaaaactggaactgttaactcaggcaaataatgaaattgccatgcttcaggatgcaattgagctggatatggcgaccgagaaagaagctgcgaaactgcagaagtggaaaaaattccgtgtgttattgagccgtgttgacgtgagtaaaccggactggcctccattaccagattcagagatatga

SEQ ID NO: 169026 - DNA, 486 bp, Enterobacter cloacae
atgaatcagcaatacagcaatgaattaactccagcaatagtagccgagctggcaatgtcgcctttcactgcggaagaaattgccgcaatggacgatggagcacgcgcgataatcgcagagggaaaagagctggaacggaagcactctataaatgctatctggcgaatcgcaacggtagggagcatcacccgccgcgggggtattgttgccccggttgaacgtgaatcaaaactactgctggaaaatggccgctacgccagcactgccaccgccggagataccgttacttatcctgatggcagcactgccaccatagccaccagcgctggcgcaaccagtatgtgcaatggggcaggcgttgcgctggtgggcagcgtgcttgataacggtgacgaaattatcagtacaccgcaggggcacacttatctggtcacgcgtgaagggatcgcacctggggcggattttctgacagttaccggagcgtaa

SEQ ID NO: 169027 - DNA, 1698 bp, Enterobacter cloacae
atgggataccgtaccgataattacggccggggccaggcgcttgagaatgacaagacaaccaccggagccaggtgtattgcgtccattacagacagcatcgaatttgggcgcaggatactccgggtaggtgataaaaccactccctgccccaaatgcgggaaacagggcgtcattgtatcaggtgaagaacgcgtgacatttcacggggtacccgccgctgttcacggttcagaagttcactgtgattgccctccgggttcgaaccgggtgattgctccggcaggtcagtggctgggacggggacgggacccggttgaggttgccagggaagaacacgccgcaaagctggcagcagaaaaggaagccgaagaaaaacgcagggcggagggaagggaacgcaaccgggtattcgcaaaatcctgcctgcgcggtgaggggtgtaatgataccggtgaccagcgcgagccacataccaattttgctgatatggctttttttcaggccatgcccgccagcaacccggcaaccgattcagacgcaccgcagcatgcacagaccgcaaaaaagaaaaagccagaggatatccccaaaccgaaaaagcgcagcgccctgtatcgctggtggaacggcaaccatgaggagatggattaccaggccgccgttgctgccgcagctgcagcttcacgtgcacagacggccacggcaggcgcaagcctgctggagctgataagcggcagggcgctgacatacggcacctgggcggtacgtggtgccgccgggctgggtgagacagccgccgccggagcgggtgcctcagtggccgggctgctggtgggaatgatgcccggcaggctgaacgacggcgaacaggactttattgaccgtatgcgccttgcgcagatgcgtgaagccccaagtcgtgttcgttatacgtgggagaacgacagcagcgggaacgcggtcccgcgtggctggcacacgccacccggccgggacagtgttcgcgtcagaaaaatggagtataacagcagcgctcaggcgtacaccttcaccacggaggaagaaccgcgcgtcaccatcgtctggacgcctgatcggacaggtgaagaaaaaccgtggaataccggcaaccagacgcggccagtgctgccgaacccggtggttgttgacccgctgccggataataccggcataacggcaaccaccagcccggcaccggaggaaaagagtttcgcggattacattctgatcctgcccttccctgacctgccgccgatttatatctacctgagcaaaccgccggtggagtttctggaggtcgagctatacagtgactttaagcgccgttcacggcaggggaaatatgaggcggatcacatgccgtctgctgctgcggtacgagctgctttattgcgtgaaaatccacgtctcagtaaaaatctggtggatgaaatggcgcaggatgtggccgcaattattgttcccaaagaggtgcatcagaagatcagtgaaacttatggcgggcgtaatacaccaacgcaaatcgaactggactcacgtaacttgcgggctgcggtggatcataatctggatgcaatcaagccagcccttaaagcaaatggtgcaacagaaagccagatcgaagctgcaagagccaaaatgcacgaattgaatcgtaacgtggggttatacgaatga

SEQ ID NO: 169028 - DNA, 558 bp, Enterobacter cloacae
atggatgttctgcaaactggtggatttgttgtaaacacacttaccatgctagtagctattggctcatctacaatcagctaccttgtgtataaagatagtacttcgccggatgttattgtatatcttgaacagaacgaaaactcaaaaacaattttaaacatagttataaaaaacattgggaagagtgcggcggcggatgtaaagtttagttttgacagggcgttgccacgccatgcatttgaaggtgatgcatctagtaatatgacagatggcgcgtttattaaggaaataccatttttcgcaccaggagccagtcgcgtattcatgtttggcaattatgctggaataaaagattttattggcaatgggaaaataaaggttacaactacttttcgtaaagcaaacagtagaaatccattctcaagagaaatttctaatgagagttatatagagatacaatcaatggcttatgttgacgcttcagataatagtaactctcgtaaaatagctgaaaatttagccaaaatcgaaaaggcactggttaaacttaagcagtag

SEQ ID NO: 169029 - DNA, 2088 bp, Enterobacter cloacae
atgcaaaaatctgagtctgaggttttttccgagctggagtcattatgttcatctcatggttttattcatggtttggcgttattgagttgtattaataacattaccatctatgaagaagaactcggttctgaagatctgcaacatctgtacgaaaaagaacgattaataagaactgagatctctacagttgcaggattaatgttaaagtctgaaatcaataccaattatccggggggagatgttctatcgaagttatgcgaaggtgtaaatgcatctttggctgctttgcatacggcaatgttttcggctgaaaaggatggtgattacggcaattcgatgataaaagaaagtatcttttatgcggctgaatctgcttatgattttcaatatttagacatggctgaggaaaaatattctttagatgacgtttggttcttggaaaacatgggctttacatgtgctgaaatggtatctgtcggtcggtgcatagagtctattatggggaggcaaattagtgcttttatacatagtggtctaggaattcttagcgatcaagcattgaaggcttataaacttccatttgatcaaatagcgactgaaacaggtttaaatgtcgttaaagtaaaaaacattgttgatttattttcatcacacgagttttcaaatgaaaactttaaaggtatgagtgactttaatgtatttaatgctaggccgataatttgctctggcaatgaatattattgtttctctgcctattctttggctcagtctatatatgaagctccatttttttggatgaatgatgataagaaatacaggccgatatctgcgcaacatagagggcaatttgtagaagactatgtatacagaaagatggcatcggtttttggtgctgagaatgtattcaaaaatgtatatatagttaatagtaataatgaaactctaggcgaaatagatgtactggtgtccttttctgattcggtaataatttatcaggctaaatctaaaaagttaactattgaagcccggaagggaaatggcaatgctattcaaaaagattttaaaggtgctatacaagatgcctatgaccaaggtgttttctgtgctcaatttatattatctggcgcaagtctagctgatcaaaatttcaatcgatttaatcttggatcttcagtttctagatgttatatcgttccaattatatctgaacattatccatctttaagttttcaagttcgtcaatacttaaatactacaattacaaatgaaatttacccaccatttataatggatgtttttcttttagatgtattaactgagttcttaaatacaccactgtattttttatcttacattgatcgtcgttcgacatataacatgagagtgttttcttctcatgaattgactatcttttctttgcatctaaaacagaacttatggattaatgatgaatgtgacatgttcatgctgcatgacgatatatgtgttgatctcgatatcgcaatgttagttcgtaggagaggtatcaccgggaaacgtactcctgatggtattctaacataccatcaagacggttttgttagaaaaataattaaatcattagagtctgaaaatcataagttggcggtggaattaggttttcttttactttctttggatggtgataccattgaaggtattaaccaaatggcaaagaaaacgatatttctatcatcgattgacaagaagcatcatgatcttacaactgtaattggggatacaggttttactgttcattgtaattactatagtaaagatattgcggaaaaacaattacatgaacattgtatgaaaagaaagtacataactaaatgtaaaaaatggattggcatacatgttcggccaaaaacatatgctgtaaattatgggattatgttagattttgaatgggagtatttacccgagattgaaaacatcattactcctagtcggcttcaaaatactttagttaatgttggtggtgttatgactcaagcgaaacagcccgggagaaatgagccatgtttttgtgggagtggtaaaaaatataaaaaatgttgtttgcgttaa

SEQ ID NO: 169030 - DNA, 1731 bp, Enterobacter cloacae
atggcaacaggttttttcctgtatcacctggataaaaccacctgcggggggcgcattctctcgggtgcatccgatgatacctatgagactggcggcgtgatacgtcagcaggtccgggtcggcgacccggtgacttgcgggaagcatgaggggcgattccgcgtctgtggcggtatgggagacacctattcggtgaacggtgccccgaaagagtgggcgggttcactggatagcttcagctcctgcccctgccgggcccggttcgttccgactgtattttcacacacttatgaaagtgactgtaatgccgggcgcgtggcagaacgggagcagattgaaaaacgaacgaagcccgatgaagtgctaatcaatccggtccccgtttttgcgaaatcctgcctgcgtggagctgggtgtaccgacgcaggaattgggaacgaaccccaggcaaactttgcagcgatgagtttttaccaatcattgccagcctccccgaaaccctccccaaggtctgacggctgcgaaccggaacagcacgcacaggcggcgaaaaaggctaagacctcctccggggaggcagatgcagctcctgagaggaaaaaatccctcttcgacagggtaagcggcttcttcttcggtgaagcggaagctatgccacttcccccatctccggtggtaatagccggtggtgcggaggcgggtatggctgcatctgctggcggagctacagcaagactgaatcaggacgcagcaaaggcgttgacgtaccagatgaaacacctgtccgggccagcggtctgggaaagcaggtttgagctgaatttaccgttcgtggtcatgggtgcggtgctgcactcaatgctgaaaggtgaaaaatctgacctgttaacagctgaacaactgctggcagtagcccgtagcgacggtacggtgccaacgcgggtacgctataactgggtggaagattcggaaaccggacggctgaaggccgtggggtatcacaccagcccggagagcggacgcgatcaggtgaaagtcaggctgatggataagcggtttgacggaaaataccgcttctggggcaacgggccgggcggaaaggtacagataacctggacaccagcggatgcaccgggcagtacagatgccagtgggtggaacaccgggaaccaaagcccgcaggtcggaacggtagcgataccggggcttgagcatcctgacattcagggcgtgactatcaccaccacgccaccgccagaggaaaaggacttccgggactacattctggtgtttccgggcaacgtccacccgccgacctacatctatctcagcaagcctcctgtggaactgcttgaagtagacttatatagtaacttcataggtcgagcacgaaacggtactcatgctgatcacatgccctcagccgcagcagtacgggcctacttacgacgcgaattcccagacgcaaaaccggccgaaattgaccgtatggcgaaagacgttgcgtccatcataattcctgctgatattcaccaaaaactcagcgccacttatggcggcagaaatagccctacgcaaatacagcaagactccagagatttgcgagcagctgtcgaacgagacattgagaccatacgccccgagcttaaagagcgtggcgtaacagatagtcaaatcgatgaagccaaagctaagatgcatcaattaaatcaggaacagggattatactaa

SEQ ID NO: 169031 - DNA, 453 bp, Enterobacter cloacae
atgaaaaaaataattcttgctgccctgcttctgcccactctcgtatcagctgcacagaagctaccccctgaggcatccgccgcccttcagtttaataagtggtacatctcgcagattcttagcgggaaagagccaataaaaaactatgaagcgctgagccgatacgttacccgcgaaacaatcagcaaactcaaagccatggataagctggatccggatgaatatgacgtgcctgacgtcgatatgttcataaaggcccagggatatgatgatgactggggcatcgtcagtgcgcgggcattagattacgatgccgcatgcatgcaggtgtatatatcattcggtaaaaagcgggatcacaccgtgattgactgcatggtcaaagaaaatggcgcatggaaagttcagtccgtggcaagcgtgaatatttctgacaacctgagcgcagaatga

SEQ ID NO: 169032 - DNA, 726 bp, Enterobacter cloacae
atgcgcaattacaagtcgttgttaatttccagtaggcttgctctggcaggcttgctgatgacgtgcctcatcgctgaggcctatgccgtggttaacgtcgatcggactcgtgtgattttcagcgctggcgaaatggcccagtcgctgaatctctctaacgatggtgaaacgccagccataattcaggtctggacggacacgggcgatccgctggtgccgccggacaaagtcagcacgccgattgtgtctactcctccggttttcaaaatgttgccgaaggagattcgctcgttgcgtttgctgcttacggcacgtcaggggctgccgaacgatcgggaaagcgtcttttggctgaatattttccagatccagcctgagagtgagcggacccggcagaacgcgcaaaagttaattctgccgttacgcttaaggatgaaggtctttattcgtcctgccgacatcggcgatcctgatgctcttcagtatcagacgcttcagttcagcgctcaggatacgcggttaatcattactaacccgacgccctggaatattagcctcaacgtggagattcccgggcaaaggccgctgaccaatattatggtttcgccacgggcggaaaaggtgattttgcctgataagccactcttgccgggaaaaacaatagcctatcgtgtgattaccgacgacggtaattatctcagttatcaggccgttgttcgacaatag

SEQ ID NO: 169033 - DNA, 1332 bp, Enterobacter cloacae
atgcaggacaggttaaaacattttctggtgctggggctgtttttgctgataagccagcccgcgtgggcaaactgcatcagggtgaccagcacgtcatcactctccagcatggccatcgcggcagggtatactgccgccgactggtcgggtgcatgtgatacctgccatggcaatattgggctgccggcggtaatcaacatcaacagcggcactaactttcagccgtcgggaacgttgcttgccagcgcggtgggcaattttttaacggcagcgactaataaaacctatgccagtaatcaaattctgttccgctgcgccctgtctgacgccggaagtttatatgaaatgtatgccaccaacggcgataacgcctataccggcatgtatgcctccgctgaaattgagggtgcgtattatgatgtcgcaaaaaacgtcgccgtaagaatgaccaatctcagtaccggggaatattacagccgctactggaagcaaagacaaatcacctcggcagactggtatcaggatggaacctatatttacattccagccagcgcattcagcaatgtgctgtatgaaatgtataagatttcatccaccacctattatcttaacgccagcaattactataaagatgcctatacccaaccgcgaggctatatagcctttaaaggccccgggctggcatcaaattcaatcgtggtgggccaggatagcgcgatttattattatggctggtatacaaactggcccggcgcatggagtacctacaatgccgtgacctacgtccgtggtgcactatgtcaggttaaagactatcccgccgttgtgcttttacccaccgtcagctcctccgcgttgcaggccggaggtacaagtcaggctccgttctcggtcagcctcgagtgcgagtcaggcgcggtttccggtaccgccacgtccacggccagcaaggcaaacgtggccatgggctttttagtcaaccagcccgttgctgtcagtgctgcgcaagggctggggctggtgaccagcggtgggggtctaacctggctactggattcgcattacggtaacagcggcgtggcttctggcgtgggtataaaaatccttaaccggagtgggacggcaatcaatttgttacccgacagaagcataaccggcacgggaaactcgcgcggctggtatgcgtatcaggatcttaccagcctgacgtcgacgggggcggtaaacacctataccggtgattttaccgcatcattagaggccctcagtgggcaaactgtgacgccaggtacggttaatgcgcaattacaagtcgttgttaatttccagtag

SEQ ID NO: 169034 - DNA, 2568 bp, Enterobacter cloacae
atgggcactaccctgtctcgtacccctgagtttcgtcgcaatctgctggcgctgtgtatctcgttgagctgcacggggctggtggaggcgaaagaatatgtttttgactcttcactgctgcagggctcgtcctggggcatggatctggagcagtttaaccggcatcaggtcgcacccggacgttatctggtggatgtatacgtcaacaatacgctggtgaaaagcgaagaaaagatcgtcttccgcgctaaagcagatggtcgcgatcctgaaccttgtctgggcaaatcgctcatgcaggccgcaaaactgaaagcagcagaccgcgatgaggggacagcgtgtcgccttttgagtgagtgggctgaacatgcaacctggctgtttgaccaggcctcactgcgccttcagctggctattccgatgacggaactccagcgtacgcctcgcggctatattccggtaagtgaatgggacgcggggatggcggcgatctttttgcggcataacacccgctacacgttcacggaaaatacagacactcgctaccgctatcactatttgtggagcggcatcaatgccggaaccaaccttgggctgtggcaggttcgacatcagggaaacctgcgctatgcggacagcagcataagtggaagcgattcgagttataacgccgttcgaacctgggtacagcgtcccatcgaaccgatcgatagcgtgctggcgctgggtgataactataccgacagcagcctctttggcagcctctcgttcaatggggtgaaactggcaaccgatgaacgcatgtggccgcaggggaagaggggctatgctccggaagtcaggggcgttgcatccagcagcgcacacgtggtgattaagcagctaaataacgtcatttatgaaaccaacgttccgcctggaccattcgttatcaatgacttatacaacacccgcagtcagggggatcttgaggttgaggtcattgaggccagcggaaaaacatcccgttttaccgtgccttattccgctgtgcctgattccgtgcgtccgggcaactggcaatacggcctctcattcggacgcgttcgtcagtactacagtattgaaaacaccttcatggaaggcgtgttacagcgagggctgagcaatgaagtcaccagcaacctcggcctgcgcgtggcaaaggactacacggcttttctggcagggggcgtgctggcgactgaaattggtgcaattggtctgaatgccacctggtctgatgccctggttgaaaatgatgaccggcagcagggatggcgtgctgaaatcagctacagcaaaacgtttacggcaggcactaacctcgtgcttgccgcataccgctattcgacgagtggttatcgcgatctggaggatgtgctgggcgttcgccgccagcagaaaagcggtacggagtactattcagacaccctgcatcagcgcaatcgactgacggcgacggtcagccagccgatgggaagctggggggtacttaatttgagtgccagcacggcggattactatagcaatcagtcgcgtatgacccagctgcagctgggctacagcaatcagtggcgacgaattagctatgggatggacgtagccagacaacggacgagctgggactacggacgcttttataccagtactcgcgagccggttgatgacagttcaatagagaaatacaccgaaaataccgtctccttgaacgtgtcggtccccctggactggggcagcaacctggcgtcggtggcttacaactacaaccagtcgcgcgccagccgctcctcgaccgtatcgctaaccggcacggcaggggacggtcgtgacagatcgtactccgtgtacggcggatatgaacgttatcgggatgggagcagcggtaacgccacgacgtttggtggaaacgttcaggaaaatacccgcgtggggtccgtacaggccagctatgaccagggggataactaccggcaggcagggcttggtgcatccggaacactggtgctacatccgggaggattaacgctcgggccgtataccagcgacacgttcgcactggtacacgccgatggtgcccagggtgcgcgcgtgcagaacggacagggggcgactattgacgcgtttggctacgccattctgccgtcgctttccccttaccgtagcaacaacgtcagcctggactcgcgcactatgatggcggatgccgaactgaaaggtggaagtcagcgcgtcgtgccctatgcgggggcagtggtccgggtggactttgccacgctgaaaggcaaagccgttctcattactctcagtacccgtgacggagaactaccgccaatgggtgcggaggtgcgggataccgagggaacattgattggcatggtggggcagggtggccaaatttatgcccgcgtcccggaagcctccggtgtgttgcgcgtgaaatggggcaaagagcgcgaccagcgctgccgtgtgccgtatcaaattaccgggcgaaacgcagatccgttggtttacctgagccagatatgtgaaaaggaaaattaa

SEQ ID NO: 169035 - DNA, 762 bp, Enterobacter cloacae
atgataagcgcacatcttcagcgtatcgctcagtacctgacttatttgatatgtgtactgatgctggcaaacaccgcatccgcaagcgtcacgatactgggcagccggattatttatcctgccggggcctcgtccgttgacgtgcagctcaagaataatgatgacattccttacgtgattcaaacctggtttgacgaaggtaatgttaacgcgactccggctgagggcgcgaaaatcccttttctgacgacccctcccgtgtttcgaatccaggcgaaagcgggacaagttatccgcgtgacccataccggcgcgcgcgatttaccgcaggatcgggaatccctgtactggttcaatgcgctccaggtcccaccctcgaatctcgagagtgaaaaagggcagaacagaatgctggtcatgctacgtacccgggtaaaagtgatttaccggccagctggcattggctccccaaaaaatcagctgaacgggctgcgggtcaacaccactttcgatgcgcaaaagggatatgggatttccatagagaacccgcagccgtggtatgcgtcattaaccctcattgaggctgaggcgggggggaaaaagcataccctcacagctgatacggtagcgcctttcgatcgtcaaacgttttggtttaacaactggaaaaccaaaaccgtgggaaacggtacggtcagggtatggcttgttaacgatcagggagcacggatcaatgggcactaccctgtctcgtacccctga

SEQ ID NO: 169036 - DNA, 537 bp, Enterobacter cloacae
atgaacaagaaaaatattattgcgttagttctgggggcgtcactggtctctggtggggcttttgctgcgtctgacaacaccatcaccttccagggggaggtgacggatgaaacctgttcagttgccgtaaacggtaacagcgcctctccggtggtgttattgccaacggtcagcgcctccgatcttgccgccagcggtgatactgtgggatcggtcacgtttgatatcggggtaagcggctgcacgggcaacgccagtggggaaacgaaaatctcgacggtgtttgtcggtaatcaggtgacgtctaacggcaacctcggcaacaccggcactgcgaagaacgttgaagtccagatcctggataccgccaatgccgttgtgaacctgagcaatggctttaccggtaatggcgacctcaagctggccgcgaaccagacggacgcctccgctacctataccgcgcagtattacgccaacgcagcggcgacggcgggtacggtagaggccacgctgcaatatgccgtttcctatcagtaa

SEQ ID NO: 169037 - DNA, 831 bp, Enterobacter cloacae
atgaaatttataatgaataagcagataatatttgactcagatatgagtacgctgggcctcgaaggttctcaggatgagttgattcaaatctcgaaccctacgaagagacttttattgttgcttattgcccataagggagaggcaataaaaagggaagtaatatttaagaaagtctgggacgactatggcatggtttccagcaacaataatcttaaccagtgcgtaagtaagttacgtaagattatgaagaatcttggcatggatgaggaggtgattgtcaccgtacccaaaataggctttatgctgcatcagcacgttgacatcgaaaaatgctcagagccggttgacgtcatcatgggggccccttcagaaaccgaaaccgcttatattgccaacggacgtttactaaaaggcaaaactgccgaaagcagcgcgggcgaagtatctcgctggcgtacgatgaaaacaggaatagtaaatcagctggtgctttttttcgctattgtggcgctgggcggggctgcaggattctgggttgccagtaagcccgttgaacgtaatgagatttacatgggaaatgctggctcctgtaaggtcatgatgtctgaacaggcgctggacagtataaccaatcctgacgtaaagaaggtcgtgatggatttagcggtaaagcttaaccccgtctgtaagagtaatgagtatgtcctgatcatcaaaagcagtacgttcaaaacgtattcttccaatctctcgcgtctctattttatgcgttgcggcatgttgagtgacggcaaagaggagatatgctgggggttattgccaccacgctga

SEQ ID NO: 169038 - DNA, 696 bp, Enterobacter cloacae
atgaaacgttttactattcgactgcagcccataatgtcactcactacgaggcaactctgtggatatgaagtgctgtctgagcctcccactgaggacaatattgcagagtggtttgaacagtgctcatccgcccaactcctgcagttgagaacgtggcagctcaagatgcttgaaagtcaaaaaatcaccgtaaagctctttgttaacctcaccacaaccattctcgccagcgaagaggggaccgcggcgcttctgcaaggccctttaccgggggtcgttgagcttcaggacccaatggcaatcgcccgtcttgacgcgaccaggctcgcattactggataaaaatctccggcggcttaggcatgccggtatggaggtctggctcgatgattatctcagcgactatggcagtacgcttgccgatagcgggctggaattcgatggggtgaaactcgactgcgctgcgttccagcagtatcgcaacgatagcgcgggtttagcgcacctgatcgctgaagcacgacgtttcggaacgttcgtccttgcggaaggggttgagagtcagggagacgtcagagcggcatcgctggcgggggccgatctggcgcagggattttactggccggagaaaaaaatccatgcggtgcaggccccgtcggttcaaaccctccagagacaaatgcgcaatgtcacataa

SEQ ID NO: 169039 - DNA, 384 bp, Enterobacter cloacae
atgaattttaaaatgagttggacactggacgaaattggtggcaataaacagatccaaaatttggatatggtattaaatcagtttgcacaaatgcagggaaaaaaaggaacccttactcttgatatactgaatagtagcgatgatagcgctgaaatgcttcagattagaacggagaatggttattatttgataacattaggtgaaattgttgaggatgaataccaagtaagaacgtactgggattcatctaaacctgatacaggaatagtgattcttggagattactggccagagtctcagcttacaaaagactctgaatttattgtaaagatcttaaaagagttttttgatactggcaacgtatcaaaggaacttcttagttga

SEQ ID NO: 169040 - DNA, 246 bp, Enterobacter cloacae
atgatgctgagtttggatcgccgcaagcgcgtcctctatctcaatcagctttgccttcgtccgtttataatcgtcctgcaaccgctgctcctgctcgttatacgccaccagaacgatgcaccctttcatgacctttaccgtgacctgttgtccggtatcaaaacctgctgtgcgcagccacttgccggaaaggatgattttcggcgtggatttgtcgaaaacattcggacggtatcccacaattaa

SEQ ID NO: 169041 - DNA, 576 bp, Enterobacter cloacae
ttgaacagaacctcatcattaagtgggggggggatgccaacaaccttgatgttaaggcatcgtgatgatcactatgattttgtaactaaaagtaggtatcatcaagcaataaccgcaaagttaggtattcaaattccatcgcaatcagaggagataagtgatcctggaaaggccgatgaaatatatataggtatatccagaagattaagggagttaactagaaataataaagggttgctttttaacgaaaatatatcttatggatttcatcggaatatgacagcaatgaaaatcattggattatcaacaagttcattaggtataatttatggattaattattgctaaagtattaacaataatcccaccacatatagaattaatacattttgctaatccaggattaccagcctctttgactttgataatctccttcacactccttttttcttggggtttttattttaatgaagagtctgtcaaaagaattggctatgtatatgccgaacgtttatttgaaaatttacttagtgtgaaaggagggacatcaaaaaggaaagtaacccctgtacaatga

SEQ ID NO: 169042 - DNA, 903 bp, Enterobacter cloacae
atggctatcgtcaaaagcttttcagttggtaatggagatatgtgttatatccaacataactcagataacttttcaataattgattgcgacatctcaagtgaaaaccaacagagaatcatttctgaaataaaagaaaagtcagcatcgaaacggattacacgctttatttgcacacatcctgatgacgatcattttggtgggattgaacatcttgatgcagcattaggtattactaatttttatgtggtaaaaaataaggctataaagagacatgagacagagtcttttaaacattactgtcgtttgagagatgataaaaataaagctttttatatatataaagattgcaaaagaaaatgggcaactcatggtgatgatgaaagaggtagttccggcttagagtttttatggcctgatacagaaaataccgcctttaaatcggctttattagaagcagaaataggattaagttacaataatacatcagctgtgataagatatagtattgtagatggacctagttttctttggattggtgacttagaaacagatttcatggaaaatattagcaataatattgagcttcaaaaaactacaatagtgtttgcttctcatcatggcagagaatcaggaaagataccggattcatggctggaaaagttagatcctcaaataataattataggtgaagcaccttctcgccatctcaattactatactggctataaaactataactcaaaatagatgtggagatataactatggaatgtgatggtaataaagttcacttttactcttcaaatgataattatgtgaatgcacatttagatgatgaacataaaaatacattttctaattatataggaagcattacagtagaaactcaatatactgttgaatag

SEQ ID NO: 169043 - DNA, 189 bp, Enterobacter cloacae
atggaaaaagtaaaactgcggctctatcagtttacgctaatgttgaaccttatttcgcttgcgctggcgctgctcaattcaggtaagcaacgagagtttttctatattgcggtttatgccagcaccatcggcttagcgtgtgaatataaaaatatcactgcacgtcctttttctatcttgaccgtttaa

SEQ ID NO: 169044 - DNA, 534 bp, Enterobacter cloacae
atggaactgaaaacagaatactttcctgcaggagtactcggctacaaggcctgcaaatataaagcaaaagactgggattctacgaaatatcttaacgaaacaaaaaatgatgcggaatggtctggattttatgtcggcagtacggaaacgctgacgctaggctatatgtcggattgtgccgacacgttggggaatggaatggcctaccttaatatcgtcaacattaatacacccgcacgtgttattgtatgtcacgatgagaggtttaaatcgccaacgcatgataaatcagaattactaagagagcttaaagaagccatgcgcagaatggaaattcctgttgcggataacgattttctcatcccaacgctatcacgctatcgtttctactttaaatgttataacaatgaatacagcaacgatatggaaatcattataccgaacgatctggttgataatgtaacactgaaaagctataaacagcaaaatttcataaatggggtcggccagacactggtcaattatgtcaaatag

SEQ ID NO: 169045 - DNA, 483 bp, Enterobacter cloacae
atgacgttatctgtcgctttaaaaaatgtgcttttgtttgcacctctgctggccgttatgcaagccaatgcagcgttacccacctgcgagaatgagattaaagacgttaacaccttcctttctcttcagggaactgcccaaataaatgatgtggatggtcttgcaaaaacattgcgcagtctcacacaaaccgggcgactgccgtcccgctatatctccagcgatgaagcgaaacgcctgggctggtcgggtaatgaaacagaaacactttggggtcttaaacctacgaataataaatggataggtggagataactacaccagtccaaaacttccctcagcgcaatcctggtttagcgccgatattgatgttgttaaaggatatcgcagtgccaaacgcctgatctataccctttccggacctcagcggtatatcaccaccgataaatatcaacacttagtggaagtggcagcctgcaattaa

SEQ ID NO: 169046 - DNA, 1344 bp, Enterobacter cloacae
atgaatgatatcaatttagagttagatcaatctttgggtcaggtatggacacctgatgatattgcatctttaatggtgaaagaatgctttagattaaagcccaacattaaaaatgtgctcgatccatcttgcggtccgggcacgttttcaaaagctatgggggaattaggtaataatggattttcattagtatgttatgatgttgataaacggatggttcaagttacatcaaatatcaatgtccaccatgggttaaaagggaatacttatcatgaagattatttgaaagaacgtgatttggaaggcatgtttgatttggttataatgaatcctccttatatcaggcaagaaaaaatagccaaaaataataaagaggattatatttcttacttgaatggaagaattgatggtgaaatagataaaagatcaaatctttatgcattttttttaattaaagggattgtcgatttagcagaggatggtctactgtgcgccattgtatatgatgctattcaaagcactaattacggaaaaaaaacactctctattcttaatcgttattgtgagcttatcttagaaaaaaatattcatgctccatttaataacgtattggtggatgcaaaaatattaatatatcgtaaaaggaataaaatagtatcaagagtaagtactgagacggaatgccatgatgggctggtaactttagaagaactagttgaaactagacggggcacaggattttcattaaggaaattatttattgctcagccgtctgattcaatattctcattatcgtctcctttttttgtaaaacaagcaaaattaagaggattggttgttgaatctgatacctttgcttattttttcaatgataatagctctggattaaaacttgcccatgaatggcttgatcaaaaagcggaaatgatgggggtcgagctcaaaaaaatctcctatccaaaagttataggaagtatacttttcaactactatatgcgagacaaacctcgtcatctatggaacccagattctattccagcatccgataatttttatgtatcaaatgtaaaacataattttcccggacaagttgcttggttgcttttaaatagcgattattatatgtcctctatattgaaagcttcgaggaatcaaggtaatgggctatcaaaaattcagctttttgaatataagaaaattagagttcctgactggagaaagctttctttagagaaaataaattttttacgagagattgcggatggtttgatatcagcaaatgctgattatgatacagttaaaagtattgctaataatcacataaaagggatattttatgagtag

SEQ ID NO: 169047 - DNA, 1116 bp, Enterobacter cloacae
atgataagtaatattaaacctactgttgctggtctttttgttgggtgtggaggtttagattacggctttcaaaaggctggatacgagttagtttgggctaatgaaatctctccagatgcagcaaaatcatatactctcttaactgggcacagcgtgttagttgatgatgtttggaatgtgattgaaaaagttccggaaactgacgtaattattggtggaccaccatgccaatctttctctttggtaggcaagagattagataatgatcctagaggagagctagtatttgcttttcagaaagttattgatttgcgacgccctagcgcctttgtcatggagaatgttcctggtttacttgcctccaaaattaatgatgagcgtttacataactatctggcgcgacagtttgacgagatgggatatgaggtgtcgattttaaagttgacagctacagatttttttgttccacaaaaacgtcagcgtgtttttatggtaggtgtaaaaaaaggtaatcgaactttcgaactcattaatgaagaaaaatatggctcaattcttggatttaataaattatcttgccctgtctccgtttctgatgctttggacgatctacctttagtttcaccaaaaggtcatattggctcttctatttactcttccgcaccgcattcagaatatgctaaattaatgcgagaggacaattcagattcagtttttttgcattcgcttcctacgatgtccgaacttgataaagaattcgtaaaattcattcctcctggtgggaattacagccatatcccagatgcaatttccacgagaaggatattatcatttaagaaaactggtggaagaacaacgacatatggaaggcttcatcctgaaaaacctgcttacactattaatactttctttaaccggcctaatgtgggagctaactatcaccacaatgaattaaggttaataacggtacgtgaagcactgcgcttacagtcttttcctgatagattcactccattttattcaaatcaaaggagtttacatatgcaggtagggaatgcagttcctccattgatggctcgtgcggtggctgagtcactaaaaagtgctttaatatga

SEQ ID NO: 169048 - DNA, 3762 bp, Enterobacter cloacae
atgcgtgtcaccgcaacccatctagtccaatggtcagacaagcgtgaagcacaaggaatgcttccgatcctagtaaggcggcttatatctgttacagcacgtatcacatcaattattatgcccggtggtgattcagttaatgttcctggctgggatggagttgtcgacgttgctcaaggaaatccctgggtccctgatgggctcagctactgggagctaggcacctcaaaagatccggcatccaaagccaacagcgattttgagaaacgactgaaacagatttcaactggtcaaaaagcacaagcaacctttgtttttgtaactcctcgtcgctggccaggcaaaagtatttggcaggagcaggcaaggaaaaaaaatgcctgggcggatgtactagtttgggatgctgacgatctggaagcatggctggaaacctctccagcgaccagtttatggctaggcatgcagcttgatattgctggtcatggcattgaagcagtagaaaactactgggagcactggaaaaatcaatcctgccccgcaattactgcacctgtgctatttcatggtagagagcagtcaaagcttacgctacaaaacaatattaatcagcatgacccgctgataactgtaatggctgacagtcagtccgaagcagttgctttcgtttgcgcattgttgattgaagaaggccatttcttacgtgctgcctgtataacttcagaacaaggatggcagtttattgatgctaatcccggcattgaattggtggtcattaccaataaccagttgagcaagcgacgagccccacgcgaaggtatgagcttaatagtaccgatggcatttggagaccaggccttcaatctcatgggaattgggtgccaagcaatagatcagaaaatagtggaacttagacgtccgcaacctgaagagtttgaaaaatccctttgcgagcttgggatcgcatcctctgatgccgtacggtatacccactcactgggaaggtcatggacggtttttcgtcgatggaatgcgctaaatcctgtgttcaaaaaaccagattggattgaaggtgccaacgccaaaaatttgttgctacttacccttgtgggtgcttggaatagcgactccgaaggggacagggcttgtattgagcagattgccaaccgcacctacgaagacattgaaaatgagctattaagtttagctgcgcttgatgatgcaccagtcgtaaaaataggttctctctggaaagcgaaagcgcccatggagctattacatctaatggcccccaaactaacgaacaccattctggcaagattctttcaggtagctcgagctgtattcgaacaaccggatcctgtgctggaactggaagaggacaaacgatggatggcctcaatctatggcaaagttcgcgaacaatccggtgttgttttggaggctatggcggaatcaattgccaaactcggctatttttcagacaattttcagcatgttgttattggcaattctgtacgaggctttattactcaactcctggaagatgccaatgaagaacgttggctctccgtttcatcctttcttcgagcgctagcagaagcggctcctgatgagtttctgaacgctgttcaaaacagtttgcatagccctgataaaccagtcactcgcctgattacggaaacaacatcatcagggatatcaggccgctgctggcatgccaacctactttgggctttggaattgctggcatggtatcccgccagactcggacgagttgcgaatatccttgcggaactatcaaatatagaaataaaggggaattggggtaatacaccatttaataccctggtttccttttttcgctcttggtatccacaaacagccgcgtccgtcgatataagactccgagtgctcagaaatgtcgtcgacaaatatcccgaagtagcctggaaacttttgttggccctactacccaaccgacatgatatggtttcacccaatgcaaaacctcgctggcgtgacgatgatgcgggcactaacgagagcatcacttatggtgagattcaacgattcatactacctgttgcagatttattgttagagaaagctcaggacaatgcccaatatatcgctgatcttgtcccgaaaataaatgatatggataccaatttcagagaaaaggtaatcgaactggtaggtaaagctacaactttacccgatgatcagcgagaaacagttcgcactgccgtcagacaatttctgaactgggaaaactcttttaaccaagacggtgataaacacgatcgatattcagctgatgtgttgagaccattttttgacaagctagctgcggatgatctggtcgtcaggcattcatggattttctccaatggatgggttgaactcccagacgggcatgaagaagatcatgaaaaagcgaacaagacaagaaatgcattgcgcaccttcgcccttcgagaaatattccaagcattgggttggtctggtattcatagactagctaaacgttgtggagatccgcgacttgttggctgggagcttattaaagaaccattcgaacgtgaagaaatggcggaatggctgtgtcaatggtatctggaggcatcacagggttcatcgttatatgattcactgaccagcggtgtactttatgcgctacctcaagcagaactccttgatttcctcgatacatgcttatctcaactcgagcaaaaatccgcctcttccgaaaagatggctggtttcatggtaaatgctccgcaaggaatgaccttgtggcaacttattgaaaaacaatatcaaatgcttctcgatcatttctggttgaatgttcgaccgtcttatttccagtcgaataaggagcaattgctcttttgcatcgaaaaactacttgccgcaggaaggccgcgaacagctataaatgctatgggagatcgttctagtgacttaccaggggagtcgctaatcctgattctaaaaggcatcgctgctggccaagaagaagatgccgaattccctcgttcatggcacatttctcgtatattcaaggcgcttactgacgcaggatacaatcctgcaggaatggtaagtctggagttcatttactatccactacttaaaagagacgaatatggcgcaccatatttaatggctgaaatactgggtaatccggatttttttatagagctcatctgtctcgcttacaaacctcataatacagctcgcgaacctttacctgagcttctacaaacagcagctcgaacagccagtagtctactccacgaagaacacggcgttcccggtatggaccacaatggagaaataaatagtgagttatttttctcgtggatcaacagagttcgagagttggcaaaagaaaacgatcgggaggttgtcacggacctgactatgggagcttggttttctgactggcctttaaataaaaatgttgaatgttggccacacccaatcattgccgatttattggatcaggatgaatgcaaagacattaggcgaggtttcaaaaccggagttcataacactcgaggtgtcactacccgtatgccatatgacggtggaacgcaagaacgacaggtttcggaaaaattcagatacttagcgaaccattggaaggatactaaacctaacgttgccatcatgatcgaagctcttgcaaaatcttacgagtatgaagcgcagatacatgatgaagatggtttatggaatcaagaatcatga

SEQ ID NO: 169049 - DNA, 315 bp, Enterobacter cloacae
atgcacacacgaaacgtcaacgtcaaaaccgccgctcaagaatcttccaggaagatgggggggaaaaccgtgtcgtacacgatcctcgtcgctgagacgaaaaaaaactctgaggaggaatcggacgttctggagttcagcagccttgcagagctgaagaaactgcgcagacgctgccccgaaacaatgcgctgcacctatttctacgccctcagcagcggcgtcgataaacagttccgccatatccatgtggctgaagctgaccacttcaaacagtttgtgcgcctgatcgagcgcgaaggcatcgacatttaa

SEQ ID NO: 169050 - DNA, 651 bp, Enterobacter cloacae
atggtgacctcacaaaagattaaaatttcggtgaaggtcgtggctttttctctatgcgttatattactttcaaaccatgaagtatcttcatctgaatatgctataaatgttgttagtactttcgaggagaaatatatggggtgcgacaaccaagtctcattgcttcatgctattgatgctgcaacgaagatcatttcacaaaaaagttctattgaggagcaactagaagtatataaaaactttttcgatagagcagcacctcattatcctaaaaatggccccatagatagatattatttttcccacaaacggaaaattgaggtgaatttcttcagagataatagttctggtaaatggaactctgcttacatttcatttgggacttgtagtgaggtacttaaaaatggaggtgcattgaattttgataatatcaggagggcccagttgacattcgtaggtctatatgaaaaagaaggaaagttcccagatgaaaaaggaaataagaaaatatataaatttaaggtcgcacgatatcgttataaatgcgatattatcgttgattttaaattaagtaacaaagaacagagtaaagaggtatatccagtgagattcactcagatatatatatcgccgcgtgaattaattgaatga

SEQ ID NO: 169051 - DNA, 765 bp, Enterobacter cloacae
atggatgtttttgatcaagaaacgtcatcatccgctgaattatcttgggcggaatcatcaaatgatataaacataacaaatgtacaaataagaagaaagttatatgttcttactgttggttttgaagtcaatcatccaagtgcatttgtcgatggagttcaagacctttcaattgattatggacatgcttttttttatgttactaaaaacgatatagttgatgttttttttagctttggaccaaagggatttgctgcacaaggaaagatcacagatgaatattcaggggcaagaccaggagatacaagttatagtataactgaaatcacacgtctatttagacttaaaatcagtgaagagatggcgataaaggtgaaaaaaaaggctgatagatttacagctaaggtcaatgcaggcacggagcactattatgcctttatgaatgatacatgtgctgaaacggcaagagatattttaaaggaagcaggagtctctacaccttctgggagtggccctgtcaaaggtgtgggttctgatggtattacaacaatgggaacatttgtgaatccttacaaatggcattttgacttctcggagaaatataaacaaacagggattatatgctatgggaatggtggaagtagcgatgtggccaatgatttgattacgctcaatagttcatgggttctttatccgggagataatgatgtattgatttctacagaccaggagggggtaattcatggtgacctcacaaaagattaa

SEQ ID NO: 169052 - DNA, 726 bp, Enterobacter cloacae
atgagttggctcttttcgcaggcgctggcggaggaatactcggcggctacctgctcggatggaacacagtatgcgcagttgaacgtgatgcctacgccgcacaagttctcgcgcaacgacaaaatgatggaattctccgacctttcccgatttggtctgacgtgcgtagttttgacggaaagccatggagaggagttgttgatgtcgtttctggaggcttcccgtgccaggacattagctcagcaggccgtggagcaggaatcgatggtgacaaatcaggtctatggaaagaaatggcaagaatcatcgatgaggtacgacctgaatacgtcttcgtggaaaactcaccgctccttattggaagaggacttgtgcgagtcatcagtgaccttgccgaaattgggtttgattgcagatggagtcgtgtttcagcaaaagaacttggcgcgcctcataagagggaccggttgtggctggtcgggagaaatgttcgcgacaccgcaggcgagagattaccggtccggctctctggacagatggaacgacccgcgacgctcacggaacctcaacgaccaggttggtggcctgctgaacccgaggtgggaagagtggctaatggggtggcccatcgggtggacagaattaaagcccttggcaatggacaggttccacgagtggcagcagcagcattctccttgcttaaaactcagtgaggtggccgcatga

SEQ ID NO: 169053 - DNA, 210 bp, Enterobacter cloacae
atgccaattgatgtgaaaaaagcaaatttacacccgacacacaaatgctctttttgcggaaaaaataacaacgaagtcgccatgataattgccggtgatggagtttgtatctgcgacgagtgcgtatttgagtgtgtcacccttgtattcagtaataacaggaggctgcatcgtgagcatgatgctaatggtgaaagccatgcaaattaa

SEQ ID NO: 169054 - DNA, 450 bp, Enterobacter cloacae
atgagcaacatcgacaaacgcgcgttaagggacgccgctgaaaaggcgacgccgggaccgtggtacgtgcatgacaagccttgtgaggacggtaactacgggattgataccagtgataaggagtttctggccgaagccgtcgtatggtgggggttttcaagacagagtatatggcgtgaagaggatgcaaaacacatcgccgcagccaaccccgccaccgtgctggcgctgctggatgagttggaagccaaagataggcggattgctgagcaaaaggaggttatgcgccaggcagccagtgatatctcttacgcaatctttaacctgacgggctctgacttgagccgtttgcaaccgggcgtcgttgaaaccactgacccgactgatacagctttaattgcagagcgcaacttacgcgccgccgcagccggtaaaggagaggcttcatga

SEQ ID NO: 169055 - DNA, 942 bp, Enterobacter cloacae
atgaatagtttagcaattgcagatcgtacaatcaacgtgcctttctatggaaattctcttttcgtggtagagcacaacggtgaggcttataccccaatgcgcccaattattgatggcatgggattaacctatcaaggtcaggccgataagctgaaatcacggtttgctaaaggggtcatggaaatcatgatccctacgaaagggggtaaacaaaccatgctttgccttgcgttacgcaaactgaatggctggctccaaaccatcagccctaacaaagtacggccaggaatccgcgataacgtcattcgctaccaggaggagtgtgatgacgttctctatcagtactggacaaaagggtcggtggtaaacccacggaagaaaactaccgtgaatgagcgcactccgttacgagacgctgtaaatatgctggtggggagaaagggattacgctacgacgatgcatacaacatcgctcatcagcggtttaacgttgaaagtattgatgagctcgatcttgagcaaatcccaatggcagttgagtacgttcaccgcatggctatggagggtgagttccttggtaagcagatggagctgccaatgccaaaactggacataaatattcctctccagtggtggattgacaacaatccggtggttcgaagtggcaacctgtcattcggaaagtcaatgtgtgcacctgccctggacgtcactatgcctatgctctgtggcgacaattcaacatcgtctgccattcgcttgatcaatattcttgaggcggcagggtttgacgtatcagcgcctaaggctgaaatcgtagcaatgagaagtcatctggcaaatattgaatatggcatgaaagccattgctgatgcttgccggcgggcaggaaacaaaactatctccttccgcggcgctaaagcagaattcgtaattaactaa

SEQ ID NO: 169056 - DNA, 702 bp, Enterobacter cloacae
atggcacttcaacttttagctgctaacaatgctcaaagcgttctggcggctggcattagcgcctcagcaacatcgttgacactaaataccggaactggtgcactatttccttctccggtatcaggcacaagtttctttaagctgacgctgattgatgctgcaaccggttctcttacggagattgttcatgttactgcccgggctggtgatgtctttactattcagcgtgggcaggaaggaactgtcccacgagcgtggtcagcaaatgacattgcggccaacatgatgaccgccggaacgctgagctacattctggacaactatgcgaccattgccagtctcggaactgccgctgcgaagaatgtggggacgggaccaggacaaattcccgatatgtcagcctttacctctgggccggggtgggttcgcttcccggacggaacaactatccagcaaggtagcgctggctttgcaactggcgtgaataaccagtacgtcactctgccacgtgctttctcatctgctaatttcagggtcgctactgtctggaatgacgttggtgtgcctcagggaggcgctacagctcaggcggctgccgatattggcctgggagcggggacgaagaccacgacgcggtttgggttgtggcaaggtggctcgggtggtttcaacgttgactggattgctattggagtatcttga

SEQ ID NO: 169057 - DNA, 234 bp, Enterobacter cloacae
atgattcaaatcaataaagaaaaacacccgaaacttatccggttgccggaagtaataagaaaaactggatttggcaggacatggatttatgagcttataaaggctggaagatttccaaagcaagtaaagataagtgaaaggtctattgcctttattgaaagtgagattgatgagtggattgaaaaaatgattgcgaaatctcgctgtgtatctgaatttaaacattttaaataa

SEQ ID NO: 169058 - DNA, 234 bp, Enterobacter cloacae
atgacgatgaaaaaaggtgttactgaagtggcaaattctgccctggatattaaagacaagctttgcgctgatatgatcgatgctggcgtttcaccgaaagaggcattgattgcctcgactgtggcaacaaaagcgcgtatggatgacattattaacgaagtcatgggtaacaagaacgctgctgaaatcacccatagcctctcccagcttggcgctagcacaaggctaaactaa

SEQ ID NO: 169059 - DNA, 774 bp, Enterobacter cloacae
atgtcagaagtcataaccgatactgaacaggttaaagcagtggtgcaggggttttctgcatggatgccggtgatatcaaccattgccggtggcgtgttggccggatctgtggcgataggcgtgagctggcttaaccataagttcgccagagaacgagaagagaaagcaatggctgatcgtcttcgccaagagaacgaaattaaacaggaaaaaattgatcgtgagcgacattttatcgctaccgaactggtctttctgctggagcgcttcgctgagtcctgctcctatgttgcctctgactccggggaagataataccgatccacagcccactcgcgaaccgatcgtcaattaccctgagctcaccttctctgacgttagcggatactggcgggttctcgatacacgtctcatgtaccgtatccgggaattgccggttctgcaaatgcaagcaaacaaggctattgcaaacatcggtgaaggtgacaattacggctcacgcagggattacttccgcgaacgctggtaccggtacgccggccttggtctgaaagctatcattcaggccagacgccttcgccggatggcaggctttccggaaacccctctcgcgagaactcacttgtccgcacagtatgtaatgaaggaagtatggcagattgaacgccggcggagagcgaaagaggccatcgatgaccgggacctctttgaagatctccagagtgaacacaaagggtttgttaaactggctgaagagcgggttgctgaacgttga

SEQ ID NO: 169060 - DNA, 306 bp, Enterobacter cloacae
atgccttcaaacgttaatgggcaaaatgttggtttatccagtttatggaatgagctaagcgactatccccggatacggttacacaaaaccattcgttttgggtacccgctggtacatgtactggatgacgaaggtcgtgaacttgcccgcaggattaactcaacagggcaatgggaatggagaacactgtcaccagaacgttggacgcctcagcccggtgagttcctggttgaatatgagtttgaaggggatgaagtgcgggactgtttccaactgaatatgctcgatggaccattcaattcctaa

SEQ ID NO: 169061 - DNA, 324 bp, Enterobacter cloacae
atgaatgggtatatcgtcacaatcattattgcattcatttttggtcccattctggcgttgccgattttgatcgtcggtttgtttaatataatggatttgatgctgttttcatttcccatcatattcttttgcattcagggttataaaaaagaaagaaaaattaaagatgcttttaaaggggtaattcctggcctgattgtatctctgatactgatggctgtagttctatttgttaaggatgaaaacgactgttcgaataaatatgaatctggcgatctgccagctgcagtgtgtgagacacttaagggaccaggattcagataa

SEQ ID NO: 169062 - DNA, 1281 bp, Enterobacter cloacae
atgccaatgtttggtcttgcggatgtaaactcattttatgccagttgtgaggcgttgtttcgcccagatttgcgaggcaaaccgattgttgttcttagtaacaacgacggatgtgttatcgcacgcaatgctggtgcaaaagcgttaggaataaaaatgggtgtgccctggttccagattaaaaatcagagttacagggaaaaggtgcacgttttcagttcgaattatgcgctttatcatagccttagtcagagagtcatgagcgctcttgaggagattacaccgcgagttgaacagtacagcatcgatgaaatgtttctcgatttgacgggcattgatagttgcgaagattttgaacactttggccgacgtctcaaagcgcatgccctgaataccgttgggctgcctattggcgttggtattgggcagaccaaaaccctggccaaatcggcccaatgggccagcaaggagtggaaacagtttcgcggcgtcctggcgctcacaccggataattcgaaacgcaccatgacgctgctggaaaatcagcccgtagaagaggtttgggacgtgggcaggaaaataggcaaacgccttaatctgatgggtattaaaaatgctttacagcttgctcaatccagtccgagatttatccgggaaaatttttcagttgttctggagcgtaccgtacgggaactgaatggggagtcctgcattcctcttgaggagcttccgccatcaaaacagcagattatttgctcacgctccttcggtgagcgcatcacgtcaaaagcagccatgcagcaggctctgtgtttgtacgcgacacgtgcagccgaaaagctgagaggtgaacgccagttttgccgacacatcggcatatttataagaacctcaccccacgccattaacgaagtgtattacggcaatagcgctggagaaaagcttgccctgccgacccaggatacgcgagacattattgaagttgcactgcgttcactagatcgcatttggctggatggtcggcgctatatgaaagccggtatcgcgcttgatgattttacgccgaatggcatagctcagttcaacctttttaacgagaacaaacccagagagaaaagcgcccaactgatgaaggtactggacggcatcaatcagtccgggttgggcagtgtgtggtttgcgggtcaaggcgtagatacagcgtggaggatgaagcgggaaatgctcagcccggcgtggactacctgctggaatgatattccgatagcgcgaataaagtga

SEQ ID NO: 169063 - DNA, 2133 bp, Enterobacter cloacae
atgaaagccgaaaacaccactggtgttgtctggcagccttttgcactggagtcatatcaactcagagccactttctccgcacaggaacgtcttgccctaagtaccccacaacgacggggtaaatatcttctgcagaaacctgtgccagcattcctgcgccctctttatgacatcgccacccagagcggtataaagcccgaggtagcgaggattaccattctggcggtactcgccgaagcacaccgtcaggacatgccttaccacctctggactgaagacatatggcaggggttgtatcaacgacgaaatctcggaggcccgctactggcagcttttgcctttcacctgtcacagattcctatccccttgtatagcagccgatgccggcaacctgcctattatgcttgtgcagtttttggtcgggatatttttcagcaggaactcagccgtctcatggacgtcctggtggcacaggggtactcccttcggcatcaggaaatgtttctctcagcagtcctaggaatgctgatgctggaaaatggcgatccccgtctggaaagcttcactgaagaattgctcaaacggggccagcagtaccgcactaacggaattgccagagcggtaggcaaggtctctcacggtctggcagcaatgggaattttgtctcgccctctacgtatgcgcggttataccggctggaaagagaagcggactgacgggatagccccagaatgggtcggatggtgtcagcgctggcgggaaacatccgtgctacgaccccgaacccgtgaaacaaattacagctttattttacgtatcggtttgtggctttcgagagactgccctgatattcgtgagcccgctgactggactatcagcacctgtgccagtttcattgccgcactggggaggatgaatgtggatgaactttctctggtatctgagcaaaagcaacgtgtgtctccccgctccggtcagccgatgatgagcaactcccgagcagcgtttttatatgccctgcggcgtttttttgttgattacgagctctggggatggggaagactgaagcttagcccctaccgccatttggtcacgccggacacaccagctttcagccggggagtgaatccgcgggtgattgacgatcccgtgtggctgaagttgatctgggccagtctgaacctgcacccggaggatatgttaacggagatccattatccgttttccctgcatcaggcgatggcggtgatctggacccatgcgggactgcgccagaatgaaatattccgcctgacctcaggatgtatacatgagcagacagatgatattgtccaggacgacggtagcattatttctgccggaacgctgtgctatctggatgttcctgctgggaaaacatcaaaagcgttcgtcaaaccagtcgccagcattgtgaaaaaatacgtggatttatggctgcaggaacgcccccaggagcaggcgcctctgattgatgaacgcacgggggaaaaagtcagctatttgtttcagtttcgtggtaaacacgtgggaagcgcactcctgaataacacaattatcccggtactctgtgcccgggccggtgtcccggtcgaagacagccgtggacggatcaccagtcaccggggaagagcttcagcggtcaccgcactggccagcgtaccacaagggatgaccttgcatgagttaatggagtggtccggacatagctgcccgcgatcaaccctgcactacatccgcattcgcccaacacggctggcggcttcttttgtgaaagcggacaaaatttcccatatgatcagcgtgctgatcgatcatgacagtcaggcactaacgtcatcagggcctgctctgtactatgatttaggcgatttgtattgcaccaatccgttctggagcagttgcccgcacagaatggcctgtattggctgtgattttagtttgccgaaaagcagttcccaggcactggctcttgaaagtaaagcctctatacgccggtatcttgaggaagtcccgctaactccggatgagaaagcaattgcggaaggtgatattgataagctgactgcattcattaaaaaaatggctagtcagcccccacctcaaaaagactaa

SEQ ID NO: 169064 - DNA, 999 bp, Enterobacter cloacae
atgatggtcagcaatccactttttactgccagtatgcatcttgttgagcaatggctcggacttctgactgacctgggtcgggctgaagcaacgactaaagcctaccgaggagcactgacacattacttacgctactgcgaagcggaatcaattcctcctacatcagcccattttgaggatttttccggttatattcgcccacaattacctggaatggcgcatccagtatccagttccacgctccagttacgtatctctgctattcggctctggtatgattatctttattaccaggagctttgtgaaaccagcccgattccccgagcgatgtcgccaagtccgattttcagcggacgtgggcttgtgccccgtatcacccgccttccctgtgttcctgatgatcatggctggtttactctactacagcaggctgcctctgcgacgttacgagaccgtctgatgctggcgctggcctattatggtgcattaaggcgagctgaagtgacggcacttcgagttgacgatcttgatttaggtcttcgattaatccgtgttcgtgctgaaaccaccaagaatcatcgcgagcgtattgtctgttacagcccggcggtagcacctgtacttgcagcccatttgcaacagttacggcaaagtggtgtttctggtggcccattatttcgttcagtgtcagatcggaattacggtatgccactaagcatctggagctggagtaaaaccgtccgcagttgggggcttaaatccggactgccttatttctccactcatacctttcgtcatctgcgtctgactcatttggcgcgggcgggctggaaacttcacgaactcgccacctatgctgggcatcgggatccccggacgactcaggtttacctgcacctgtccggtaccgatctcgctgctcgcatggccggggctgtcgctgaacttgacagaaaagttgccgggctggtttttgctgacagagggtttgtcttatga

SEQ ID NO: 169065 - DNA, 177 bp, Enterobacter cloacae
atgcaccttcaggtcaatcccgggatcaaccacctggcggttgagcttctcatcctcgttgtagtccccggaggacgtcagcacctgttcctgacggtagttcatctgctcgcgtaccgcagacaggaatgcgtgcacatcggtgttcatgctgtcgatgcgcgcggctcccagtga

SEQ ID NO: 169066 - DNA, 840 bp, Enterobacter cloacae; identical to SEQ ID NO: 146550

SEQ ID NO: 169067 - DNA, 741 bp, Enterobacter cloacae
atgcgacggatagacatcaagccctatcccctgatcaaccacctggcggttcagcttttcatcctcgttgtagtccccggaggaagtcagcacctgttcctggcggtagttcatctgctcgcgtaccgcggacaggaaaccgttcacatcaacgttcacgctgtcgatgcgcgcggcccccagggagacgcggatggtgttgcggatctgaaccagatcatcaatcacccgttgcgtctgggaagcgcgcttcagcggctggccatagacaagaaagatgcggtagttacgcaggtaaagcgggtattcgcgttcgttggccaggccgtgcaacgcagagcgctgccagaacgcgcgggtgattttattgaggtgatcggccatccctcctttccacatgtcgttactcacaccgcgatcgatacgttccccgacacacttgctggcaagcatgatgacggtgacgggagtctggcggggcagttttttgcgcagcatgtcatcgagcgcggccatcacctgttcgttcgcgccaggcagcggggcggcttccatgatgaagcctgcagagccggcgttgacgaaaatctcattgatgtcgtcgtaataccggtaccgacgttaagggcactgcctttggttaacatgattgttttctccgaagtaaacaaaagtgactcgcgtaagtgcttgtttacgcgggcgaaattttcccatgaccctaaaaaaaaaaaactgtga

SEQ ID NO: 169068 - DNA, 1008 bp, Enterobacter cloacae; identical to SEQ ID NO: 14128

SEQ ID NO: 169069 - DNA, 792 bp, Enterobacter cloacae
atgtcacaactgagttttgaatccctgttcctggcagaccaggctgatccgcagccgtgggcttccgatcctgtccgggtgcagtcgccagctgaggcgcgtaagcagttcgccagtgtgttccgtcaaactgcgaaatatatgcgtcgttccgaagtgttccgcgactttatcaccctggccgccagcgggcttgatattgcgagcatacgctcgccagaaagcatcgaaaacagccgacgaatctgcgggcggtatcagccggaggatttagacgccatgagacagctgttctgcctgttggtggaggggctggcgggtgaaatgcatgattttctgggcgcagtgtatatggagcatgagctgggcgcggacgaaatggggcagtatttctctccgtcctccatctcccgcctgatggccggactactcatgcccggcgctcaggagacgataaagcgtgagggttggatgacgctagatgagcctgcctgtggtagcgccggtatggtcattgcctttgcatactggatggctgaggcgggatataacccgtcagaacagctgtatgccacctgcacagatatcgatccgatggtggctgatatggcctttatccagctgtcactgctgggtatccctgcgaaagtcgtgaccggtaatacgctgaccctgaaagcaaatcgcgtgcgttatacccccgtttattacttcaatgactggcagggacgtctggagttccgcagccgtttcgaagctatgaaaaactttctggccaccgtggccgcctga

SEQ ID NO: 169070 - DNA, 123 bp, Enterobacter cloacae
atgtttcacgtaatgaatatgaacaacgtgctaaattcaataatgatgaaaaacaaaaacaaactgagatctgcgccacgaaaccagcggcaggtgaaatttatcgtttcccaagtcgtgtga

SEQ ID NO: 169071 - DNA, 336 bp, Enterobacter cloacae
atgatgagcaacacactgaacgctgttccggccaccgtgctggagacgatggcagaacgcctgcaaggcatggctgaaccgataaaaatccgcagcaacgatgatcacgccgcgctggctgcagatgtgctctggaaatttgcccgtaaaaccgggctgaacagggaaagcgaaagcgtgcaaactgtcatcacggattttctggccaatctgttgcacctgtgcgaacagtgcgaaccggacggggctggcattgagggatttaatgccctgctgaacatggccatgatgcattatgagcaggaaaacggaggtgacaccgaagaaccggtctga

SEQ ID NO: 169072 - DNA, 462 bp, Enterobacter cloacae
atgaaaaataatacacagccagcactgaaagaacgaatcgaaaaggcacttgaggaattcaccaaaggccgcgccagcatgcatgttcctccgcttgataccgatgttgatgtggtgctggcggaaagcagtgacagattatccgagcttgaagccagattagcgacgttggctgcggagaatgcggggctgaagtcagcgaatcatatcgcactgaaaatactgaacgatgatgaaaccatggtgacatctctttgggcgtcaagtgttcaggaagttgaagtcaaaaccccagccaccgacgccttcttagctgaggtgcgggccagcggtgtggagatgtttgcagcatggaatgacaagcacattaacccgggcgttgagcacaaagaatcattaactgcagtcagccatgcagctcgtgggttctccgcccagcttcgcaaaggagcgcagtcatga

SEQ ID NO: 169073 - DNA, 879 bp, Enterobacter cloacae
atgaaaagtgtaatttttttaattttgtttgtcttgtcattatcttctggtagtttatttgccgcatcttttgattgtggaaaggcaaaaagctttgccgagaaaacaatctgcgaaaatcctttgctttctgaaaaggatgatgatctaaaggttgtttatgatcatgcaaaaagtgccgttaaagataaaagtgcatttcgcgaagtaacaaggcaattatggaatggaagggagaaatgcaaaagttacgattgtgttgttgattggtataaagatgcattcgttatttacaatgcagttatcaacaaggcctctatagaatccaatagaaataacactgataacttgaatgaaaaaaatataaaaaaacatgataatattaaaactgtaaacccaagagtaacctaccaacttaaaaatgaagctgaatttattgatgtggtaagggcatcaatgctaaaagctagcaatgctaaaaatgacatgcagattggcggcataaaatcatcaagagataaaagcatttgcaatatattgagagtcaaatccgtatcgggatggataggtgaggttaaacaagtttcagcaaatagtgatgggaagggtgttttagtattaagcctgccaaacaatattataatcagaacgtggaataattctttttccgatattagatataacactcttattgacccggaatctaaagttttcgataatgcatcggaattgaatgttggagacgtagtgtacttttctgggacattttttgatgacgatgataattgtatttcagaggctagcctgtcgctaactggcaaggttaaagaacctgaatttatatttaaattcagtgatataaggaagtatcaggattga

SEQ ID NO: 169074 - DNA, 336 bp, Enterobacter cloacae
atgaaaggtatgcgcagcattgctccgtttggattacggatgcctgaagatctaagggaggctgtgtcagaacgggccaaagaaaacggaaggtcaatgaactccgagattatcgatatgatcggaaaggcacttgtttccccgtcactaaatgacgaggaatttgtctacatgcttgaggtagcaaccaaggagcatatgtcggaaaaagacaagactcttgccgagtcaacattattgcaaatggctgagaagcttacagagaaaatagatagagatacatcaagcctaaagcaggtgatcgccatgctttctggacttaaaaagcccacctaa

SEQ ID NO: 169075 - DNA, 171 bp, Enterobacter cloacae
atgggtaatgtttcgtatgtgaggaacaaaaaagagagctttcagcttcgacttccggaaagcatgaaggaagagattcgccgaatggcggaaatggatgggatttcgattaactcggctattgtgcagcgcttggctaagagcctgcgagaggatcgtgtaaatggttag

SEQ ID NO: 169076 - DNA, 414 bp, Enterobacter cloacae
atgttaataccgccaaagttatttattatagaagtttatggattgaaacatatttttgaaaaggaacctatttatcttatttttagggagtcagatggtataattctcagctataactatgatcttcaaggggcatcttcgagacttaaatttttattagagaaaagcaactgcattcccgatgactttataagcaatgggataaaaaatgaacacattgatgagatgttcagatttgttgttcctggatatgccacttactcattaaagacaaatgaagtcaacttcaaaagtttttatttacaacaaaaaggaaatgaaactattgctttatttttaaaacctctgatagagaaaaagacacttgcaaatattattacaaaaaaaagcaaagaagataatacaccatcatga

SEQ ID NO: 169077 - DNA, 159 bp, Enterobacter cloacae
atgaaactgccacgaagtaccctgctctggtgcgtgttgatagtgtgtctcacactgctgatattcacttacctgacacggaaatcgctctgcgaaatccggtacagggacacgaacagggaggtggcggcttttatggcctacgaatccggtaagtaa

SEQ ID NO: 169078 - DNA, 288 bp, Enterobacter cloacae; identical to SEQ ID NO: 84381

SEQ ID NO: 169079 - DNA, 240 bp, Enterobacter cloacae; identical to SEQ ID NO: 99304

SEQ ID NO: 169080 - DNA, 366 bp, Enterobacter cloacae; identical to SEQ ID NO: 99303

SEQ ID NO: 169081 - DNA, 738 bp, Enterobacter cloacae; identical to SEQ ID NO: 99302

SEQ ID NO: 169082 - DNA, 690 bp, Enterobacter cloacae; identical to SEQ ID NO: 99301

SEQ ID NO: 169083 - DNA, 1380 bp, Enterobacter cloacae; identical to SEQ ID NO: 126316

SEQ ID NO: 169084 - DNA, 978 bp, Enterobacter cloacae; identical to SEQ ID NO: 99298

SEQ ID NO: 169085 - DNA, 372 bp, Enterobacter cloacae; identical to SEQ ID NO: 99297

SEQ ID NO: 169086 - DNA, 921 bp, Enterobacter cloacae; identical to SEQ ID NO: 99296

SEQ ID NO: 169087 - DNA, 759 bp, Enterobacter cloacae; identical to SEQ ID NO: 99295

SEQ ID NO: 169088 - DNA, 1299 bp, Enterobacter cloacae; identical to SEQ ID NO: 99294

SEQ ID NO: 169089 - DNA, 270 bp, Enterobacter cloacae; identical to SEQ ID NO: 99293

SEQ ID NO: 169090 - DNA, 1131 bp, Enterobacter cloacae; identical to SEQ ID NO: 99292

SEQ ID NO: 169091 - DNA, 411 bp, Enterobacter cloacae; identical to SEQ ID NO: 99291

SEQ ID NO: 169092 - DNA, 1341 bp, Enterobacter cloacae; identical to SEQ ID NO: 84378

SEQ ID NO: 169093 - DNA, 225 bp, Enterobacter cloacae
ttgagcattatcagccgcaggttcgacaaaaaagagacaggaaccgtgttccggcatgctcaaagcgggaagatcctgtaccgtctgaatgcccgtctggaactttatgactgggaaatgttgcaggcgatgatcagccttgtctataacgccggcgtgaccgccggaagcgaacagcgagccgctgagattcgtgaggcgctggggatttcaggagctgaatga

SEQ ID NO: 169094 - DNA, 1476 bp, Enterobacter cloacae
atgcttagaaaaataatcaggggtagcggattcactcagtcagaagaaaaactgatagagttcgctgatgatgctttttttggtctttggtcttatcctaatgtttatagcgatgagggttactctaaaaataaaattgggaaagaagttagtgacttattagttatttttgataaagatataataattttttccgataaagctattacatacaataaaaacaaagatcctaaggttgcatggcagagatggtttaaaaaatcagtcatacagtcttgcacacagttatttggcgcagagaagtttataaaagatcatcccgaaagactttttgttgacaaagaatgctcagttaacctccccattaaaatagataattcttttaattttcatttggtggccgtcactaataatatttcagatccggcgatctcgtactttgacaaaatagaaaaaggcagctctgctactttagttaacatatttcctttaaacgcccatcaatgtctagaaaatccattttgtgtcggagacgtttatcctgataagacttttgtccatatacttgatgagactgccctaaaactactgttaaccgagttaaacacagcaactgatttcattggctaccttaacgaaaaagagagggttgtaagagaaagaacattattggtcagcgctggggaagaagagactcttgctgcttacattatgggtgataaaaccataatatcaaaagaaattattggaaacgatcaagggatgaccataccggaaggtgaatggaaaaactataaaaccactttcaattatcaatatcagctctcaatgaaaaagggtagcgttttctgggataacctaatccacaacttctcgacaagtatattgtcagctaacgttggtttttttagtgaaattgaattttctacacatgaattaggtgttagagaattagccaaagaaagtaggcaatctagatattacctttcaaagaactttaaagagaaattaaaaacaactcagcctcatctaagaacgtcaagaatggtcgaatcaatcgatgagcctggaaagttttacttattccttttttttcctaacgatagcaagttgagttactctgattacagaattcaacgtatatcttatataaatgcttatgctgaggttgcctttaataaatacagacatattaaaaaattaattactattgcaacagagccgcaaaatacagaaggaagatctgaagacctaatatatagcatatccccagagaaatttaccaaagagcaaaatgaaaaagccaaaagattatcaagagaatacaaaatactaagtgattttttacctactaaaacgacaaagagcgataactttaaatcagttatatcaaaaggtgaaaaaatagggcggaatacaccttgtccatgtggctccggtgttaaatttaaaaagtgccatggtgcgaataattag

SEQ ID NO: 169095 - DNA, 768 bp, Enterobacter cloacae
atgcaattacgcacccggcaaggtgggccgattcccacacgacagcagcgcccggcaaggtgggcggatttccacacggcagcggcgcccggcaaggtgggcctattcccacacggcagcggcgcccggcaaggagggctgattcccacacagcaccggcgcgcggcaaggtgggccgattcccacacgacagcagcgcccggcaaggtgggcggatttccacacagcaccggcgcccggcaaggtgggcggattctcacgcggcagcggcgcccggcaagatgggcggatttccacacagcaccggcgcccggcaaggtgggccgattcccacacggcagcggcgcccggcaaggtgggccgattcccacacggcagcggcgcccggcaagatgggcggtttcccacacggcagcggcgcccggcaagatgggcggatttccacacggcagcggcgcccggcaaggtgggccgattcccacacgacagcggcgcccggcaaggtgggccgattcccacacgacagcggcgcccggcaagatgggcggattcccatatcgacatgtatgtagcttgtgttatccgtggattgtgcagctcagcgggtcgcttgtcgtatggcgtagtgtcccccgtaaccggccgcgtgcggccgctaacgcgcagtacggcgccgcgacccgaaggcgggccgccgttcccgcgcgcaggcgcgcggcgcccactgcgcacccccgtgggggacgtacggcagctgtgtggcggtga

SEQ ID NO: 169096 - DNA, 672 bp, Enterobacter cloacae
atggatgaaaatgattatgttttattaaaaagatttaaacagtattttgaatgtgaccagatcatagatattgataaattaaaaagagaaatagctactatttatgggacatacaaaataaaacaaggtatgcctcttaaagaggcaatgtctcagcaagcaagattacaagcatatttaacagcattgaaaaaaagaaccaaacgagaggtaattacaagtcttgtttatgacattgtaaaatattataagatagagaaaacaacataccatttcttttttcatatatgcagtgagttcctggggaggtctgttgataacagatatatacttgaaaaattttcgaatatggtttccgacgaaaatttcaatttgaaaaaaattgagtctccaagaaatgcctctgaaaaattaaaattagatctttcttttgcagagttaatagatatgggacataagggagttatttttgaaaaatttaattttagagagtcatacaatgcaatgttatcaaatatagaaaacatatttgacggttttattaaattttccaaaatagaaaatcacgaagaattagacgcattgttacaacaatatgagattgaaaaaataataaaacctcaagtaatagaagagaaagaaatacagccaattaaaaagagaagactataa

SEQ ID NO: 169097 - DNA, 225 bp, Enterobacter cloacae
atgaagaccgtcggcaagatgcttaacgaaaagctcactcctgaaggctacttccctatcgttctgcgcattatcaagcgcgacggccaacaccttttcctgttgaagggcgacgacaacgacaccgtgaaatgtcctcctgaccttttcggtccggaagtgactgacatggataacgacctggcggcgttcgacaacgcaatttctgaattcactgacttataa

SEQ ID NO: 169098 - DNA, 717 bp, Enterobacter cloacae
ttggttatcgggccatttattaacgcaggcgccgtattgctgggcggcgtactcggcgccgtgctgagccagcggttgccggagcgtattcgcacctccatgccctcaatattcggcctggcatcgttagggatcggtattcttctcgtgatcaaatgcgccaacctgccggtgatggtgctggccaccctgctcggcgcgctgattggcgagttctgctatctggaaaaaggcatcaacagcgcggtgagtaaagccaaaaacctgattgcccgaccgggcggcaaggcgaaacacggtacgcacgagtcgtttattcaaaactatgtcgccatcatcattctgttttgcgccagcggcaccgggattttcggttcgatgcaggaggggatgacgggcgacccaggcattttgattgcgaaggcatttcttgatttctttacggccactatttttgccaccacgctcggcgttgccgttgccgcgatttccgtgccgatgctgcttattcagctggcactcgcgaactgcgccacgttgattctcccgctcaccacgccggcgatgatggcagactttaccgccgtcggcggcctgctgctgttggcgaccgggctgcgcatctgtgggattaagatgtttgccgtggtgaacatgctgcccgcactgctgctcgccatgccgctctccgcgctctggacgcactttttcgcttaa

SEQ ID NO: 169099 - DNA, 369 bp, Enterobacter cloacae
atgggaaaatcagaaattgatatattggcagaagaattgaaagaattttattttgatgcgctgggtgaaaataacggtcgtgtttttgcttatcgagcaacctataaggtgaaagggtgggagcaaatagaacaaaaagcttttagaaatgcgttttttaaatttttcaaaacagatgctcaattaagaaaaacaaaagatataaaaagcgattattttcaactggaagggataaaggataaatttaatagatattatttcccttcattttgcatcgataaaaaagaatatgaggcaagaggtgttgagtatttaaaagaggttgaggaatactttaaaaaattaataaccttggcggctataaaatga

SEQ ID NO: 169100 - DNA, 1086 bp, Enterobacter cloacae
gtggcaatatttcatctgagttttaaagtattaacgcgtacaacaaaaacaggcaaaagcaaaagctcgctttatcttgccgcttacaatagccgggaaaagttaaaagacgagttaacagggctaacttttgactacactaaaaaaaacgatttatataaaagtggtattattttgcccgaagaagcccccgctcgtttctatgaccgggcgacattatggcaaaattgcgaggcggcagaatcgcgccgggacagtcaaatatgtaggtactttatcgtggcattgccacgagagcaaaacggcgagcaaaacgaggagctattaaaaaaatatttaaaaaataattttgtaaaattgggcatgtgcgcggattactccatacacgatataaataacaagccgcacgcgcacgttatgctaactatgcgcaaatgtgaaaatggaggtttcagcaaaaaaaaggcgagagagtggaacgatccaaaattggcggaggtttggcgtagacaatgggcggttttagtaaataagacattaagagaaaacggacacaaaaacacaataacccatttaagttttttacgtcaaaaagagatggcgatagcaaaagcacgcgaagcgctggaaaataacgacattaaaaaagcggaagaactaacaaccttggctaaacatttggcaactaaaaaacccgttaaacgcaagcctacggctaaatatttaaaagacaaagcgcgtaaaaaaaataaaaatcccgaattgcggaaaaggctcagacaacaaaaagaacaaaaagaagaaacaaacaaaaaagaaagtaaattaaatttgatttttaaaaatttaatattaaggtttaaaggaagtaaaaaaacagaaataacaaaaatgaccgagtccgattttttcaaaaatatgaaaacagaagaagaagaagaggccgaaaatttagaattaaataaatatattgaagaggagttaaaaaatgggattaatcaaaaaaatgacattacacacaaaccaccgaggcgtggagttggaagtaggcaggaaaagaataataagccacagggacgaaaataa

SEQ ID NO: 169101 - DNA, 1488 bp, Enterobacter cloacae
atgctttataaaaataataaagcatatggggataatgtcaatgatggcggagtgccatttttagccacatatgcagcccaaaatgggcaaagattaaacgaaagaaaagctaaaagtttaagattatcaaaactttattataaaagggctgaggcgctggaaggcgcagagtccgaagctatgaaaaaacgcgctgggcgggtttttgggtgttgtagtaaaaaagaggtcgcaataagcgattcgggctattgttacacgttacattgtaacaggtgccgcgaccggtcttgccaagagtgccaacgcctccgcgcctttgttttgcagcaaaaaatccgccaaatcttgcccgatttgatagcacaaacagacgcaaaagacggcctaatatttggcactttaacagtaaaaaatccgcttataacagagcttaaagactatttaaaaatattaagcaaagcgttcgcgcgtatgtttaagcgcaaagagttcaaaaaaatatttgaagggcgcggcggttttaggtgttttgaagtgacgcgcggcgaatcgggggctgattattgtcatccgcatatccatttccttttacaagttaaagcggcatattttgcccgaaactctcctttatatataaattctgaaaaatgggcagaggcttggacggattgcttaaaattggaaattgaaaagacggggcgggtttttaattatgccgattatccaagcggtaaggctttcgtaaaaattttacgagtgcaagctgttgattacacacgagaaaatagaaaatacgcgacagttggaatgctggaaaaacaggacaatattataaattatgtgcttaaatatacggcaaaaagcgacgacgaaaacagcaaaaaggcacttgtaaaagatgatccttggttttttgaatatgacaaaaatataaaaaattgccgcgcggtcgcttttttcggtatatataaaacgttaatttcaaaccttacgcctccaagttatgacgaaaaggctataaaagcagatttagataataataaagctaaattttatacggcggtatgggatgatgatcaccagtatttggcgcttgaaagcacagaagaaaaagcacttgaagcaaaaagacataacactgtaagcagtataaaagcaacattaaaagcgcaattaaaaagtaaaaattatattttagatataattgatttagcttttaagaagaaagattatataacagtacaaaaagagataagcgcacataatacgctcgctgggcgtgtattaaaaacttttgaaagattagaaaaagcgggagaagttgaaaaagtaaaaggcggatatttacaacattaccataattttttatttaaaagcgttatttttgaatgtttgccagatttaatcagtgaatcggaaattgaaaatataaagaaagaaaacgaaaaaataattgaagtaattgaaaacgatccgccgttttaa

SEQ ID NO: 169102 - DNA, 1170 bp, Enterobacter cloacae
atgcgccgtgtgcgtttttgcgcgtttctgaccggtctgctgctggcagcccccctctgtgccgccgaaagctggcacgctatccaacagcaggccaaaggccagaccgtctggtttaacgcctggggcggcgatccggcggtcaaccgctaccttgagtgggtcagcggtgagatgcaaacgcactacgccattaccctaaaaatcgtcccgctggcggacgccgccgatgcggtaaaacggatccagaccgaagccgctgcagggcgtaaggccaacggctcggttgacctgctgtgggtcaacggcgaaaacttccgcacgttaaaagaggcgaacctgctgcaaaccggatgggcgcagacgttgccagactggcgctatgtcgatacccgcaaacccgttacggaagattttgcgattccaaccgacggtgcggaatccccgtggggcggcgcgcagctgacctttatcgcccgcaaagccagcatgccgacgccgcctgcggatccgcaggcgctgctggcgtacgcgcagcagcatccgggcaaggtcagctatcctcgcccgcccgattttaccggcacggcctttctggagcagctgctgctgacgttcaccgatcgccctgaggcgttacaaaaagcgcccgatgcaacgtttgctgaggttacggcaccgctctgggcctacctcgataagctgcacccgctgctgtggcgcgaaggaaaagatttccctccctcacctgcccgaatggatgccctgcttgccagcggcagtctgaacctgtcgctgacctttaacccgtcccatgcgcagcagaaagtggcgagcggcgaactgcccgccgacagctacagctttggtttccagagcgggatgctcggcaacgtccattttgtggctatcccggccaatgccagcgcgagcgcgggtgcaaaggtggtcgctaatttcctgctgtcaccgcaggcgcaaatccgcaaggccgacccggccatctggggagacccgagcgtcctggatgcgaaagcgctgcgcgaagaggaagcgaaacagctgctggcccatacgcctcaggggctgccgcaggtgcttgcagagccgcagtccgcctgggtgaacgcgctggagcaggaatggctgcgtcgttacggcacccgctga

SEQ ID NO: 169103 - DNA, 585 bp, Enterobacter cloacae
gtggctaaacaatataacggcattgattacgacatgaagaataaatataactatgtctttatttatgctgagagtcttgagcgttcattgagaaatataaatggtattaattacatcccaaatataagtaaactcgcagatcaataccttgaatttactgacatacagcaaattcctggtatgggatggacaatggcaggaatggttaatacgcaatgtgctatcccattagttctcccccaggggaattcagcgagtaatatgtctcatttcctggctggggccgattgcattgcaacgcatttgaaaaatagtggatacactactgaatttatacgcgggagtgataaagagtttgctggtggtgataagttcttttctcagcatggctggctaaatcaacatgataaacaatatttacttaatcatcgcgtagtagatgaaaataatattagtggatggggagttcatgatgattcgctcatagaacatgtatatagtgaatttgagaaattatcggcctcaaaaagcaatttccttctctcgttcttaaccgtcaacactcatccgccagcaggcacttaa

SEQ ID NO: 169104 - DNA, 345 bp, Enterobacter cloacae
atgtctaatacaaccacgattaacacccctgacaggccatgtattcactgtggctcaactgttcgttatatttcatcgggttcttgtgttgactgttcaaaaacacgcagacagccgcctaagcctaaaccaaaggttgcacgtgtaaccgcttcagcagccgtttttcccttccattcagaaggtggagacaatagcaataacatcattgtgaagctgtctgaaaaggctcttaaccgtcttgatgagattggttatgagttagttaaaaagtaccgtttagccggatattcaccagaacgaatccgaatgattgccctgtctcatctgcttgaagccgcttaa

SEQ ID NO: 169105 - DNA, 555 bp, Enterobacter cloacae
atgaatactttaactcaagctgtaaaaattgaatcacccgttgcaagtatcagtcacctgttaccgtttgaacagaaagagcatattgaacgtttgtactttccaaaggtacaacaggctactgacagaatgaataaagctgaggctgaatatcaggatgctgtagaaactcgttcagtgttgattaatcagaaagctgctgaatatctggctaatccttcagagcgtcatggattcattgttaagcaggtttacccaaccaaccagcaacaagtgattcaaagcatggctgaacaaggttatatggttcaccgtgtaggaatgggcttaatctatttcatctcaactaaaaagaatgccctgaaagatgcaactgataaggcaaccgctgaagctgaatcaaccattgaaaaaatgattgaacggctacgggtaaaagtctctgaagctgtccaccagcgaaacaaagtcgtaattgaagcccgtaaagctctggatgctgtaaaagactttactgattacctgaatgtgattgtgactgaggtaaccgaataa

SEQ ID NO: 169106 - DNA, 147 bp, Enterobacter cloacae
atgaacaagacaaaagcagtccgaattaaaaaaacagataatcaactggtgaaactgaccgctgtcaccgctggaacaacaatcagaaagactctggaaggaatgattctgaaatcctatgtgaagcacattgaggtgattaaatga

SEQ ID NO: 169107 - DNA, 336 bp, Enterobacter cloacae
atgagtggaacagttgagtttaatgataaaggagtcacggttatcacccccggcggtggcaagattgttttaggtaattggggcgataacgtcagcccgatggcagaaccacttccacctcgcacaccggaagagaaactctacgggcgtgggctttgcctgcttcctgctggctgggaagaattaagcggtgaagagaactggcagtatcatcttagcgaatccttgcgccatctgtggccgtcgttcagcagggagcagaagatggctatagcctattctgttggtgagctgtcagatgaattgacgaacaccgcatacgatgcatcctggtaa

SEQ ID NO: 169108 - DNA, 207 bp, Enterobacter cloacae
atgactgaatcagagttttttagaaagtatccaactaaagattatgaattgaaccaactacaccgtaaagaaaccggctttcaagattcgattgaagaaatcacatatgaaattgtagataaaaaaactaaagaagtagtagctagggttaaaagaacggaagtaaatgaaccccgtagagaacctaatattttttgggaagaataa

SEQ ID NO: 169109 - DNA, 186 bp, Enterobacter cloacae
atgactaactttctaattgagatactcgctacactaatctacatgttcgtactattccccatgttcatagtactgaatttattttttatgattctgacagtactagtacttcctataaagataccatttgtaaagaactacatttataaacatatcttacgtaatactacaaagattcataaataa

SEQ ID NO: 169110 - DNA, 510 bp, Enterobacter cloacae
atgttagattttcgcgtttcgtcacatacacactttgatgacgcctgcagtaaatttgcagcctctcacaacgttaaagagctagcggtaaaggctggcatcaagcctcatacgctttataacaagctaaaccctgaacagccgcaccagttaactccccgcgagatatggacgctgacagatttaacagaagactcaaccctcgtagatggttttctggcgcagattcattgcctgccatgcgtaccggtcaacgagcttgcaaaagacaaattacagtcttacgtcatgcgtgctatgcgggaactcggcgaactggcgagcggcgcggtctctgatgagcgactgacctctgcccgtaagcacaccatgattgaaagcgttaactctggtattcgcatgttgtctttgtcagcgctggcgctgcatgcgcgtttgcagaccaatccagcaatgacgagtgttgtcgataccatgagcggtattggcgcgtcattcggtctgatttga

SEQ ID NO: 169111 - DNA, 273 bp, Enterobacter cloacae
atgagtattcgtatcgaagttggcgacaaatggggtattaccagcgaccaatatcaattcatcctgaatgaaaagaaagtcgttaagtcaggtaaaaaagctggtgaggaatggctcgacaccatcggttattacccgaagattaaccagattatttccgggctgattcatcatcatattcagcagtcatcaattaccacgcttgacgcaatggcatctgaaattgagcgtatcggagaaatgtgcgcctcctctatcaaggcggcggcatga

SEQ ID NO: 169112 - DNA, 282 bp, Enterobacter cloacae
atgagaaaaacacatcaactaaaaattcggcctgagttttttcaagctgtaatcaatggaacgaaaaaagctgagtttcgtctagctgaccgcgcttttgctgcaggggatttactttgcttaaacgagtatggcccctgcgagtatgacccgcaaaaggtcggttttaccggcgcttttgtctacgtgctagtgactcatgtaactgaccttaacgagtgggctcctggctatgtgatgctaagcatacagcgtaggcaagtggaggagctatgcgggtaa

SEQ ID NO: 169113 - DNA, 747 bp, Enterobacter cloacae
atgaaaaataacgttttctcacaaagccagattcaggcaatggccgatattctgcacaatgacagctttgactatcaggcagcatggttgcgtgtcgggaaactcaatatcgaccgcagcatcaccaaatctcgccagattggcgcaacgcagctctttagtcgtgaggcgctgctcgatgcgctgacaacgggcgataatcaggtctggtttgctcacaccattgaacatgcgcgcgtggcgctgatgtacatgaacaacctttcggcgcgcgtcggcgtccgcttgacgagtaacggccacaacctgcagctcgacggcggggcggttattagctttgtcggcgaggaatcccactgcgccgcactggcgggtaacgtctaccttgatgagttcggttggttcagtaacccgcgaaatgcggcaaaagtcgcggcgggtatcgcctgtcataagcgccacagcctgacgatgttcacctctccctctgataattatgacgctttccgggtatggaatggcacgttccgcaatcaccgaccgtcaccgctaatcaataccggcgacagcgtattctgcacagatggtgtctggcgtcagtcggtcactctggatgcagcatgccagcgcgggtgcaatctctttgcgcctgaggaaattaaacgcgaatacagcgacgatgattatcgtctgctgtttggctgcgactggtctttcgctgttgcagcgggtgaggtggcagcatga

SEQ ID NO: 169114 - DNA, 297 bp, Enterobacter cloacae
atgacagaaggggaaaaaggcgtcctgtcactgtttgtgattggcgtgatgattgttgtcggaaaagtgctggcaggtggtgagcccatcacccctcgcttgtttgtcgggcgcatgctgctcggcggttttgtctctatggtcgccggtgtcgttctggtgcagtttcctgatatgtcactgcctgccgtgtgcgggattggatccatgctcggcattgcaggttatcaggtggtggaaatcgccattcagcgccgctttaagtcacagaagggggaaagcgatgccggtcattaa

SEQ ID NO: 169115 - DNA, 642 bp, Enterobacter cloacae
atgaatacgttatccacgatacaggagctcgcgcgcgcgattcgcaacctcatccgctcaggcgtggtgactgaggtcgataccgtgcaggggctgtgccgcgtacaaagcggcgggatccagactacatggctgaactggctgaccactcgcgccggtcgttcgcgtacatggtgggctccctcggtcggtgagcaggtactgctgctggcaattggtggcgagctagataccgctttcgtgctgccggggattttctcagatgagaaccccgccccgtctgcctcggcggatgcgtggcatgtggtgttccctgatggcgcggttatggagtatgaaccggaaaccggtgcgctgacggttagcggcatcaaaactgccgacgtgacggcatcggagtccatcaccgccaccgtgccggtggtgctggtcaaagcggcagagcgtatcaccctcgacaccccggaggtggcctgcaccaacaaactgacgacggcgacgcttgaggtgcaaaaaggcggcaccatgcgaggaaacatcgaacataccgacggtacgtttaaatcaaacggtgtgcaggttgatgaccacggtcacggtggcgtgcaacggggcgggagctggacggagggcaccaaatga

SEQ ID NO: 169116 - DNA, 453 bp, Enterobacter cloacae; identical to SEQ ID NO: 140466

SEQ ID NO: 169117 - DNA, 1146 bp, Enterobacter cloacae
atggccctgttggggttggataataacaccgtacatgcttttgcgcgtgaagacgtcgtttgtcctatttgcgaggctggtggcggttcctatgtacgagcttcaggagtcggcaactatcgcaaaaaagctcatttccggtttattggggggagtggtgttagcgcacaccatccatcctgcgatttttatgatgatcgactttcgaacgaggtcaggcagcacctagtgcgattcaccactgatcgcacgagaattacgcatgtgatcagaaaaatggtatgtgcgggcattcaggaaaatgtcttcacacaagaagctatgcgaaatatgcggcagtggttttttgccaaacgtcgcgaatcgacattcgaaatcacattgagccatgagcagatcgattggttggcctatattattgagttgcctgcttacccatatgcgtggcacagagataccattttgccgttccatcctatgcaggctatcgtgcctggcttcgattgggcaaaggcgattttgagagagaccgttaggctacatcagcctactttggagtgcttggataggctaaatatccaccgcaaaaacatcgtagaactgcgaagttttgtccataaaacgcaaaaccccacactgttagatcctgagttattgagagaagaatacgcaaagaccctccagttgaacgcatttattatcaataactacattgaattccaaaacaaatcggtaaaagacagagctgatggtgaggaaaaactactcgcattttccgccttattgttgttcgtttcaggctgggatattgatctggccattgcaaagtttgcggccattgccaatgtgcgacaggtagatgacatgcttgccggtaacttcatgggcttgaacccttacttcaagttttcaattgccaatacaaccaaagcacttcaggacaactggccgattaactaccaagaaattgacggatggcaggtagagcagtctatgagagatacttatgtgaaacatagccttgtgttacctgtacctcttcccccactacagcctgatttgtacgttacaaagcacttagaaagtgagaaaagaatggccgagataaatcgcatgatagaaagcgattccatcgacttccagtag

SEQ ID NO: 169118 - DNA, 642 bp, Enterobacter cloacae
atgatttttaacggggagatggtgcgcgccatcctcgacggccggaagacgcagacgcggcggataatgaaggtgcagccgcagccatcgaaatcacgaccgggagatttttggttttcatcgaaaaaattagaaagcatggtgcacgtttctgacctcgctccaggtaactcacctatttccgattgccatcttttctttcaagagcactgctgcccttttggtaccgtcggcgatcgtatctgggtgcgggagacatgggcagaggctggagctggcgcgccggatctgaaactttatcgtgcggattaccctgcgcatgttccaactcattacgagaacgtgccgccagctgaggatgtccgctggacacccagcatccacatgccgcgctgggccagtcgcataactctggaaattaccggcgtgcgggttgagcgcttagccagcataagcgatgacgacgcgggaaaagaaggctatccggccaatccggaaccctacgggggcgacatggaaaaatggctgtggttccgccagttgtgggacagcatctatccggatcaaagcttcaagcacaatccatgggtctgggtaatcgaatttaaggtggtgcccaatgttcaggataatccatcctaa

SEQ ID NO: 169119 - DNA, 267 bp, Enterobacter cloacae
atgtactttgccgtttcgctgaaatgcatgaataatattttatgtacaaattacttctgcttctttgaaggggtgacagtgaaaaaatttatgcagattgacaggcgcattgttgtgaatggaatttcatatctcgtcagatgcgaagagaaacccaacggtgagtggtatgttttcgacttagacagaaaattcaacatcagtacgcgcaacaaagaaaccgcattcactgagtgggagactgaagcagccactcggaatggctag

SEQ ID NO: 169120 - DNA, 309 bp, Enterobacter cloacae
gtgctccacgacgtcggggattgcggcgaaacgggcgaagaccgcgtcgccatgcagctgagcgcctccgggctcgatatcgcgacggagcatccatgccccgcggaggttctgcaggatttgcacgcccgccgtcacgagaggaccacagtcacgagagcacaagcgcccctctgtggcggaccgaagcacgcagcagcacgagggacgccgctagcagaactgcgtccttcagtagaaactgccctggtgcagccgaaatcgcaggaaagccgccggcagtctgctccgcgacacctggagtggtga

SEQ ID NO: 169121 - DNA, 270 bp, Enterobacter cloacae
atggatattgggacactttttgctctggttattagtggtttaggggttttatattctatcttccgtgacaatacaaaggatactactgatttattaagtcgtgtatcctaccttgaaactaccattgcggtacaagatagtaacattacacgtctaagcgacgaacaagacaagatgaaagaaaccttgcgaaaccttgaaattcaaattcacgaattggatatcaaacttgaaaggattattactattcttgaacaatcaaagcagtaa

SEQ ID NO: 169122 - DNA, 153 bp, Enterobacter cloacae
atggaaaagaaaaataaagatattccagtatctatccgtatcactaaagagcaatccgaagcaattcaaaagatgttagttgatactggaaaggcaaaaaatcgctcagcgggtattcagtatttgattactcaaatgatgatcaagggataa

SEQ ID NO: 169123 - DNA, 528 bp, Enterobacter cloacae
atggggctaaagctctatacgggtgctggtgatgtaggaactatcatggctggcgtgttcggtgaatcatcagcagcggctaaggcagcttttgccgtaagtaaaggtattgccattgctcaggcagtgatcaacatccaacagggcatatccgaggctattaagcttggttggcctatggggatcgcagcaggtctacaggtagccgcacagggtgctcaactggtcagtactatcaaaggtacaactattcagggtcaagcccatgatggttgggattcactaccaagtactggtacatacaatcttgaaaagggtgaacgtgtagtaggtaaatcactaaaccaggatttaacaaaatacttgagtaatcaggatagtagtaaatcaggtgatattaagattgatgcaccattaatcattaatagtaatggtcaaatctctgatgctgatttccaaaagatgtgtgataaacacgcagatactattgttcaggcaacacgtaaatcacagaagaataacgtataa

SEQ ID NO: 169124 - DNA, 426 bp, Enterobacter cloacae
atggcagacatcgcccatgtcgccgcgaccatttcgggcaatgcgcggctggaagccataggcaacgccatgacggtcagcgacggtgaggcatggcgcgatatcaaccattggctcagttgcgttgcctccgttctccggtgcgcggcctatccagttgccaggaatgccgtaagcagcgataggcgcttcgtggttgcaagtgagcgtaggcgcggaattgtccgttttaatctcggcaccgccctgcccgtgagccatagcgataatcggcgttccgcgccccgttccgtcctcgcttccgtcaaagccttctgctttcagggtgtgggaaatgtcgccattaaccgactgcgctataatcccgcatcctcgctggctgaacagttcctgattgctctggcctattcctccgatgttgtgtga

SEQ ID NO: 169125 - DNA, 135 bp, Enterobacter cloacae
atgtttgtggggcttgatatgtcctttcatcataaacacaactataaccaagatttgttagctgattcacaagatcattctggtagccccaatcataacattctgtatatcctactggcattgaatcacggctga

SEQ ID NO: 169126 - DNA, 330 bp, Enterobacter cloacae
  misc_feature (304)..(313): n is a, c, g, or t
atgggcaataagaacggttacgatccgggtattacatctggtgttcagctgtatttggagtgcgggcaacggatagttgtagtccatcctggagggtacttggacaggattgaagaagggcaatgtgtattgttcgaaacaataccgcataaggatggtacacgcatgttctggtttggtgtggtattaagtaacgcctactactttatgcttgaggtagctaagccagtagacatctttatggtacgtagctggttctatgcccaacaagctatgttttcagcacatgatggtgagcttggtnnnnnnnnnngtgaattaccattttga

SEQ ID NO: 169127 - DNA, 174 bp, Enterobacter cloacae
atgctgctttccgtgctaatggatggttttcacaacgcttacactccaagggtttggataaagcagaagagattcttttgtcaatcgataattgcgttaccgaacttgagacagtactttttaaacttgacgaaatcaaatattatcttgatgcaatacattctaaccatataa

SEQ ID NO: 169128 - DNA, 759 bp, Enterobacter cloacae
atggcaaaaacactcgccgagattaaggcagactaccaatacacagacaagaaaactggtgaagtaaaagatcgtacgattaacaccccacattatttccgagacattcccaggatttattcccccaacctccaggatggttacatggacttttgccccaaggcgcaaaagttgtactgctattttcagggatgggaaaactcagggagtttctgttacgaaagtcaggaagagcttggaaaggtgatcaacttatccagggagagaacctgcaaactcattcagaagctgcaagatgcagggctaatcacgaaagagaaaaaccctggttatcgttccaaagtttaccgcacgtttccgatcactgatgcgcacattactccaccagaagcactgacagtgcagcctgatatcatttctgacgtagtgatacaccaggcagcgcctgaatcagctaccgcagaggaaacgccggatgatgcaccgaattgggatgcaccagaacacctggaaccgccagcacctacaatgattaatgtcatagaggacgctgtgattgttgaggctgtttgtgagcggctctcacgtcctgaaagtctgagacaaagccaaagattcgacacatttacagcgtatgcgcgtcgtgtcctacagaatgacgataaacgcctaccaaaaagaattgaggagaggttagaggaacgctttgaacaacttcacccgcatctttattcaagattcgacccaataccattttaa

SEQ ID NO: 169129 - DNA, 252 bp, Enterobacter cloacae
atgccgaaagacattgcgcacacggcgcatagcttctgtgcctcgtttcacgagggcgaagccctggcacaatcacagacagatgcgctttgctgcgtcgtgagcggaacgtgggtgtccgggaagccaccaaacggcgtaccaggacatttccccttgagtgacggcgataggcgccaggcaaaagatctttgcgacaagcgcaaaaccatgaaagatagtcttatagatcttagtattatagttaagtag

SEQ ID NO: 169130 - DNA, 339 bp, Enterobacter cloacae; identical to SEQ ID NO: 144243

SEQ ID NO: 169131 - DNA, 153 bp, Enterobacter cloacae
atgaagatcaactttgactcagcaactttccaatctttattacaccgtgccaacgcagaagggaaatcgatcccgaaattggtaaacgaacttttaaccaccgtccttactaaagaggaaccaaatgccaaaaaagaaaaaactcgtacctaa

SEQ ID NO: 169132 - DNA, 816 bp, Enterobacter cloacae
atgccaaaaaagaaaaaactcgtacctaactcaggtaaatctatttcagagattcagcaactacccggtaatacctatacggaaaatggtgtttcatcgctgacgtttgccaaacacaacgaatactttaaagacataaactgcatttattcggaagaatacccggaagggaaaatgctcgaacttgttcacatcgttttatactgtcgcttccagagttttcaagcgaatgggaagaaatgttatgaaagccaagggaaattaggtcaaatctgtaaatgtgaccctgggacgataggcgataaggttaaagagttggtaaaaatgggactggtgataacagacgaacacccagatcccaatatttcatcgctgctttacactgcattaccacttactgatgctcacgttatcccaccagatcaactaccagcagcgcccattatcgtttctgccgtgaaatctaaccagccagcacaaatgccagcccctgagccagttaaggccgcagaggaacagtcagttcctgatgatgaccttccttgtgtctgggatgaccctgattatcaatcaacgccaacgatcccgacgcagcaggacaagccagagcttccctggggcggtagaaagggatttaaaactaatggagatccagcggatgaaggggtgcagtgggcattaactgaaacaatgggcgatgaagaaaaagcctaccaacttctttccagagttttatctgaatactttggaagagcagaagtatttacgccgcgaactacggtagtctacgacgaattcggcgagataccattttaa

SEQ ID NO: 169133 - DNA, 210 bp, Enterobacter cloacae; identical to SEQ ID NO: 110142

SEQ ID NO: 169134 - DNA, 303 bp, Enterobacter cloacae; identical to SEQ ID NO: 110141

SEQ ID NO: 169135 - DNA, 234 bp, Enterobacter cloacae; identical to SEQ ID NO: 110140

SEQ ID NO: 169136 - DNA, 378 bp, Enterobacter cloacae
atgaattttggaacatttcaaacattaaacggggataacagccacgcccgttacaaagtggtggcatattgcgacgacgcaattctccaggacaagctgatccgtgtggaatccggtgtatctgccgatcttattgttggcgaccttgtggacgctacaggcgctttagcaactgcgcccggtgatatcgcttatgtggtggtggagccagccagcgcgggaagcaaagcctttgttgtggcttctcctactcacgtcattctatctcttgcagggattgaatttggctctatggacgaatcattagctcaggcacagcttgcaacgcttggattcactttctctgatttcaacactgtagcgcttcgcactacgtaa

SEQ ID NO: 169137 - DNA, 198 bp, Enterobacter cloacae; identical to SEQ ID NO: 110137

SEQ ID NO: 169138 - DNA, 1863 bp, Enterobacter cloacae
atgcttgaaataaacgcctcacgtatatcgaacgtgatcacattttctgttgatcagaatagtcttagagatgcgaagaaggccggaaaggatttacagaagtattttcagtctctggctgagcctaagctgaggttttctgctcagaagcaacgtagacagaaagcgcgtgaacaaatagcggattcaaaatccgccattcctaaaacgtctaatgccttgaagcaacagcgtattgctgagaaagccaccaaagcgcaaaccagggaagcggcaaagattgccaaacgtaatgaaatggccgatctgaaattccgtagtgctaatctccagatgaaaggcatagccgggaagtacggcgttgacccactaaagcaactggaatttgctcgcttcgccaaacaacagacagagcttttccgtaataaccagatcagcagcgcgaagttaaattatgaactacgtgaaagaatcgcactgatgcgccgtgaggcagcgttacaagctaaagtgacggcatccactcaggcacaagcggcagccctgaaacacgccaaacgcacggactacaaaggcgcggcggctggtattaaagagaaggggctgaatctgatcggtggtggtggtgctctgattggtgcaacagcggctttcgctggcggcgctggtgtcctgtcccgtatccgtgacaaagggaatgagaatcttgagcttgtccgtatgtcggaacgcacgaagttaaacccaaatgcagtgaaaacgattgtagcttggggccaacagcacggcgttgactcggcctctgtggacaaaataacggatgggtttgggaaagatacccgcgagagaatcagcgaaacggtattaaacagccagttcaaaggtggtaaatggtctggtggaaatagtgccgttgacgaagtgctcaataagtttggttggggcaaaggcgatatttccaaattcgcagataacccactggattacctacaggcagtagtaaacgaaggtcaacgccgtgggatgaaagacggtgagatcgggcatcttctcgaaaatacttttgatgatggtatgcactaccttgatctcttcaagaataacggcgagcagtttatttctactcttaaacagcttgtggactccggtcagacattgaacgatgagcaaatccgccaggtatccgcttacggcgatctgtctgtggctatgggtaacttgatgaacggagtagacaatcagttgtttacaggctggatgaaaggcttcgccgatgggggtgatgatctcgtgaagaacaccagagtgattacggaagcggcgggaagcctgggagagggattaggcaatctctcgaaagaaatcaccgggtttgtgggcgaaatctccagtgtggtgtccgatctgaatgctggtctacggtcacgtttcccttcatggtttactgatagcgataagccagcggcccaggctctttacgatggtgctgtgggtggctctgcgaatgcggcggctgattgggtacaacaacaaacaggggtggacacaaggacgtttggcccagcaatagccgaatggctcggatttggtggtggtaatgccggaacagccgccagtcagtacagcctttcaggtgattctctgcgtgattctgcaatgtctcttggtggtggcaatgcgccagcgtacacgctgaatcctacattcaacctcacagtagcgccgtccgtaccactgacgatccaatctgacactggaagattagctgattacatcgacttcaacgctaaagcgtcagcagcaagtttcgaacagtcgttaacgttagctattagcagcggtcagagcagcactggtggctaa

SEQ ID NO: 169139 - DNA, 516 bp, Enterobacter cloacae
atgattagtgaaatatcattttttgatcaaggggatgttttttccgcaccagaaatcgacacccacattattatagaaaggtctgaagtagaaaaaaaagatatctcgaaactcttgtctttttttgatctcgctatttcatcaaaatcggcaatgaggtgcttccaaggcaagattgatttatcatttaatggttatgatcatgatccagagctttatgagattaaagaaattagagactacgcacaaataataaaccaacaaatacctcatttatttttctttttgaatcctaaaggcgcttgcggggtcatcaagatattatatctttgcttttgtgaagttacttccatacaaaataatttgcatgggaaaaattacatccatgtaaacccaaacaacattgacattttattgaatcaacaaaaccttggcattgagcaactagcggagttgtgtggagcatcttctgaattaataaagaaatcaatagatgaaacattacctagaaagtaa

SEQ ID NO: 169140 - DNA, 852 bp, Enterobacter cloacae
atgcaggatgttgccgtagcttgtcggatagccattgttataggcttcgtacatctgaatgcctggcattgcgccctgaacattcccctccagtgcgctaatgcgcccacgagacaccagtgtcgggatggtaatgttggcagagccatcgaacgttacactgttaattgtccgtggcgtttgcagtttggttgcagtggcggcattaccagtggtgttctgattaccctgaatatttacaccaggcagattgatatcggtagagccatcaaaactaacaccaccaatatggcgagcggtttgaagtacggtcgcagtgctggcattacccaccagcgaaccggtaatggagccatcctgatcagaaatgacgcgatggtagacagtcccttctacagcgtcttcaggcagcgtatccacaacctcaagtacttccagagtttcgaccacagcaccggcagattgcaggttgacgaccagcttctgagagccagcaccggctttgaggtaaatgtcgtaattatcgtcagtcgtgttaacggtagctacagtcaacacagccgaatccatagtgcgataagcgaccgcattcaacgatttcggatcgcctgcagcagttcgcagcacaatatcggccattgcagcaagccctggctgcccggcttcgtaccctgccccgccgatcacttcgatgtatacggtgctggtcgactgtggcatacgtgccgtggacactttcacccacttcggcgcatcggtagccatgtccatttcagccgaagtccctttccatttcacactggcaacactggcctgggcgttctgggcgtactcataagccttcgtttctga

SEQ ID NO: 169141 - DNA, 525 bp, Enterobacter cloacae
atgaattatttaaccgaactaccattcgttgatatttttgatgcaaaaaacaacaacgcttttttctggcgcgtgaacaacccgctggattacaaatgcggagagaaaaatgcacaagagttcgtgagatttgttgagaactatcccttcatgaataacagcaatgttctgtatcggatcgcatgtgatatgagcgactcaggtcttattaagtcagaatctgcaagaggcttctttaatacgctagatacatttttgacaccgaagagcagtgaagtaactaaaacgagaagcagagtacgccgcaccgtcagtaatgtagctttagacataggggtaacaagcttgaaacttctgaactttcttgctctcctaggttgggtagacaatgcaactgtacaaccaaacaatgaagcaatcgaagaaggcgtgttacgtagaaacagcaaatcgccatttggttttattttcaccgacaagggagagcgattgattaagagtaaatacaaagcactggacaaataa

SEQ ID NO: 169142 - DNA, 789 bp, Enterobacter cloacae
gtgaataaaaaatacgcattgggactaatggcggcatctatattgttaacaggttgtgattctgctgaggagcgagctataaatcttgttgaaaaggaagttcgttctacgcttttagatccagattcgggccggttcaccaatatgcgagcgcttcagctaggtgacaatagtcactcatatatggtatgcggcgaggtgaatggaaaaaatgccttgagcgcctatacaggcgcgactgaatttaatgcgtacatctttgatattcgcgaacgtgagccgataacgaatgttgcaattaataataccactagctcattaaaagagcgattgctttttgaacgacaaagtctggcatgtattgacaatggcgtgaaacgctatttagaaaaagaagatgaattcagaagagcaagcgaaaaacgagatgatttgaaaaaaactcctttaggaaaagcggtgtttgatgccgcaagtgattcatcatatgtaagcagagagttgggggaaccgaagcgtgtccgtgaagtgtacgcaagagaggacgataagcatgcctttgtaagtgtcactaattatgatactcccgatttttacaaattcaggaagagcgataaaggcgaacttgaacctgttaaggggctttcatataccggttatcccgcagcagtcaaacagtgccaatttgaacaagtggactctgaaaactgcatcacagaagaagaaattaagttgcttcgaaacgaaaaatataaacttgacgacttcgaagtcccgccagaagaataa

SEQ ID NO: 169143 - DNA, 972 bp, Enterobacter cloacae
atgcccgttgattttttgaccactgagcaggttgagagttatggcaggttcactggcgaacccgatgaacttcagctggcgcgttattttcatcttgatgaagcggataaagaatttatcgggaaaagccggggtgatcacaatcgacttggtattgccctgcaaatcgggtgtgtgcgttttctgggcacttttcttactgacatgaatcatattccttccggcgtccggcattttaccgccagacagctcgggattcgtgatatcaccgttcttgcagaatacggtcagagggaaaatacccgccgtgagcatgcagcgctgatacgtcagcactatcagtatcgtgaatttgcctggccctggacatttcgccttacccgtcttttatatacccggagctggataagcaacgaacgtcctggcctgcttttcgacctggcgacagggtggcttatgcaacatcgtattattctccccggagccaccacgctgacccggttgatttcagaggtaagggaaaaggcgacgttgcgcctgtggaacaaactggcactgataccgtcagccgaacagcgttcacagctggagatgctgctggggccaactgattgcagccgcctgtctttactggaatcactgaaaaaaggccctgtgaccatcagtggtccggcgtttaatgaagcaattgaacgctggaaaactctgaacgattttggcctgcatgctgaaaacctgagtacactcccggctgtgcgcctgaaaaatctcgcacgttatgctggtatgacttcggtgttcaatattgccaggatgtcaccgcagaaaaggatggcggttctggttgcctttgtccttgcatgggaaacgctggcgctggatgatgcactggacgttctggacgccatgctggccgttatcatccgtgacgccagaaagattgggcagaaaaaacggctccgctcgggataa

SEQ ID NO: 169144 - DNA, 555 bp, Enterobacter cloacae
atggacaaactgacagttgagacaatgactcctctggttcgagaaattaacaatctatgggattggttcgataaagattgggaaaacacatcattttataaaggtcttaaaaaactgaataaagctggtgttagtacttccggtatgtctcaaggacaacttgacggtctagcgaaaaatgctgatgtgagttataaagctcaagaagctgaatggcagaaaaaatatgatgcgtgggcgaaacgttcagaagatgagggtaaaaagaatctagaacgtaataagaaacaatggtctgctcaagaacaagccgaaaagtctatcagagaaaaacaagcagaagatgcgaaaaaagctgctgaaaaagcccaacgtgagcaagaagccgccgctgctaaagctaaagctgcttatgataaaatgatggcagaacgtgctagttatctccagactatgacacaaactgatattgctattatctcacagggcgctcgtggtgttgcttcacagatgaatcaggattcagatgcaacagacgcttgcgaatatcgataa

SEQ ID NO: 169145 - DNA, 876 bp, Enterobacter cloacae
atgaaatacttagggtcttttataaaaaatcaaccgtgcacatggctagaggcggcaatagaaagtaaaaaagaaaatgttcaagatcttgaagatattgctgatgatatcgcggaacattatgagttatataatggttttataacttcgtttgatgaggagttatctgaaagttcatttctgcaatattccgatctattagttgagtattatgaaaagtcgccgagcaaattaaataaattattacttgaaagaagaaatgagcacgaactttctttttgcccttattgcggtaacccaatgatccctgatactttagatcattttattcctaaaggaaaatggcctgagttttcaatttttcctaacaatctagttccccaatgcagagggtgcgcaccagtaaaaggtgagaattactattgtactgaaagcaattcagctatgtttattcatcccatttattttgattttttggagaatttccgtttttcgatgaatgtaacattaattggagataaaaatgaattgtctgtggaggttaaattaaaaaaagtcatggcaacacggattgaagatcaaaggagagttattcttcatgcggaaaaattgaaaataaaatcacgtattattaattattgcaataaggattttaaacagtggaaacgtagattgtccagtgccagattcgatattgaaacggcgttgcaacaacgcttatctgaagttcctcaatctgaaattggtaaagattggcagagtgccttttattttgctctattacaaaaccaagatgttattctttacttgaattctttgtgccctgtagaaaatcctcatcaacaattcgataacgtggaagatttagatttttaa

SEQ ID NO: 169146 - DNA, 744 bp, Enterobacter cloacae
atggagcataaatatggacaaaaaattacttctggaataaatgagatttatcgccgacacatagaaattgagacacaaaaagccttaaactcaggtgataaattgttaagccccacaggtatgattgaagaggctggaagaaggttcgggcgaaaaggtttggaggcattaatgcttcttatagaggcctacgatagtgcattaaaacatagcccaaatacttttatgaaattccaccaatataaaaatattattaatctttcagacttatttgaacagtataagccgattgcatcagaaggtgaatttttagaccaaaggtttattgattttctgtctaataatacaaataagttaggggagattcattggagaaaattcgaagagttaactgctgagtgctttaaaaggtttggttataatattgagttgggacctggtagtaatgatgatggagtggatattagagcttggaatgataaaaaagaaggggcacctagtttcatcattcaatgcaagagattgaattcaaaaatagataaagttactgtgaaaggattgtatgctgatatccttcatgaaggatgtgagttaggttttctagtgacatcttctgagtttagtgtcggtgctcgtaacacagtagaggcgcgtagctaccccatagaagagattaataagcataaccttaatagctggctaaaagaacttagaactcccggcaccggtattgttcgtgtctag

SEQ ID NO: 169147 - DNA, 252 bp, Enterobacter cloacae
atgcgcaaccttctgttttataatgaattacaaagaaacacatttagagatacccccataagtacccccatttcatttccatatagaacgaagtcccataaatacccaaagaaaatccttcatatgatcttgaaaatcattcacaacaaaacttatataaatgcaatgcaagtggacatttatataagattggtgcaatttctacatctagacacgaacaataccggtgccgggagttctaagttcttttag

SEQ ID NO: 169148 - DNA, 396 bp, Enterobacter cloacae
  misc_feature (287)..(296): n is a, c, g, or t
atgcagacgattctgggagcaagcggacagattgcccgggaacttgcccgcgagttaacacattccttcagtgctgacctaaggcttgtcagccgcaatccgcataaggtcaatgacactgatacccttatgtcagctgatttgcttgatggcagtcagaccctgaatgcggtaaaaggtagccgcattgtgtattttgcagcaggcctaccaccggattcctccctctgggagaagcaatttccggtgatgcttcagaatgcactgaatgccacccggcaagtagnnnnnnnnnntattttgacaatacgtatatgtaccctcaggacagtagacgacagacggaagacatgccgtttcagccatctgggagaaaagggcgtgtccgggcaatga

SEQ ID NO: 169149 - DNA, 207 bp, Enterobacter cloacae
atggcaaaactgatacatgcattcagccacaagaccggcactaagaatgtcggtttttttatgccatttatccgcgattatcccgtttttttaagcggcgcatgtatcaggtgcatgattccgctttcgttttttattcccgtgtttgtcagccatcgccagttctggcgcggctcagggctgctcatgctcatgctcatgcattaa

SEQ ID NO: 169150 - DNA, 405 bp, Enterobacter cloacae
atgcaggtcactattgatggtgtcccatacgctcccgccagcgtcgtttcatcccggatcggaattgccatttcgacacatcagcgcgcagacgttttaaaacgttcactcgaacagcatctgaggcatctgccagccgggtcgctggtggtggttatcgacgacggttctcaacctgccgccgtagtacctgacggagtgcagttgcgtcgccatgaaacatcgcttggcattgttgcttcgaagaacgccagtttaaccgcgctgattatgcagtgggtgatgcctatagcggcgcagtggtctatccgtgctactcgctggtggaccatgcagatgttgaaccggttgaacgtcaccttgactcagcgccacgcacagaacgccgcagggcgtggaggttag

SEQ ID NO: 169151 - DNA, 726 bp, Enterobacter cloacae
atgaatcagatgaatatcaccgtaatgtgtccaacgcaccataccggagcgatgggtcagcagctaacgatgtccagccgtgaaattgcaaaactggtcgattcacgtcacagcaatgtctgcgtaaccattgagcgactgatgaaatccggcgtgattggggggtatgctgcaatgcagtacacccatccacagaaccagcaggtttaccactactacgaagttaacaagcgagacagttacgtcatcgtcgcgcagctgtgcccggagtttaccgcccgtctggttgatcgctggcaggaactggagagcggagccgggatgacagttcctcaaacacttcctgaagcccttcgcctggcagccgacctcgccgaacaaaagcagcgcctgagtgaagaactggccatagcagcgccaaaggcggagtttgttgatcgctacgttgttgcctccggctctatgactttccgacaggtggctaaactgctcaatgctaaagagccagagtttcgccttttcctcctggataaccacatcatgtaccgtctgaacggtactcttacgccgtatcaccaacacatcgaggcagaacgctttgaagtgaaaacggggaccacaaacgcttccaactacgcattcagccaggcgagatttactgcgaagggtgttaaatggattggcggcctgtgggctgagcatatcgctaaggggcaaactgcgtga

SEQ ID NO: 169152 - DNA, 135 bp, Enterobacter cloacae
atgttgacgcatcgcaggctaaacaaaattctgctggtgctggtgctggtgctggtgctggtgctggtgctggtgctggtgctggtgctggtgctggtgctggtgctggtgctggcgaacaccagactgagatga

SEQ ID NO: 169153 - DNA, 558 bp, Enterobacter cloacae
atggcgtatcagcttttgctggacggcatgacgcaggattgccgtaatgtattgttgaatgcgcatggcaacttcaagataaccaagagcctcaacttttttcaccggaaccagcagatcacccgtatccagttcggcaacatctttgtcaccgattaccgggaagacataagtttcaaggcgcttccatacggcatcaccataatcatcagaccattttgttttcgtggagaaccacgctttggctactgttctgaaggagcgtgtattatcacgtttggctttaagctctttaacctctgcctgtttctttgcattagggtcaataccctgagccagaagccttctggcctcgtcacggcgttgtcttgcgtcagaaagagaaactgcagggtaaacaccaatagagaagagtttttgtttcccttcgaagcggtaagccatttgccagtatttcgaacctttaggggtaacacgaaggaacataccaaagccatcagtaagcttgtattccttctcaaggggttttgcattttttgctttaatatcagtcagtga

SEQ ID NO: 169154 - DNA, 303 bp, Enterobacter cloacae
atgaaaaaaaccgttatcgcggcggctgcattatgcctgaccgcaggaacaccgatttattcatttgccgctgacccatgcgaagttgtcctttgcatgtacggaaaatcaacgggtaatagcggcgggagtgaatgccgctccgcagaaaagtctttctttaatatagtcaaaaagaataaacatgatttcttacccaaccatacattgaatgcgagaaaagcatttcttggtgaatgtcccagcgcagacccggaggcagtaaataaaatactgtctaagttcggtaaggtcagaggatag

SEQ ID NO: 169155 - DNA, 1080 bp, Enterobacter cloacae
atggccgaactcggtacatttgaatttatagataaacagctaattggtggtataactcaatctaccagtgggttgatgatggaacattcatcaatggttatggggctggccgctgtgtcagccaccatatacatcatgtggcgtggctaccagacgctggcggggaagctctccacgccgatggaagacacgatgtgggacatcatgagaatggcgatcatcctgtcgtttgtggctaacgtcagtggttatctcgatggcgtgatcgatgccatcaacggtttaaaggagggtttttctggaggcgacaatatctggcaaatactagataccttatgggataaggcaaaagttttggggaaaacattacacgatatggataattccacatatgtaaaagatgaggggatgaccgctcaattttatgtatggcttgggatatttattcttatggctttaacagcttttgtttcgatggtcgctgagataatgatcttacttcttagcatcactgcgcctatttttattttttgccttatgtatggttttttgcgaccgatgtttaataactggttgcaaaatatatttgcagcgatattaaccgttctattttcagcattatcattaagagtagtcataaactttatgactaaaatattagcccaatctcaagccggagctgcacagtcaaatattgtggaactaggcgcacaggtctgtttggctggtatctgtgccgcaatactggtgtatatttccgctaaagtagccgctgcactggccggggcaagcgctaccgtatccatgcaggggctggccgctgtaggtatcggtgctgcttttggtgccgggaagctggccgggggggtacttaaagaaaccaaacgttccgcccaggacaacattcagggctggaaggatgcgaatgcaggtaagcccggcaagcccggaggtaagttaggctataacgcttctaaagcgcgtaaatacgcgattgagcagatgatagcccggaacgaagcgcggagactggcacagaggagggaatccgcggttaagaagttcaacagccaggtctga

SEQ ID NO: 169156 - DNA, 228 bp, Enterobacter cloacae
atgaataaaattattgccatcgttgccctttcacttgtagcaattatttcaggatgcaaggaagaagcgaaaacaacgaaatggtatcgtgatcaccctgatgaattaaaagttgtttatgaaaaatgtcaaaaaagcggagacgcttctaaaaactgcaaaaacgcaaatgaagcccattatcaaatacagcaattaaacgcaccaacgctaaaattccatgattag

SEQ ID NO: 169157 - DNA, 684 bp, Enterobacter cloacae
atggctgatagtaatgaaaatttaaataataattgcccctcatgcggtagcaagcttgattctgatgaagtatgtgcttgtggctatgacccaagcttggatgtgcaggaggaaagttatgtccctcagtttgcattgacagcaactctggataaagtgtcaggggactccggccctatttttaaagagtctttaggtgaagtttggacattagatacagaagacgttcagcttttcattaaacaaatcgagaaaaaatttaaacttaaaagaaaacttcatggtgtaatcgatgaaaataaaatgccattaagtgcacctatttctttcagtaaatatctaaatcaaaatatagattttaaatcatttgttcagtcaatgatggatagaatgagaggtgaagcgaataatgataaatcaaggctttctggtggggctataatatttattcattacaatgtagataatgataaagaaagtagtggtcgtctttttattatcatggtggatagaaaaggagtctttaattttgataagaaaataatggcgacccttatctgcactttatatctggtcgttctagtagcgaattctttaagcgagcattgggttgtaacccaaaaattgataataatagaagtattgatgaaacaaatagagctgttgatgattttgttaaggtaa

SEQ ID NO: 169158 - DNA, 1131 bp, Enterobacter cloacae
  misc_feature (627)..(636): n is a, c, g, or t
atggtcactgggagccatattccttttgatcgcaatggattaaaattctatcgccctgatggtgaaatcacaaaaaaagatgaaattgatatcttgaattcaaattacaaatttgaagttgttaatgattttaatgatttgccagtaaatgatgaaggtgcgataaattatataaaaagatatacttctttattcgatagtcttgttctctcaggtttaagaattggtatttatgagcattcaagtgctggtcgtgacctttatgcgagcatttttggcgaactaggtgcagaagttatcccacttggtagaagcgatgattttgttccaattgataccgaagcagtcagcaatgaagaccgtcagttagcaaagaaatggtctaaagagtataatttagacgttattttttctactgatggtgatggagataggccactcatttctgatgagaaaggtgagtggttgcgtggggatattcttggattattagcttctatagcgctggggatcgaagcagtcgctgtgcctgtgagttgcaatacggcgattgaattatccctcaactttaaatcaattgtacgtacaaaaattggttctccatacgttattgaagcctttaatgannnnnnnnnnaatgatttaaaaaacaactatccttctgtagcgggttttgaggctaatggcggatatcttttggcaactgatctcattatcaatgaaaagcaattattagctttgccgactcgtgatgctgtcttaccggcaataatgcttttagttgcagcacaaggcggtaaaatttcaaagttggttagtcttctgccacaccgtttcacttggtctgatcgcttaaaggattttcctactgagctaactcagcgtttaatcgcatctgcaataaaatcaccagaccaatttatttcggatttgggtctagaaacaagaaaatgttcaagtattgatcagacagatggacttcgtttcgtacttgataatggcgatgttatacatcttcggccttcaggtaatgcacctgaattacgttgttacacggaggcttctgaagaaaatcaggcaaagaattatgtagaaaagattttgagcaagctcgttactcttaaaagttaa

SEQ ID NO: 169159 - DNA, 423 bp, Enterobacter cloacae
atgattaacttcaggacacagaattttgaagaagagatcctgggcagaactgacgggaaaggggttgatgttattcttgacattgtcggtgcctcatatttcaacaaaaatctgcatattctgaaaaaagacggacgactcgtgctgattggttttatggggggaagggttgttaaggagtttgatattcaggagctcatccttaaaagagccctggtaacaggctcaacgatgaggagtcggaataacgcggaaaaaggagaaatagcccaacagctgatacaaaatgtatggcctttaatcgaatcaggaaagtgtaaacctgtcatacaccgggttgttaaatttgaagatgtccggacagcacatgaattacttgaggccggaaaccacataggtaaagtcattcttacccttgaataa

SEQ ID NO: 169160 - DNA, 1026 bp, Enterobacter cloacae
atgaaaaaacgccaaaataaacagcctaaacagaccaacatgaccgccagcgcaccgcagaaaatggaggcgttcacctttggcgagccgtcacccgtactggatcgccgcgacattctcgactatgtcgagtgcatcaataatggcaaatggtacgagccgccggtcaacttctccgggttggcgaaaagcctgcgcgccgccgtgcaccacagttccccgatttacgtgaaacgcaacattctgacgagtacctacatcccgcatccgttgctttcacgtcaggatttcagccgccttgtgctcgattatctggtctttgccaacggctatcttgaaaagcgcatgagcgtcaccggccagctttttaaactagaaacctccccggccaaatacacccgccgttgcgtcgaggatggcgtttactggtacgtgtcggacttcactcacccgcaccagttcgcgcccggctcggtgtgccatttgctggagcctgacatcaatcaggagctctacatgataccggaatacctgagcgcgctaaattcagcctggctgaatgaatccgccacgctgtttcgtcgcaagtattaccagaacggcgcgcacgcgggttacatcatgtacgtcaccgacgcggcgcagagcagcactgacgttgagtcgctgcgctccgcgatgagggattcgaaagggctcgggaatttcaaaaacctgtttttctatgccccgaatgggaaaccggatggcatcaagatcgtgccgctgagtgaagtcgcaacaaaggatgatttttttaacatcaagaaggtgagcgccgccgacctgctcgatgcgcaccgcgtaccgttccagctcatgggcggcaagtccgagaatatcggctcaatgggcgatattgagaaggtggcgcgggtgtttgtgcgtaacgagctgacgccgctgcaggagcgtttcaaagagattaatgattggttaggaattgaagtgatccgctttaaggattacagcatcgagaccgactaa

SEQ ID NO: 169161 - DNA, 423 bp, Enterobacter cloacae
atggactttgccgcgcaggccgaggccatccgggcgctgaccgaaaaatacaccgtcgactatatcggcatcgatgcgaccggcatcggccagggtgtttaccagctcgtgcgctcattcttcccggcggcacacgccatccgctacacgccggaaatgaaaaccgcgatggtgctgaaagcaaaagacaccattcgacgcgggtgtctggaatatgacgccggtgcgaccgacatcactcagtcattcatggctatccgcaaaaccatgaccagcagtggccgcaacgccacctatgaagccagccgcagtgaggaagccagccacgcagatatcgcgtgggcgaccatgcacgccctgttaaacgagccgctttccgcaggtagcggtatgcaatcaagctcaattctggacattaactaa

SEQ ID NO: 169162 - DNA, 303 bp, Enterobacter cloacae
gtgctctatcccgaaattaccggcggacgcctgtcactgaccgccatcgagctgatggcagacgaggggcgtgcgtggccgctgattgacggaacgggcatgatccacggcatgtatgtcatcgacaaagtgacgcacacgcacaccgagctattcagtgacggagcggcgagaaaaatcgagtttagcctttcccttaaacgggtcgataaatcgctggcggccatttatggcgacctgaaaacgcaggccgacaatctggtcacgtctgccggtgactggctggtagggctggcaggatga

SEQ ID NO: 169163 - DNA, 1167 bp, Enterobacter cloacae
atgattacaggaatggatattcaggccggggcgaagattgccccggcgtttatgctcaagctcgataacgacgatatcacccaggattttagtgaccgccttatcagcctgaccatgaccgataatcgcggatttgaggccgaccagctcgatatcgagctcgatgacactgacggccagatagcaatgccaccgcgcggcgcaacgttgacgctgtggttaggctggcagggatccgcgctgataaaaaaagggacgttcacggtcgacgaaatcgagcacaggggcgcacctgatacgctgaccatccgggggcgaagcgccgattttcgcgggacgctgaactcgcgccgggaacagtcatggcatgacaccacgctcgggcaaattgtggagacgattgcggcacgcaataaactgacggccagcgtggccgacacgctgaaagccgtcgccgtgcctcacattgaccagtcgcaggaatccgacgcggtgtttctgtcccgcctggctgaacggaacggggcgtcggtttcggtaaaagcagggaaactgttatttctgaaagcggggagcggtaagacggccagcggaaagcccattccgcagatgacgcttgagcgcggcgacggcgatcgtcatcagtttgccattgctgaccgggaagcctacaccggcgttacggcgaaatggctgcacaccaaagacccgaagccccaaaagcaaaaggtgaagctcaagcgtaagccaaaagagaagcacctccgcgcactgcagcacccgaaagcgacaaaagccccggcaaagactaaaacccaaaaagagcaggaggcgcgcgagggtgagtacatggccggtgaggctgataacgtgctggagctgacgaccatctacgcgactaaggcgcaggccatgcgcgccgctcaggcgaagtgggacaagctgcagcgtggcgttgcggagttttcaatctcgctggcgattggccgggcagatttatttcctgaaataccgatcgcggtgaaagggtttaagcgcgtcatagacgatcaggcgcggataatcagccgggtggtgcataacctcaacgggagcggctacacgacgggcttagagcttgaggttagggcctctgaagttgaatatgagagtgaggaaattgaatga

SEQ ID NO: 169164 - DNA, 144 bp, Enterobacter cloacae
atgaagtttttgtttatctatttgttttatatgaataaagtaagtaatattgacgcgcatgaatcgtttagaggtgcacgctatgtttcactgtcccaaatgccatcacgccgcccatgcgcgcacaagtcgatatttctctga

SEQ ID NO: 169165 - DNA, 261 bp, Enterobacter cloacae
atgaagaaaaatataaagctgagcctgattacgttatgttggttcgcaacgttaaccgcctcagctcatgcaaaagatgtaacaatttactataccaacgatctacatgctcatgtctctcctgggaaactacccgccgttgacaaagaacgtctggtaggaggttttgcgaatatagcgaccatcgtcaatgatgctaagaaaataagtaaagatgttttttctttgatgcaggtgattactttaccgggccctatataa

SEQ ID NO: 169166 - DNA, 282 bp, Enterobacter cloacae
atgtctaaacaacatttagatttagcagttcggtatgtgaatgctggcgctgtaacggagttagcaattaaagcgcaagaagtgactagttcactacgtggggatatcgatcatcttaaagatacaatgctggcagctgacgccggaattggtattgattttgatgaattgaccgaactcttcaatcacctctctgccgctgaagaattgcttgtacgttgcgaaaaggctggcagaaccgttagtcaggaaatgcgtaaaatgcttactgaacttgaataa

SEQ ID NO: 169167 - DNA, 165 bp, Enterobacter cloacae
atgcgtagcatgccagaagcgttgcgcatcacgctggttctgctgctggcttttatgtctgtcgtaacggacttcacaagttacgttctttcattcgtcagcgatgcgttttttgtgggtgctcttgtctggttggtctggccctcactcaaacaagataagtaa

SEQ ID NO: 169168 - DNA, 3087 bp, Enterobacter cloacae
atgcgcgagtacggttatagctctgacgaagttctgaaaattacagaagctgtctctaccggcctcaaactttctggggctaacacccaggaagcgagttctgttatcactcaattcagccaggcgctcgcacaaggcgttcttcgtggtgaagaatttaatgccgttaacgaagccggtgatcgggtaatccgcgctctggctgcgggaatgggtgtagcccgtaaagacctcaagagcatggctgaccagggacagcttacgatcgataaggttgtcccagctttaatgagccagttaggagcattgcagggcgaatttgccagcatgccacaaacggtttctggatcccttcaaaaagtaactaactcattcatggcctgggtgggcggtgtaaaccaggcaaccggtgctactgatgcgttgtctggcggattggataatgttgcccagacgcttgattcttttacttcatcagcagtgagcggcgcgcttagtgacgttgctgacaatatgtcaacaattacaacagtcgctggggcgcttgttggcgtgggactggcacgctacctaagcggagttgtaaccagtgccacgagtgcaacaggtgcgctaatttcagctgcgaaatcagaggttgcccttgcagtcgcgcaggataaagcggcgcagtctgctgttgcggcttccagggctgaagtttatcgggctcagcaagcagtacagagttcaagaagtgcagatgttcaggcggctcagcaagaaaaggtcgcggcggctgaagcaaaagtcactgcggcccataccagactgactaccgctcttgccagtggtacagctacggaaaaggtgcgagccagaacagcacttgaacgcgcgcaggcagggctggtagcagctaaaaatgccgacgctcaggctgtcgctgaaaggcgtctggctgccgctcaggctgctttaaaccgtaacatctcaaatcgtgtttcgactcaaagcaatctcaatagcgtaacatctgtcggcactcgcctgatgagtggtgcgcttggcctgattggcggcgtgccgggtctggtgatgctgggagcaggagcctggtatgcgatgtatcagaatcaggagcaggctcggcgttcggcgcaggaatacgccaccacgattgatgaagtcagtaaaaagtcgaaggcaatgtctttacctgaagcttcagacaatgctgagaaaacgcgcgcagcattgaatgagcagaacaggctgatagatgaacaaaagagcaagatagaaaatctgaaagagcagatagctggttatcagtcagtgatcagtaatcccggtccaacgaccagcggtggtttcatgattaaccacctgacatctttggataccgtgacccgtggactggctacagccactgaacagttatctgttgagcaggaaaggcttgcccagatgcaggagaaatctgcctctatccaacaggttcttgaaggtcttgagcatcggcgtgtgacgctaattcgggaggaggcagcgaatcagaaccgggcttatcaatcacttctgttgatgaatgggcagcacgatgaacttaatcgattactcggactgggtaaccaactccttatggcgcgtcaggggctggctaacgtcccgctcagacttccgcaggccgatctcgacaaaaagcaaaccgatgccctcgaaaagagccgccgggatctggagttgtcacgcctgaagggtgaagcaaaagagcgcctgcgactgagttatgcagccgatgacctgggattaaccagtgatccgcaattccagacaggccgtcaggagttgattaataacggtcttgctgaatggcggaataatgaggccaacaaacctaaggcgaagggcggtaaaaccgaaggcgagaaaaccgaggatgtgtataagcgccttatcaagcagcaaaaagagcagattgccctgcaaggccagaatactgaactggcgaaggttaaataccaggtcagccagggggagcttgcttctctgacagaagcccagaaaaagacggtattgcagaatgctgcgctgattgaccaggttaaattgcgtgagcaactgcgaaattacgaagccaaccttgccgacagtaacgccagcgcccgcgcagccaatgaagcgcaactgctgggctacgggcagggaaccaggttccgtgaaagacttcaggagcagttcaatctgcgtaaggagtttgagcagaagaataccgatcttctccgccagcgtcaggctggtgaaatcgacgagacgttctatcagcaggggctggcacttaataagcgctacctcgaagagcgcctgcgcgaccaggagggatattacgcagcttctgatgcgcagcgtgacgactggatgacgggaatgtctgagggttatgcgaactgggtggacgaagctactgattattcttccatggccgctgacggcatgaagcaggccatgggtggcgcggtcaccacgatcaccgacatgctcaatggcaacgttgacagctggaaggactggggcgttagcgtactgaagattatccagaacgttctggtgaacatggctgttgctaatggcgtcagctcaattggatcactgttcagttttggtgcctcgtcagccgcaaccgccagcagcggtaccgctattcagaatgctggcgcgaacttcacatttaatgcgaagggtaatgtgtacgactctccgtccctgagcgcttacagcaatggcgtttttcagacacctcagctgtttgcttttgctaaaggcgcagggattttcggcgaggcaggtcctgaagcaatcatgccccttacgcgggcacctaatggtgatcttgccgttcgcgcagtggggatgccgcaggtctctggcggtgtgccttcagttaacttcggcgatatcaatattcagggcggatctccacaggcgtccagtcagggtactgccggagcagcaggcaggcagcttaaggatgccatcactggtgtcattaacgaacaggccagcatgccgggctcgcctctgtggcgattaatcaagggagtttaa

SEQ ID NO: 169169 - DNA, 444 bp, Enterobacter cloacae
atggtgtgcggcaggcgcttccggaccttcaacgtggtggatgattttaaccgcgaagcgctggcgatcgaaattgacctgaatatcccggcgcagcgggtcatgagagtgctggacaggaacgtggcaaaccgcggatatccgctgaaaatgcggatggataacggcctagagctggtcttgcgtattctggcacaatgggcagaagagcatgtcgtgatgctggaatttatcaggcccggcaagcccacgcagaatgcctttatcgaacggtccaaccggacgtactggacagaaatgctgaatttttatctattcagaatcctgaatgaagcacgggaaattacagagcgctggctggctgaatataacgccgagcgcccttacgagtccatgaataacctgacaccggaagagtaccggctgatggctgaaatcccataa

SEQ ID NO: 169170 - DNA, 393 bp, Enterobacter cloacae
atgatcaccgagaaagacaacgtttttaattgtgactgcggattctcctttgagagagggcgcagcggtacgcatagctgtgaaacaggtttgcgtaagaaacttgccgagtctgaagccaagctcgctgcgctggctgcggaactgcgtgcagtcgaagcaattcacaacgaggcagtgttcatcacagacgatcattatgagcggtgcccgccggaagtgcagaagataattaggtcactggctgtgatgcagattcctgcgtaccaggatttcctgactgaagtgcgggcgcagggggttgagatgttcgccaaagagatgcatgcagatatcagcggtgatgatgcccgcgagttcgccgcccaaattcgcaaaggagtgcagtcatga

SEQ ID NO: 169171 - DNA, 285 bp, Enterobacter cloacae
atgagcatcgtagacgattcgcatctgacagatgaggtggtaaacgccgccttcgagggaaccaacttcgggcgcactgacttccgcaccatcttggctgaaacggttatgaagcgcgctgctgggtgtcactcaggatggacagcaacgacaatttgcacgcgccttggattgctcggcaagcaggagcgaccaactaagctcggcctgacgttcgctttccatcactactacaagccatgcgtgcgtgacgcactgatgactgcccaggaggccgcccaatga

SEQ ID NO: 169172 - DNA, 837 bp, Enterobacter cloacae
atgagcactggcatcaaacacccagcaattcgctaccacggcggcaagttccgtctggcatcgtggattaccagtcatttcccggagcatcgctgctatgttgaaccgttcggcggcgctgcatccgtcctgctgcgtaaggaacccagcgaggccgaggtctataacgatcttgatggtgatgtagtgaacctgttcagtgtcctgcgcgatcctactgccagtcgtgcgcttatcgaagcatgcgcattaacgccttattcacgaacagagttccagtgcgcttatgagccaactgatgatcgtgtagagcaggcccgccgcctgatcgttcgcgccactatgggttttggtagcgctggcgcgacgaaaggttgcactggctttcgtctcgataccaaacgaaacagtagcaccgcacaacgtgtatgggctcgccagccggataatctcgccgcggtcgccagtcggttctctggcgtcctcgttgagaaccgaccggctattcagtgtatgcaggaccatgacacgccgacaacgctccactttgttgatccgccgtatgtccatgacacccggacaggttcaacaaaaacaagcgcataccgcttcgaaatgacgaacgacgagcatgtagaactactcgacgcgctgaagtgtttacaggggatggtcatcgtttgcggctatgacagcaaactttataacgatgcgctggcgggctggttgcgcgtcacccgcaccacggcggcaaatggtcattcaggctcagtacaacgtaccgaatgcctctggattaacccagcagcacagcagaaacaggagcgtgcagcatga

SEQ ID NO: 169173 - DNA, 216 bp, Enterobacter cloacae
atgtacatcagactgttaatcatatgcctggcgacgatgttgatcgcgagctgcgggacaactggacccgtaagggttgaggtggtggacactgcttgcgactgggttaaacccatttacggtacgcatcacgactgggatgtactggataagcagacgaagcgtgacatcctggcgcataacaaagcatggaaagcaaattgcgcgaaaaattga

SEQ ID NO: 169174 - DNA, 630 bp, Enterobacter cloacae
atgaaccaaacacaatttcagaaggcggctggtatcagcgccgggttagctgcgcgctggtttccgcatatcgacgccgctatgagggaatacggcatcaccgcaccgcttgatcagaccatgtttattgcccagatggggcatgaaagcaccagatttacccggctggtggagaacctgaattacgcggcagaaaacctgctacctacgttcggcagccaccgcatcacgcaacagcaggccgccgcacttggcagaactgcaacgcaaccggcaaaccagaaagcgatcgctaatctggtatacggtggtgagtggggaaaagaacacctgggcaatcaggttgccggtgatggatggaaatatcgcggtcgcgggctgaaacaggttactggtctgagtaactatcgcagttgtggccaggcgttgaaactggaccttgtaacccacccggaactgcttgaagaggatgaatacgccgcgcgctcagccgcatggttctatgcctcccgcggttgccttcttcattccggcgacgttgagcgcgtgacactgttaatcaatggcggccgcaacgggctggaaaaacgccgtgcgttgtttaacctggcgaaatcagttctggtatga

SEQ ID NO: 169175 - DNA, 276 bp, Enterobacter cloacae
gtgggtatcgaaacgataatcgggctggccgcactggtaatttccgccattgcaggcgcttttggcctgggccatattcgcggcaccagcaaagcggaagccaaagccgatcagcaacgcaaagaagaggatgcagcggcagtggttgctgcggcggaacgtaaagcggaagtcacaaaagaggcctgtgatgtgcaagaagctattaagcgcatgcatgatgacgatgttgatcgcgagttgcgcgaaaacttcacccgccccggtggtgattga

SEQ ID NO: 169176 - DNA, 630 bp, Enterobacter cloacae
atggacaaagcacaatttcagaaggcggctggtatcagcgccgggttagctgcacgctggtttccgcatatcgacgccgctatgaaggaatacggcataaccgcaccgcttgatcaggcgatgtttattgcacagatggggtatgaaagcaccagatttacccggctggtggagagcctgaattacgcggttgaaaacctggtaccgacgtttggtagccaccgcatcacacaacagcaggccgccgcacttggcagaacggcaacgcaaccggcaaaccagaaagcgatcgccaatctggtatacggtggtgagtggggaaaagaacaccttggcaatcaggttgccggtgatggctggaaatatcgtggtcgcgggctgaaacaggttaccggcctgagtaactatcgcagttgtggctacgctttgaaactggaccttgttacccacccggagctgcttgaacaggatgaatacgccgcgcgctcagccgcatggttctatgcctcccgtggttgcctgcttcattccggcgacgttgagcgcgtgacactgttaatcaatggcggccgcaacgggctggataagcgccgcgagctgtttaatctatcgaaatcagtgctggtgtga

SEQ ID NO: 169177 - DNA, 657 bp, Enterobacter cloacae
atggaatcagtaatcgacgcattgaaagcaatgggcaaagcaacctatctcgatgtagcggcacgcctggatatcgaacccgtagaggctctgaaaatgctgcgcgagcagaaggaggaagggttgtgcgatttctatgatggatcatggtcggtcggtaccgcgaaggagcggaagccgaagcgcatcagaccaaagccggtatcacctctggttgagagggtgttgtcagcaatgcaggggcagggggccatgagctccaatcaggtagctgagaagctgggtaaaagcccgcgagccctgaatgcatcgctgggtgcaatgtacaaagacggtctggttatgcgccatgtggatgggaaaaacatcacctggagcctggcgggtgagtcgaaaataaaaccagagcagccggatgccgctgcactcgacgtcaagttagcatcagcgccggacaacaaatccctcgatgaaattattagggatatcccggcgttcgttagccgtcctgatgacctgattattccgtcgtcccgttatatctcgaacgagatccgccgcacaaaagcgaagctgtcgaaccttcaacgtcttcaggctgccgttcgcgagctgcgtcgccacaaacatcttctggaaggtatgagccatgagtaa

SEQ ID NO: 169178 - DNA, 123 bp, Enterobacter cloacae
atgacgattttactctggattgttggtggtctggctgcatggtggctctttggcttttgctggctcagactgtttgtcggtgatgaaacagacaaagattatgaagaatgcccctatgattaa

SEQ ID NO: 169179 - DNA, 174 bp, Enterobacter cloacae
atgagtatttgcatagtgattgccatcagcatcacgcatgtcgaattcaaggacgacattgcccatgatatcaattttgaaaaagcgacggccgtaccacgccatatcttcgtcgctgccggtatagaggtagccattgtggatccgcagcggctggagatgataaaccgataa

SEQ ID NO: 169180 - DNA, 306 bp, Enterobacter cloacae
atgggtttcaggcccgtaggcgtccgcatccagcacatcgttatccgcagatttggcatgaaagcgataagcgttacgcgcgccggccgtattcagctgcgcccacgaaagctgtatacgttcccggaaagcgtcgtcgtcttcataaacagggtcgacagggggaaccgcatccggatcgccgggattaatcacaagacgggaaacgttaaaggccgcgccaagctggtcgagatcggcccctctggcactggcaaggaaaactgcgcgtactgcgtcgttaacccgctggaacgccagggttag

SEQ ID NO: 169181 - DNA, 198 bp, Enterobacter cloacae
atgaacatctttggcatgttctggatgagaaggaagcaaatctttataggcaggacttttgatggctttaaggtattcttcctcaaagatacgggcatattcacccggctcacgttgtccttcttcagtgaactgacggtagaaatcaaccttatcgatgaaaaacaggacgtgatatttatcagggttaccggataa

SEQ ID NO: 169182 - DNA, 1167 bp, Enterobacter cloacae
atgatttatatctgtataagttttttgcttattctgacattacttgagttttgtttaaatggcaaaaggttgtctccgacgatagtaatgcattcactatgggggggagtgcttgttttatgtgctttttacgagtcgtctataacgtatatttcatttgtagcgcttttttggattttagtaggcaatttaatgttttttttaggagggcttttttcaaagcttccttttaattgtttgactgctaattatgaagtaaaaaatgttaatctgctattagttgcgcctttttatataataatgatactcatcatttttcatatgtataatgaaggtaaaagtatttccgaaaattggtatatgggtattcggctgataataaattacggtgagccagatgaatatttcaaggtttttggttacttgtattactttatttatcctgtgttatatataagtgcagtggtgaaatttaagaaccctaacaaagaaaatgctcgggtattctattttcatctttttctttcactcatatatgcgtttttttccactgccaaaataaaacttttgcttatggttcttcctgtgttttttattcgttcatactataaaccatcaagcacaaaactaattttagcaatagttggtttgatattggcaggaatgtactgctcactttacttgctaaataaaattcgtggcaatgatagtttcactgatatgctacttagtaatattggtagttacacatttgcaaacttatttgcttttgatagtttggatttcaaaagttttccatctatggattgcaatgatactaatggttgccagttgttaccgttttatgaagattcttatttcagaacaaatgtatatacagtcatgtataaatttattgatgttggattgctaggttatgcatttttcatgttatttatcggaaccttgcataacttttttcatcagttggctagaaaaaccaaaagtatatattttgttatttttagttcaattctttattttccgttgtttttccagatcatggatgatcaatacatttcttcgaaatatttgctctggttgtttttcttcacagcaatttggattttatgcactcgcataaaaattgtcatgtttgttacttcgcgaaagcatgttgatctctaa

SEQ ID NO: 169183 - DNA, 675 bp, Enterobacter cloacae
atgagtacaaaaacacgtgacggaataaaagcctataacccactttccctgaaactctatgactggtgggtacttcgcgtttccaatcgctatgcctggaaatgcgctaccgagcgacatctgattcctcatttcagaaataacatgaaaaataaccacctcgatgtgggagtcggcaccggatattatctgacgtttacgccagatttctgcactatctcgcttatggatttgaatatttcaagtctggaggcggcgaatgcacgtgtgggcagaggaagagtaaaggagtccatattgcatgacgtattcaatccttatccaccgcatttgcgagagcaatttgactccgtgtcgatgttttatctgctccattgcctgcccggcgaaatgcacgataaagctgaggtgattgcccatgccagtacagcattaacaaaagaagggcgtttatttggcgcgactattctgggtgacgatgcgggtcacaatatgttcgggcgaaaactgatgaacatttataataaaaaaggcatcttttctaaccgaaccgacagcgcagaggcgttagcctctctcctctcccgttattttcatgatgtggcgatcaccgttgaagggaaagttgccctgtttgtagccgaacgtaaaaaagagattatgctggctgaataa

SEQ ID NO: 169184 - DNA, 1062 bp, Enterobacter cloacae
atgaacattgatattgccgccctgctactgggcggcggagtgcagggcaaaccgaagaccgggttgctcgcagacgaaggcttcagcctggcgctggatgacaagctggcggaactggcgcagcttttcccggagcttgacccccaggcgctggtagcactgccgcaagccgcactggcggggttatccgcggatttactgccgcaacagcttgccgacgacgcaccggtaacggatgccgacggtatgctgctcgccgcgccgccggggctggcagaggccctgaacggggtttcactcaccgacggtgagggtgaagagagcccgcagtggcagctgcaacagctggtgacccgcagcgtcaccggagcagagccggttaaacctgcagagggcatagtgagtggccaaaccccggcgcgagaaggcaaaacggtgtctcccctgatggccgccgccgggaacacgccagcggcaaatgccgcaccgctgacggcgcagcccgcagcggtgagcagtgaggcgataatcacggcagacgtgcctgcgagctcatcggtgagcgccgtggcgctgccggccgccgtacgcaccagtgtggcgtatgcaccgcagcaggttgtcaccgtcaaccatccgccggaaacgccggagtggaagcagtcagtcagccagcatatcgctatctttagccgtaacgggctgcacagcgcggagatccgcctgcacccggaagagctggggtcgctgcagatctccctgcgtatgcagcaggatcaggcgcagatccatatcgtcagcgaacatgcgcatattcgtcacgtcatggagcaggccatgccgcagctgcgtgccgcgatggcggaatcgggtattcagctcggccaggcaaacgtgagcgcggaagggcagccgtttgccgccggtgagcagggccagaacgcatcgggtgacgagcacggcgcgcaggaaggggaggagccgttgatggaagaggagatcgtgccgaccttattaaccaccacccccggaaatatatacggaataaatacctttgcctga

SEQ ID NO: 169185 - DNA, 1509 bp, Enterobacter cloacae
atggcacaggtcattaataccaacgcgctgagcctgatggctcagaataacctgaacaaatcccagactcagctgggtacggcaattcagcgtctctcttctggtatgcgtattaacagcgccaaagacgatgcggcaggtctggcaatttctaaccgcttcacctcttctatccgcggtatgacccaggcggcacgtaacgccaacgacggtatctccctggcacagaccaccgaaggcgcgctggaagaagtgaccgaaaacatgcagcgtatccgcgagctgaccgtacaggcgaaaaacggcaccaactccgccagcgacctggactctatcaagaaagagatcaccacccgtctggaagagattggtcgcgtagcggaaaccaccaacttcaacggtgtgaaagtgtttgacggctcgaaagagaaaattaccattcagatcggcgataaagacgaagacaccatcgatatcaagctgagcaagctggatatggaaaccctgggtctggataaatttatggatgatttcgcggatatcgggattactctgaatggtgcaggcactgcaggtagccagtataaagaagcggctactccggtagccgtaaacgctgacactggaatcactcctccaggcggcggagatgaatggcaggttcacgcggacgatattaccaaactgaacgctacaatcaatggtatcaccggtgagactactgcgaatgctgaaattctcactcttgatggcgaagcattcgtacatgataaagacacaggacaagtatacaaactcgatctcactgctgttacctgggcagctggcgcaacagaccgtcagaaattggctaccgcgccagaagcagcgctgactgcgctggatgctgcagattctgatatgctggtaaacggcccatctacattgtcaaatgcaaagcagatgacagccgcagataccttcaaggataaagccggcacagatattaaccttgacgaaaacaagctggatgatctttcaaaagccctgtttaataatgaggacgcagccacctccgggatgaagattttctccgttgatggcggtgcagcaaatacttactatgcaatcaacaaagccggcgacgttaaaacattcactctggaaaacgatggttccgttactgcagcgtcaattaaagaagctcgtccggcagacgctgaattcattcagaaagaggcaggccaggctgtagccgatggcctgctggccaagctggatgaagccctgaccaccgtcgcggacttccgcgccgacctgggtgccgttcagaaccgcttcagctccatcattgcgaacctgaacaccaatatcatcaacaccaccgaagcgcgctcccgtattcaggacgctgacttctccgtagaagtgtccgccatgagccgcgcgaacatcctccagcaggcaggtgtttccgtactggcccaggccaaccaggttccgcagaacgtgctgtccctgctgcgttaa

SEQ ID NO: 169186 - DNA, 708 bp, Enterobacter cloacae
atggcggtctcttccataaataacaatagtggttcgggcagcaacggcacgggcagcagcgcggccgatctgtcgaaccagtttatgaccctgctggtagcgcagatgaaaaatcaggaccccaccaacccgatggacaacaaccagctcacctcccagctggcgcagttcaacatggcggccggcgttgaaaagctcaacacctccgtcgcgggcgtgcaggcgatgatggtccagcttggcagtatgagtgcctcctcatggatagggcgcagcgtgctgatcgaaggggaggcgaaagcctccttcggcgaatcagggattggcatcatgcaggaaggcgtggaaatcccgggcaattcagatgatttccacttcgcactggcgggggacgccgaaacggtgaccgtcacgctggaggacagcgaagggaatgcctacaccgccgagctaaaaaacgtcaagcaggggatgaacacctataacctcgacgatctggaaaacttcaagcctgagccggggccgccgcgcgatcgcgaatataccctctcctttacggccagtaacacagaaggcgataagccggaagtctacggcctgattcaggagcaggtgaagggggtcaccatgagtccgaacggaccgattctgcacctgctggatcacgatccgatttcgatgggcgatgtgtacgtcattcaaaaataa

SEQ ID NO: 169187 - DNA, 1188 bp, Enterobacter cloacae
atgggtttttcacaaggtcttagcggcctgagtgccgcagcaaaagcgctggacgtggtgggcaacaacattgccaactcccagaccgtggggttcaaagcaggctccgtgtcatttgccgatatcttcgccggtgcgacggggatgggggtgcaggttgcgggcgtcagccagaattttggccagggcggacccgcgacgggcagttcggcactggatatgatgatcaatggcaacggctttttccgcatggtcgatgaggcgggcagcgtgttctacgggcgcaacggccagtttaaggagaatgaaagcgggtttatcgttaacgataccaacggcatgtttttaaccggctaccaggcgacaaacggcgtgattaacccgggagcccaggtgggaccgattcaaattcctaaagacgatatgcctgcggcggcatctgagaacggaacgctgaagggtaacctgaagtcagatgaaaagatcatcaccgacgccttcgacaaggatgacgataaaacctacaactacaccagcgaaattcaggcgaccgatagcctggggaataagcacgcggttaaagtctattttgtccatacggcagaaggaaaatggaaagcgtatgccgaggactccacctctcctgatggcgtagcagagctcgaaatgtcgtttgacaccagcggcaatatcgtgggtgcggcggaaatgaccgtcaaaggcaaagcctataacggctcggcagcactggagcttaagctggatctgacgggactcacccaaaatgccggggatatgcaggtcctggtgggtgagatcgacggtcaggcgccgggtaaattcaatgcttatgaagtgagcgacaccggcgaagtgatcgctatctacagcaatggcaaacgtcagaccgtggcacaggtggtgctggccgattttgccaacgtgggcggtctggcccagcagggcaataacctgtgggcggaaactgcgcagtccggccagccgtttctcggcacttctggcaccggcagcttcggggagatcaccggcggcatgctggagtcctcaaacgtcaatctgggcgacgagatggtcaacatgatcgtctatcagcgcaactaccagtccaactcacaaaccatcaaaacccagtctgaagttctgcagacgctggttaacctgcgttaa

SEQ ID NO: 169188 - DNA, 1638 bp, Enterobacter cloacae
atgaataacttatttaacctggcgagaggcggcctgagcgttgcacaggcggcactgcgcgtgacgggcgataacctgaccaatggcctgtccggcacctacagccgccgcagcctgatcatcggcgaactgggcggcatgactaccgggcagggctttttcggttacggggcacgcgccggtggtgtcgagcgtgcgtacgacgcgtttgccaacaatcagttgcgcggatcactttctcacttcgccgcactcgcggggcgaaatgaacagctggcggacatcgataatatgctggccgacgagtccgataacgtttcggtctcaatgaacgatatgtttacggccatggcaaatctgagcagtgatccgtctgatcctccggggcgagtcgcggtctacacctccctgggtacgctggcgaatcgttttaacgccagcgccaggcgcctgaccgcgctggaaaagagcactaacacccagatcgaacagagcaccaaagatattaacagctacacccagcagctggcggagctgaacaaacagctggaacgtgcccaggggaatggcgctccgcctgcagacttgctcgaccagcgcgatgcgctgctggaaaagatgagcgaacacattgggatcacggtgaccgaagacaaaacctcgggtcgggttgacgtgctcctgtctgacggtcgtccgctggtttccggggacagagcgtataagctgcaaacctcgccctcggacagcgatcccaataaaaccatcgtctcctacgtggatgcgaacggtaaagcctcaccgctggatgaaagcagcatcaccaaaggtcgcctgggcgggttgtttaaattccgtaacgaagacctgaccgttgcccgtcaggagctggatcagatcgcctttaaaatggcgaaccgcatgaacgaacagcatgcgcagggttatacgccagacggaaaaccgggtggggatctcttctccctggcagatatcaaagcctatgccaacgcgaaaaacaccgggaccggcaagcttgaggggataaccgtcaccgattacaaaaaggtgacatcggaaaattataccctcatcagtgatggtgcgggtggatggaccgtcaaaggcgctgatggacgtgatgtctcggctactgtcgttggggggacgcttagctttaacggaattgagatcgatgtatcagggggagggtttgccaatggcgacacattcacccttaacccgatggcaggtgctgcggaagggataacccgcaacatcgccagcgcgcaggaacttgccgcggcgggggataaagatggcgacccgggtgatggcaataacctcgatgcgctgcgcaaaattcaggatgaaaagctgattggtgaaaacacgttaactgaagcctatgccagcctggtgggaaccattggtgaccatgcgcgcggcgtgaaatctgagcttgccagcgccgaaacggatttccagaccaagtacgacaccaagcaggccctctctggcgtcaatatggacgaggagtacatcaacctggatatgtttaagcagtattacaacgccaacgcgcaactgctgaaaaccgctaccgatatgtttgatgccctgctgtctatccgataa

SEQ ID NO: 169189 - DNA, 912 bp, Enterobacter cloacae
atgcgattaagtacgctgtatatgtataaaaatagcgcggaggccatgacgaagcgcatgagccaaagcaatgatgtttatttgcgcatgtcggcaggcaaaatgctgctgaaagcgtcggacgatccggctgccgcaaccgacgcggtgaagcagcaggacgcgctggcaaagctggagatgtacagcagtgtgcgctccctggcacgcggtgcgctggagcatcaggacaatattcttaatggggtggggaatttattaaccacgacgctgaaggaaaaaattattgcggcgaaaagcgatacctactcagcggaggatcgtaaggcgttgggagaggagatcaaaggcatccgtgccaatttgctcgacttagcgaataaccgcgacgccagtggaaactatattttctctggttttaagaccgatacccccgcgtttgatgacgtgggtaattaccgtggtggagacgaagcgcgcaggcaaaccgtggctgacggaactgaaatgcaggtcagccatctgggtaaggaggtcttcggcgacattttcatggtgctgaatgatgccgtggccgcgctgaccgctgaccctgacggtgctgattacgacaagaacctcgaagccgctctcagcgctgcaagcctggcagtggatgagggtattaaccgtctgggtaaagcccaggccgaaatcgggaccaacctgcagcagcttgatgctctggatctctccggtgcggtgctgatcaacgacaccattgtgaaagtgcagaacgccatcggttctgataccagcaagctggtaacactggtgtcggaatcgcagatgtcagagctggcctttaatgcgtcgatgttcgtctacaaaaaaatgcagtcgatgaacctctttactatgtcctccagttaa

SEQ ID NO: 169190 - DNA, 669 bp, Enterobacter cloacae
atgcttaattttatcccaacaatccccgcaaatgcgtatgatttttaccatactaaaaacattgaagatttaaacattcacgaactcgcatatatacatctttcaactattactagcaaaacaaagcttttaaaatgctttttgtcttcaagtttatatgatctaagagaaacacttactgcatcgtttaacaacactagaacaaatcaatatgttcctttaatgacttcttttgctattcttgatcaattgggcgaattatatactccatttggaaaatcatcaaataaaaagaacggcatcaagcgctgtttagaaatgaatacaagtctaacaaaggatgacatagaatcattagtgtcattacgaaatggattgctccataacggtagcttgatatgtgaagcgcagaattcaaaacagactaatgtcatttaccgattgagcaaaacagaacccaacttgataaaacacgcatcaattaaatgggatggagtttaccgcgatcatatgaaggattatatttccatcgttaatttattaaaattaaaagatttggttctccaaatacatgacaacacatttaaccaccttaaaaataacacggtaacaataaacattagcgaccccaaagagttttatttcaaatatctttttgcaaccaattaa

SEQ ID NO: 169191 - DNA, 279 bp, Enterobacter cloacae
atggcaatctatactgttcgtgtggttttgcgcggagctgaatgggacacttatgaaaagcttcatgaaagcatgcaggcatcaggatacacacgagaggtaaccagcgacgatggcgtggttttcaagctgcctgacgccgaatacgttacaaccaaaagcattgacgtctaccaagttcgagatgaagtcctgcgcatcgcaaagacttataactttgatccacaggttcttgttacagaagctgttcaatgggcgtgggctctacagaaggcttga

SEQ ID NO: 169192 - DNA, 414 bp, Enterobacter cloacae
atgagctttcaaccgattaatcaaccgtaccaacaacaaattactcgagagcaacttgctagaacgcgacaggcccttgacgaaatgaagttgcactatgataactatgaagctcatattcgacagatgcaacataacattaaaacccctgaggattcgattaagttctcaactcatatacttgagctgaacagatgtcgcgataatcttatccgtcatattaatgcttataacgaaatgattcagatctccaatttacagtttagttctcgtttgagtgagcaggctaaaactgagatttatcatttttataaatccggtcgttatactcaagagcaacttgccgctcaatatggcgttactcaaagtgccattagtaaaattgtcaacggttctgcacctgatcaaatctaa

SEQ ID NO: 169193 - DNA, 231 bp, Enterobacter cloacae
atgatcataaaattaacagcgataatggtgtctgataagcgtggagacctgacgcctattattgataaagatatttatttaaatgatgttagtatttccaggtttataaagaaagatgaggggacattgataaccttagtagatgggtttaagacccttgttaaagaacagccttatgagattttttgcacgctaaacggaatacaggataggtcaaaagtcgtttgttga

SEQ ID NO: 169194 - DNA, 210 bp, Enterobacter cloacae
atgtcaaaaagtcagcgcacgccaaaatttaagaccggtgatattgtttatttagtttcagctggcccggcgatggccgttcaggagccaatcattaactcctataatgaatttactggcgattactggtgccagtggtttgcggggagaaagcaagaaagagcaagatttccagaggactcactgactgcaacgaacccaaagccgtaa

SEQ ID NO: 169195 - DNA, 345 bp, Enterobacter cloacae
atgaaaaaaattatcgcgtcgctattactcgcagtttctctaccgtcttacgctgttttctataatggaaatcagctatcagagtggaacaatgccaggaaaaaagccttaaacaataacgctgaaacggtggattacctcgatgctggtgtgtacagggggtttgtcattgcaacctataacgcctttcaaaatgtaactatttgcccagagccaggcgtaacagtcggccaagtagaagacatcgttggcttatatcttgataaccaccctgaattgcggacaaagcccgcatctgaacttgcatataaagccttggtgagcgcattcccatgcaaaaattaa

SEQ ID NO: 169196 - DNA, 2142 bp, Enterobacter cloacae
atggctactacacctactcagttaccagttccaagcgaatcaccaattgacctgaagtataacgccgggaaagttgacgagtttgtcacctcactggtcaacacttacgccgaccgtttcggtaaagagcattacaccattgaagggttgcgctggctggcacaacagtctatctcgcagttcgggtacatcacactggatagctttgaagatggcaataccattacgctgccaaatcaggttttacgccttgaagctaacggagaatattatcgctgggatggcgcgctaccaaaggtagttccaactgggtcgactcctgagtctacaggaggaattggttcaggagcctggcttagcgttggagatgctgtgctacgtagtgaactggcttcggatgttggcgacccgctggttagctctcataaagttaaagccgagcctcaaggcacattggctgaaatgcagtattacgtcacacctgagcagtttggtacatatgtagatgaaaacacagattttacagcatctgttcaggctgcaattaattatgcagccgctaacccaggggtgtatgtaagaggcaccaaaaacacctatggcgtaggagcagtgattgtaactgtgggatgcaaaagaattgaatctctgaagcttaaatgcatcactcctggaacagacacaattctcagatcctttgtagatacaggtcatgatggccttgtgatcagggggtgcgatataaacgcaaactccaatgcggcaaagggaatcaccttgtctggagttatcaactcaacaattgatggaaatagagtatatggattctcaggcggagcagaaagatatggtatccgcatcggcctgctaagcaacacatcatctaactacaacaataaaattacaaacaatatagtcaatatgccagttgatcctgatggcggaacagggtcaattgcaataacgggtataggtcttgttgcagttgtaaccagtcagtacggcggtcttgatgttaacggtggcatccctttatatcctagcgtcatcacgctaagagatactttagttacaggtaacgtgatcaccgatggtacacatggcattcagggtggtggtttattcagggtaaatatcaccagcaattacatttctggttctgcacaccgtaatatcaatcttagtggaaactgccaacgagtacaggtagtgaataacttcctcttagaggctggcagttcaggagttaacgtagctctgggtagtcgatggatagatattatagggaattatgtgcagagctccagcagcgcggcagctagcactgacgatgctgcaatccaatgctataaggggattaccaacgtaaacatcagtaacaacaacgttctgggtgactggaaatatagtctttaccttggtgctgctgtgtcttttgttactgtatcaggtaataactttaatgccggatcactctctaacatttgcatagagtctgattgggtaggaaacccaaaacctgcaggcgctttgtatagcagggcgtatgacccaaacaacccagttgcagtttcaggggcaacaaatgagattaatatatcaggcaacacccatggtggtactggttgcgtatacgctattgtaggcgctaatgctaaagctttggttggtcttagcattagcaatgaggtagttggcaacgcgtcatcgagaccacatatactgcatatttacgatccgtcatcacttgttgctgagatgacatttactaatattaaagccaggcaggcctctgcggcacaatacttcagcacaaataacaggaccccattctctgttttgcgagatgtgacaattcttgatgactcatccggagcagaagttgcagttacgactgcaacgccatctgtatgggttggtcctgatatactaatcaatgctgcagtatcagtgaccaacttcactggagggaaaaacggccaactaattagggtcagacttatatctggcgctggaatcacacataacacatctacaataaggttgaagggaggggcaaacattaccagcacgtcaggagattcaatcgttacgctggaaatgagatctggagtgtggttcgaaataagcaggaacttctaa

SEQ ID NO: 169197 - DNA, 930 bp, Enterobacter cloacae
atggtttggataggatttttcttcacttcgcttgctttcatttttacctgcgcattcaggagtggagttaatagattgctgacagtaacttatgtagtgttttgcgcttgcatatttacatctgtttatgtcaatgggattgactgggttaattattactatgtttttgatgaattcaaaacagagttttccatacagtatgatttgcttttcaacatttatctttatgctgtcgcaaatctgtctggaagtttcccgttagcagttttcattttttatcttgcttctttgtacattgcattcagggcattaaagaattcatcgcttgccataaacatacctgcagcactttttgctatcaccttacttggcggaatgtccttggtcctggaccagatacgacaattcgcagctgtagtgatatgtttttactctcttaattacgtcattgataagcggtttaagccattcattgcatctgttttgatagcatcacttttccattactccgccgtggtggctttagtattttggtatgcatacaattcatcaagaaagccacttatcattaaaggggcttcgcttactgcttgcatggttttccttggaggaatcgtgctggccaacccagccatgcttttctccataccattggttggcgcagaactggctagaaaggcctcattgtactctgaatcaatcagtggcgtaggatttggagttggtgttgtcgcagaccttattctgattacatattattgcattcgacgtaatgatgatgcatatgcaggaatatggaaagtactatttatatttgcatgcatattggcatttatttcataccagcattttcgagattctattactacatgttcgttccgttatcattccttttcgggcacgcactttcaacatgcagaaagccaataa

SEQ ID NO: 169198 - DNA, 1137 bp, Enterobacter cloacae
atggatttattattctcgctttgccttgttttgacctgtttagcactggcaattggaatatttagcttgccgttattcaggtttatagatgaagatacagatacaacaagggccaatagtttagatggcatgagattcattctcgcttcttttgtaatatttcaccatattgactgcgcttatacctacatagcaaaaggcaaatggatgccgacttcagattggttgttgtatatgggtaaatatggtgtggctttatttttcatgattacagcttttttgttttggggtaaagtaagaaaatccaaagaaattgattgggttgatttatataaaaaaaggttttacaggattgcacctttatctattttttgctcagctattgcgctggcaagtctgtttttattgacagaaagaaaggaattttctcatagtatactggctgcttcactctcatggtttgatgctgggctgtggaattcaaaacctgctgttactgcgtttacgcctccatttatggcattagctggcgttacctggacgctccgctgggaatggatcttttacttttcactccccctgtttttcatgttcaagaaatggtcatttgagttaactgtttctgtttttgctttttctgtgtatttccttccagactttactaaagatgcatatttatggtcatattttttcgctggaatgttatgcagcgttctaaaagataagattcacttaaacgctaaatctgccaacatcatattagtggttatgatattaatcactttgttagtccaaccagctttatacggccctcctgaaaagatatttctctgcgtaatatttttcgcagttgtatcaggagctaatctctatggtgttttgattaataaagcggcaattcgtcttggggcaataagttatagtttatatttaacgcaaggattaattcttttcccaatgattatctactttaaaaatggaagaaatttagacttaaatataaacacatttattatattcgcagtatcttatgtcttgatttgcattctatcatcattaacctttcattttattgaaaggccatttatgaacagaataaagactagtaatactgccgaccaggcatacaataaataa

SEQ ID NO: 169199 - DNA, 123 bp, Enterobacter cloacae
atgcgcggtcagcaagttgttctgctgaaagtgagggggggcgttaatatttatcagcaggttgtgttgccactgccttttgatattatcgcggaagccaaggagagaaagaaaaaatattga

SEQ ID NO: 169200 - DNA, 276 bp, Enterobacter cloacae
atgtatgatgagattgtgcagcagttacgcatcctgaaaaagagtgtgatcaaaaacaaagctgacaaatccgtattaaagagaatgacttttggtctttatgcggttagagaatttgaaaactcagatgagctctttttcgagaggctgacggatgcatggtatatcgtagatcagcgtctccgtggcgtaaaagtgaaattaccgcatgaagtggatcctgactatattcagaaacaatgcgtactggcggaaaaatatcctgatgaattttga

SEQ ID NO: 169201 - DNA, 213 bp, Enterobacter cloacae
atgacccgcattaatatttacacgcttccgcaagaggcgacacccattaaaaagtccaatgatggacagtttttttacgaaatggaatatattcaaaatatgaatacttctcttaatttaaaaaaacagagcaatacccagcgctgtaacacacagtatcaatgcagcgccgtcttcacgatcgacaaagaacagaaaagcgctggcacgtga

SEQ ID NO: 169202 - DNA, 252 bp, Enterobacter cloacae
atgtatcgggcaagaaaccaaatcaccgacaagggcaacctgaataccattgataaacattgtcgacgacgcggtaataacctttccaccatgagtagtatcatcacccaggcaaacaattccagacatatcaccctctttttaaaaatcaatttgcgtcaatatgatgacttactacaaaaacatcatttcatttttatcgatatgtttttaattaaaacgcgccagggcgcacgcgtacaccacggctga

SEQ ID NO: 169203 - DNA, 303 bp, Enterobacter cloacae
atgattttactatcaaaaatgaatattagtgaatatgatgagcgccaaatatctctgatgaaggaaatgctaagcctttttgaatcagagaagatatcgcttaaaaagctaattgacaatttagagggcttattattttgcctgcaatcagtagatattgaatggaaaaatgagttccatgaaaactggtttgtattagagcaaatatatgctgttgcttcgttcaggaatgaatctatctcacaagatgatcctgatttacttgatgcactaaggcatctgaatgaattattaagcaaataa

SEQ ID NO: 169204 - DNA, 372 bp, Enterobacter cloacae
atggggatcgatgacaatacggcagcgaaaaccattgcgcatgccatcctgggcggtgcggttgcggcgcttcagggaaataacgcagcagcgggtgcggcaggcgcggtaacgggcgagcttgcggcgaaggcgataatggcgtcgctgtatccgggcaagaccgcaggtgagctggatgagtcgcagaagcagacgatcagcgtactggcgacgatagcatcggggatggctggcgggcttgcgggtgacagtacagcgtcggcggctgcgggagcacaggctggaaaatcgtcggcggagaataactcgctggcgctggtcgccagaggttgcgcggttgcagcgccgtgctgggcgaaggtcgcatag

SEQ ID NO: 169205 - DNA, 555 bp, Enterobacter cloacae
atgaaaataaaagatatttactatccttacgagccagtagaaaaaaagctgattgaggatgctaacttcataaaagaaaatactggtatggatgtgattttcttacgcacggaggatggtcggttatggcatgagatgcaatttaattattccactgataagctaaaattagtctgcgatgctgatggggttattattatgttttctactgatgccaccttgttgaatcctgtaaactgtgcagttgttgaaatcgatgttgctgatgttcccaaagggttagatacttctcaagaatgggtttatcgagagggtgtcatagagcgaagggaatatacaaaagaagaatatattcaaaaagcaagagatgaactaatatataagttgtcagaaattgcagccgtaattactcctttacaggatgccgttgatttagggatcagtactgaatatgaggaaaacaagctaaatgaacttaaaagataccgtgtgatgcttaatcgtgtcgaaatcagtgaagctcctataatcgactggcctgagtcgcctctataa

SEQ ID NO: 169206 - DNA, 1335 bp, Enterobacter cloacae
atgagtgaactgagatttatcatcgatacagcagaaaaaattattgcttctgcactgaaagaaaataacttaacaacacaagtaacctctttggttgagaacgccggcaagtttaaaataaatgttcccgacaccctcaattttatctggattggagatccggcaaaggctgatctcagctatcttcctgtctggcagagattcaatccgagggcggcattacagttgtggacagatgactcttccagcttatgcgtacattttcatttatgccttaagaaccgcgttcttaataacccacagttatcgcttcgtgagctgcaaaacgaagcattcaattttatttaccccagggtggtcagaggacaaacattcaacgctgcagccacagactatctccaagtgtcaggcgcaggggatgaaactgaaatagactctccgggatttcaacaatcatcatattaccttccggagggcgtaaaaaaaagagatatacagtccctgttgagtcatgacctttctgtatacagaaagtattattattatgaaattattctgcggggtaatcttgcagctgcaagcgatattataaggctaatgatacttagcagatatggtggtacttatatagatattgatacactaccttatgtgtccgacatttttcattacaccagtgaagtggaaaggcagttatccctagaaaatgatgagcgtgtttgcctcgcaaaatcggctgctttcatggcatggtttgaagaacaaagtgatatcacggtccattccagagcctttatagacaacatctcccaattaactgatgttaacagacagttaatcctgtcatccattcggagtgatattttgggtatggattttgataaaataaaaccaatgagtaatagcataaaggtacatcctgatttaatgttaatcggcgcgacagattttcttcctggtgtttactataataatcttctttgttcagctccggcctcaaaactggtcaggatggttcttcataatatcgcaaagcgctacacgtttcttgagaaaaatggtgcggtattttgcacggatacttacggcgagagtctacggcaaagcgaaatacttactggataccggagccatgatagttatttatcctctcccgtaacccgctggcttaccggtccgggtgtcatcatcgacacggttatacagcttgtctacagactaatgcccgccagcacagtccaccggccggaaatacttggagagatcctgcaccgtgatgaatttgggctgaccctgaaacttcagacacttgatacaccaatgggactgaaataa

SEQ ID NO: 169207 - DNA, 1029 bp, Enterobacter cloacae
atgcaaaacgggatttgtgttctgcttctgacaaagaatgaagccgtatcaatagagaaagcactcaattcactcttcggtattgccgatcaggttgttattgtggatacgggttcaacagatgacacccttgctatcgcgcgagctcatcctctgcaaccagaagtatacgaaacggtctggaatgatgacttttctgctgcccgtaatacggcactgtcatactgtcgttacgcctggtgtctttttctggatgcagacgaatacattgatgaagcttgccgtcccttggtcagacacctcattgaggaagcattaaccactgatccaaaaccgctgtatgcccctctgattgataacctgaacggtaatctattaagaaataaccccaggatttttgcggcaagaaatacgctgaaataccgtgggcgcgtccatgaatacctaagcgatttgtcgggtgcagatgttgtttcgcttcatgatattgtcattaaacataccggctatctacccgctatgcatgaccagcaacagaagcatcagcgaaacctgaatttgctgagactgcaaatgaaagaagaacctgacgtataccggtggaaatattttattttacgctacctcagtttttcttcagcagaagcactggctgtgcttgaggattttgggcaacttcgccttccttataatcaggatatcgaggtctacgcatttaatgctaaatcacggttaatacattattatctggacaaaggtatgtgggaaaaagcatatcaacacgcatccgagctttatgcttattacaaggattacgacagcactataatctatgtctgttcttcgctttacttatcttgcgagaaatttagaagctccatcgcagagtcagaaaaatatctgtcctgtatttcaacgctcgaaaaagatgtttaccttcatgaagtaaccaatcctgcactagtggaacaacttcttataaaaatagaacgaattaaacaagggtttgcttatgactggtcagaatga

SEQ ID NO: 169208 - DNA, 1296 bp, Enterobacter cloacae
atgactggtcagaatgagctctttcgtgaacaggctgtaaagaagagaaatgatatctggtcatcactctccttcctgccgaagggactcccgctatggtgcgtaatttccggtagcattttttttatcggtaccactgtcatttttcttgtatacggaagttataaccggcgggttgtggtaacaggggaaatggtatcagaaccccgtgcagtaagtatttttgcaagccagcagggatacatatcaggacagtttgttcatgccggcgataacatagaaaaagggcagacgctctaccagctggataccagcaaaaaaacacattccggtatagtcagtgaaactcagaaagaaaatattcttaaacaactttctgcacttgatgacattatcagcagaactgaagacagtaagaaagttactgtcgattccctgaacaaacaacttgtcagctaccgggcgctgcaaaagcagttcaggacgacagcggacggtgcggaacagggcctgcagttcatgggtaaaaccatggagaattatcgtacttatctggcgcgcggattaatcaataaggaacaactgactaaccagatgtctgtttattatcaacgacagaatgacatgctgaatatccgcaatcaggacagtcagtttgaagtacaaatcataaatctgctggctaacattaaaacgcaggaaactgatttcgacaaccgtataaatcagttgttgatccagaagaatgaaattcagcgtcaactcgccgatacggatgctaatggcagtattctggtcaccgcgccgcttaagggccgggtggagtcgatcagtgtcacgccgggtgaaatggtgagtgccggtgacagtctgcttcaaatcctgcccgggacggtgagtcgctatattcttgttctctgggttccgggtcatgcagccccatatgtttcaccgggtgatgcagtcaacatccgctatgatgcctttccggcagaaaaattcgggcagttttcaggtcatgtcctgtcaatcgcggctgttccggcatctgcgcaggaaatgtccacctacccctcggcaccgcaacgtatgcctggttcatcggaggcctggtataaattactggtgaagcctgacacggatggtttcatgtacaggggaaaacgatttgctttttccaatggtatgaaagccagttgtgttttatttctggaaaacagaaaactctatcagtggatgttttcccccctgtatgacataaaaaacagcgcggaagggcctctgaatgctcactaa

SEQ ID NO: 169209 - DNA, 273 bp, Enterobacter cloacae
atgaaagttatagataagacgcagtacagtaacgtatccggagccgggctgggggatacctgtggcccttctggcggcagtaattgtggtggctcatccggttctgctggtcataatgggggaagctcagataaacagcaccgtgattaccagacctcaaaccgcgggagtggcagccaggcgaatcatttcggacaaggcggtggttcgtttggttcatccggtggttgttccggaggagccagaggacggacctctgctgatggccgttaa

SEQ ID NO: 169210 - DNA, 264 bp, Enterobacter cloacae
atgggtaaaaagataatttgtttatttttaaacttgacccgcgtaacaggtgataagtgtgccagatttcctgacgtatttatcccctcgccccttaagattattcctatttcggcaataattattttattatttttaagtgattacaaaatcgcaacccttaataaagcgtttcgcgttttgaattgtatataccacctgactattctcattccagccgataacaaccgggtaatgaatatgagaagtgtgtgcttctcatga

SEQ ID NO: 169211 - DNA, 708 bp, Enterobacter cloacae
ttgtctgggtcgggtaagcgcagcgccacccgacataaagagcgcagggagtctcaaggttctcatccccccgcaggcgagcaacatgcgaaaaaaaagcccgcattttcatgcgagctcttctttaaatatggcggtgagggggggattgactcgcttcgctcgccgttactcggcccatccatgggcctcgcccctttggggccaacgcaggcgttgttcaaaaacgctcccggcgtttttgtgcgggcagcctgttcgctgcgctcgcagtctgtccaactggctgtcgccagttgtcgaaccccggtcggggattctcatccccccctttcggagactataaaagaaaaagcccgtactttcgtacgagctcttgcattgaatatggcggtgagggggggattgactcgcttcgctcgcccttcgggcagcctgttcgctgcgctcgcagtctgtccaactggctgtcgccagttgtcgaaccccggtcggggattctcatccccccctttcggagactataaaagaaaaagcccgtactttcgtacgagctcttgcattgaatatggcggtgagggggggattgactcgcttcgctcgcccttcgggcagcctgttcgctgcgctcgcagtctgtccaactggctgtcgccagttgtcgaaccccggtcggggattctcatccccccctttcggagactataa

SEQ ID NO: 169212 - DNA, 156 bp, Enterobacter cloacae
atggaggtcgaatgtataaccataaccgtgacaaaaatcggtttgagcataaagtgcgagagattgagcttcttacagagcaaatttccgcaaaacatttattttatggtacttctggtctttttttttagattcaacagctcgtgggtcatttga

SEQ ID NO: 169213 - DNA, 3111 bp, Enterobacter cloacae
atgagtgtattaccaattgggtcgttggttatttcagatagttttgacggcattggcaaagttactaatgttgatattgatgccaaccgcgcaacagttgcattttttgagtcccccttgcaacctttcgcccggcacactgatactcgtctggataagttgattccgacaattcctcacgatgaggcagtgatatattgtatcgaaccagaaagccagcgatgggtacgcgcgcgttttggcggatcccgtcccaatggcgattttctggtaatctttcgagaagacgaatctgcgactctcccgatcgataaagtctacgttctcaataaagcccctgatatcccgattaatccggcccatttccttgcctctcagacgaatgatgctccgtttttcttccctcgccgtcaatcctttatcaatacgtatatccagcagcgagcgtcatgtcggggtatggcttccctttcaagcagcgcagttgaacttgaacctcatcaattagctgttgtacggcgcgtactgcaagataaaacgccgaagtatattctggcagatgaagtagggctcggaaaaacgattgaagcaggcatgatcattcgtgaacacgcgctagaagaagccagtcatgtcagcatgctcattgccgtacccaaccaactcgttaagcagtggcgggaagaattgggtgaacgttttcagctgagacagttgctcgtagatgtgacgacaacactctcttcactaaggcaagatgggatcgcgcaagggatagttatctgcagttatactgaagccagccttctgcttagcagaggattcaaaccatctctggttaccgtcgatgagatccaccaaattgcaaactggccatggtcaatagatgaagacgaacgccatgatttcggcctgatttcacaggcgtgccacagagcacattatgtgttgctacttacaggaacaccgcttcatgggcatgagcgtaacttcctgtcgatgctgcattgtatcaatccagaggcttatcagattgacgagaaccatctaaaggcgttcaccgaattggtgaaaaaccgtgaaagtcttggtggcgttttctcggcccttgtaccgtcagtgtctaacatcagtctccgccgtaaccttgatgaaattcttgcgcaatttccggatgaccatcagttagcaacgctgtgccaggacttgtttccgttgattggcagattctctcagccaacgcctgagcgtgaagcgggtattaaagcgatacgcctgcaccttggtgaacattatcgaatccatcatcgtttgttgagaaaccgccgccaagtcgctcttagtcaggacgaaagtaagaacctgaatttaaatctgctattccctggacttgatggggtgattgagtatcactggcaaaccgaagggctgacgctggacgagttactggaagaatatcgggccatggcagtgctgccgcaaaaccataactggtcgctaaaagaagcgagctatatcgactgggttgacgatctattttccagtccattgtgcgtgatgcagcgtgcaaaagcggctcttgcatcttcaaaccctcttccttccgatgaagaggcattgctggaacacatagtcttaacggccaaaaacgaactacaggccatcgacaatatgttagctgcagcactcaatgactggctgaagcaattccaggagggtaaagcaattgtgttctgcgatcgccctgagttggcgcaacatctatcggtcaaactaagtatcctgttggactatccggttgaacgttatctaccgggtcaaactttgcaatttacccaaccgcaaagccccattcgtgtacttctgtgcgataaaagtggcgaggatgggctgaatctccatggagggcgccgtctggctgttcactacggcttgccgcgttcctgcagtcgtatcgagcagcgacttgggcgcctcaatcgctatagtgccaatctgataaggatcaaacccattcagagccttgtgctaaagaattatgctacccaaggtctacgtaatctgtgggcagatcttctggtgaacagcattggtgtatttaacaacactatcgccagccttcaatttgtacttgatgactatattggcgatgcctggagcaggttgttccgagaaggtccacaagtactagaaaaccttgcgacagaattgccaggcgaaaacggcgtgttgatcagagaaactaacaaaatcaacatgcaggaaaaactgctggcgatggatgaagaggtcgtacaagctgcacttttcgcgcagcagttaagcaatgacgacctaagcgctgtagaacagtgtaaagccctgacgccctggatcaccgaaggattacgcttccgctcatcgggaaatgctgaagagggcatacggtttcgtttcgaactagctgaacgcagttcaggtacgctagtcgactttaaaacattcctcacgacctgtatgctcagctttgacaaagagggaggcaaccctccttccacgcatctaatgagcgcaaagcgtatcccggccattgatgggaaaacggtgtatcctttgcgctatggtcagccctttgtcgatgcaatttggcaactcctgaaccaagatgcacgtggcagttcagtagcattactgcgcatgattaacgcgcaactcaacgcccctcgcttcttcttcgagatgacctggctcattactggttgcgaccccctcagcccttacgcctaccttcgtaaaagcgacgagcttgcaccgccacgcatagtgcaggaatgggttgctgctgacggttctcttgtgaccagtccacaactccttgagatactaaacagcgagtacagcaaaaatccttcagcaacgaaaagctatgttgatctcaacctgcgcgcctcaagatggcaggaaatagaagaactgatttccgctgatgcctggaaagaaatggtcgagcaagtttatgataaagccttgcaaaaacagcgtggtttggtcggagacagcgcttatatccagttaatgtcagtaaaagcgatcatcatctgtagcagcaatattttatccggagttgcctaa

SEQ ID NO: 169214 - DNA, 2481 bp, Enterobacter cloacae
atgattgaacaatggtcgcgtctacagttggcgctgacaacctgttttaatgaagatgtgacctttacggaagggattgaaaacccctttcttaaacggttaatgaatattattaccgattcctccgctggtcagaatgatatttttgctggttacgccgatgcccttcgagccgcacaagcgaatggcatcgaagaaccttggctcccctatccaccaacaataacggatatgccccatcctctttggggtctggtaaaatcagtcgcagggcagacattgtcactctctgtagatatgcacctggatagcacaaaagctacttaccaatgcaaaacccgtcgcaatttactacaaccggagatggatccggcgcttaaaaacctgctggtagatacaccacatacgcactatcgcggctttgggcagcaggcagcaatccgcacgttactcacctcagacatcaacagtacgttggtgataaatctacctactagttgcggcaagagcctgataactcaaatccaggctatcagcgctcctgcctgttccttaactttagtcattgtcccgacagtagcactggcgattgaacaagccgatttgatgcgggatatgatgcgcaaggccgaacaagatcatggtggaagctacgcgtgggttggcgggcaggatcagacgacgcgccagacactgaaagagcggctgaaaaacggcacccagcgagccctgttttgttcaccagaagcagctaaatcatcgctggttccggtgctatttgagctggcaaaaaataatctgattggtgccgtcattatcgacgaagcacatctaattgatcaatggggagccgaattccgccccgactttcagctcattgcgccattgatccgttcactgaaagcccagcctgattgccgtttccgcaccctgctgctctccgctacctggagccagaacactcgtgacgtcattgtggagcaattccgtgcagatgacagtgaactcattgaaatcacggcgaacttcctgcgtcccgaacctgaatacttcgtgcataccgagcctaatccgacctcacataagcagcgcgttgaacagttgttgatgtcactcccacgtccactcattctctattgcacgactcaagaagaagcagaaagctggtatcagcggcttcaacaacgacaatatcaccgtgtcggcctgttccatggtgatacggaaacgctgacgcgtagaaagctaatttcacaatgggcgaacgatcaactagatataatgattgccacttctgcgtttggcgttgggatgaataaaagcaacgtccgcacgatcattcatgccgctgttccggaaaatattgatcgctactatcaggagtgcggacgtgccgggcgtgacggcaaagcgtgtcaggcacatctggtctggcatccagcgcagatggagacggcggaaagtctctcagttgaaaaactcatcggagtcgaaaaaggtttcttacgttggaaagcgatgtttgaacaacgtcagccaagtgatatcgccaactattgtatctctctggataccaaacccgatcacatcgactatcagggggatcgcaaccaagcctggaaccgcagaaccctcttgctgatgcagcgtacaggactgattgaactggtgtttgctgcacctgaactaccgaaaagcttacgagaaggtggagaaaaaaatgatcaggcgatccgtggttggtttgccaattattatagccaagtacatatccgtcactgcaacgattctcacctttcggaagagtactggaataactttgtggaaaaagcccgtagggaagaattgaataagaggcgagcagcttttacgttgttaagagaatggctgaaggatctcgaaccatctttgtgtcaggttttaagaaaattttatatttatcaaaataatgaacctgagctaacctgtggaggctgcccaggttgccgggctcagggcaaggcctcattctctccaaccgttggcaccgatgtaaaaatcttgcactcgacaccaaagaaaaaagcacgcttcgttggagcagaaaaaaaagtgtattacagcgaagaaatggatattcgaactttgctgtcagaacttcgcgttacccttcgccatctgatcggttccggcaattacgaaaccatccgagcagataaagttaactttattcatctggaacgcgctttagattctgtgtctcgtttctggagcgtacaaaaacttgcagcgccaacgtcaaacggagcagaaattgtgatcgtggcaaataccgccacagttctaccgacactaccagcctcacgttatgaacgtattattatcgccccgcagcatctggcagatccactgcatccgtacagaaaatggtgggatagcgcagaaaactctctgcccctggacacttttatcaggcaatcacaatatgtcaatcatcaataa

SEQ ID NO: 169215 - DNA, 870 bp, Enterobacter cloacae; identical to SEQ ID NO: 107072

SEQ ID NO: 169216 - DNA, 3177 bp, Enterobacter cloacae
atgagcattatgaactactggccatcccttgagaacatcgagcaatgcatccgtaaagaagctgaagaattgcaggatgacgtgcttctagctgtgcatgaaaagatggatctcatccgccgcgacgtcaataacaatcaggagatcctccaagatgaggatctttttgaccaactgcttactaccgagcgtgctatcccactgattggcgactcagggatgggaaaatcacatctggtgcgctggttggactgccgtctcaaaagctacctggagacgaaaggtcagcttacacagtgggaaattgttcgtattccgaaaaacgccagcttgcgccaagtgctgttactgatcctgaaaaacctgcacggaggcctttttgatgacgcgcgcaaacgcgttgacgatgtggcccaagcgcattccgctaaagacctcgccgacctgctattaaccatgatgtcacaccaactacagagcatgtacgacgaatcgatggcacttggtatggaatacgaaaagcaggggaaagagattcctgccgatattgataaacgcattaataccattattgaagaagtcgaaaatggcattggcaacctgataaccgatcctaacttcaagctgaatctgctcaagccggagcattgcatctacaaacgcgccagtcgtatgagcgatgggctaaaggctagtgatgaggatcacgacaagtacgaactggtgcctagcgacctctttttccaagacaacattgatgacctgtcgtcgcttgcccgcgaatatattcgacattctcgtattgatgaacatgataatgaaaaggcgcgagttcaggccgtaaatgttctgaatgaagcgatgcatgcagcactgaaatctttatttgccaagctcttcacctttaacggcggcaattttcaggaactatttcaagagatccgccgtgaattacttgcgcaggatcgccgcctggtaatcctagtggaagatatggctgctatttcagcgatcgaagacgtattgattgatagcctaatcgaagaaggcgttcgtgacggggtgagaacactctgcccggtacattcggtcatagcggtcactaacgagtatccaggttataaacgtcgacaaggcacgctggtaacgagggctggctatgaatggagcattgaaagcacacataaaagcgacagttgtgaagaaagtattatttcactgtgcggtcgctacttgaacgcggcgcgtcatggtgcagcagcactgaagcagtcgcgagcgcaaggtttaaatgactggcctgcagtctggcaggacgaagaagtaccagaatggctggctgattttggtagtacagccaaacagggcgttccgctgttcccatttaaccgcaatgctatccgggcactggcaaataaatactgtcgagacggcagcaatcaacttgtttacaatcctcgcgtagtaattagccgtatcctgttggatattctgcgggattgtcgtgctgaagcagaacaaggttcattcccaccgcctaatcttgcaggcattaccacggatgctgaaattcagtacaaaataagccaattaactacccatcgagtttccagcgcggcgacgctgaccggactctggggctacaactgtcactcctgggatgaagtcagaaaacaactatcaccgggcgtcgccaaagctttcggtctgaatgaattagctgaacacctgaacggcaaaggcaaaatgcctgaaacttcaaccagaaatggcgacactgataagaaaatagctatagctcctaaaccaccggtatctcctccacagccaaaaccactagtggaaaatacgagtctgccttttatcaggcatctcaaagcttgggtaaacgacaaagtcgttttaccccaagatattgcccgaaatctgcgagccggacttaacagttgttatgagctctacgcccaagcggagtttttcggcatggtagaaaaaccctcgttgctcgagcgtatcccgttaattagcctgccgctttcagcttccgatccttccaacgccattgtaaagttctacgatcgtaaagacctgaacgacccgttacgaaggatcgaaatctacaatgtgtccctggcaatactgcgtattcaacattatatcgatcttgaacaagggggcgactaccctgaagcgctggaagactatgtccattatgaaaactttgtcagttggtgggtcccacaagccactgaaaaagcaattaatcatgcccgcgcacgaaaattgaaacccgcactgcgcaatcattaccaaaaagcactactactgggactgatgacaggaaaagagaatccagcggaactagttgatacgctttgcctgacgcagaaaggggttggcagaacccaagggaaaacccgaggacgtacagcagacactaacccttccgctctctgtttctacgggcttgaagctaatcaaaaacctcacaccagcattaaagtggctgaagcgcggcaagttgcccttcagggctgggacgaggcgcgagacgcgtggctttctcaggtcgcagttcctgagttgagttctgggctcagttcaatccgagccttggaagccgaagttgtcaccctcgcattgaaagagatcctaaaagagccgctgggtgcggagatacaacgcgcggcagagacagccagaaaagagatcgcatcaacgatcgagaatgcacaactctttgagaatgtgaaaaatcaggatgaattcattgcccttctcgatgactggaaaacgtttatcgaagtggttcgcacccagtactatccagcagaaaccgaacagattagaaattcaacttggctattgaatgaaatcgatgccctgaaagtggatgctgaagccagcctacataccctgcaaacacttaattccctcaccagacaacaggatgtcttcatgctatggcacgacatctcccatctggatggcgattatgtcaatcgcatcggcaacctgcttgcacagtggcagaatattcaatcgaaaatcagttttaatctgcaacagataaacagtaagggtgatgcgccaaaacttgaaaatgctcgcaagcaggttgaagagcgactgaaaaatctggcggctgatatcagcgcctctggagcgaatgaatga

SEQ ID NO: 169217 - DNA, 828 bp, Enterobacter cloacae; identical to SEQ ID NO: 107074

SEQ ID NO: 169218 - DNA, 4431 bp, Enterobacter cloacae
atgactgctgaggatttagcccgtttacacgcggcgcttgatgtactcgaagggcgagaagccgaactgctagtctggggagacacggaaggcgcgtttacagatgctgatattctgtctctgtttgcccaccattttcccgacgaaaatggcaaaatattgatgcaggatctgcaggatgccgcaatgttgtttagcatcccaaatactaaaggtacgcggctttatcgcacgcgaatggcggaatccgttcatctgtttcgtcaccaacgccagtggtttcgcggtcagcaactgagtcgtacccggacgttggtggcagattatcgttttatccgccgccctcgaagctatccggaaaggaagtatccggctgagaaggttctgagccaattgagcgatgtcgaatggatgaatgacatcaagcgtcaagccttgcgagcactgatcggtgatttctcaattgctggttttcaatcgcgggcaacagctcgtatcctgcgagcatgggatttccatagcaatcatacgcgcgtcaaagaagcaacggctacaatcgtatgtgccggcaccggcagcggtaaaaccctggcgttctatctgcctgcactaacttcactcatcaatgacttgcaacgcgatcgctcagcacgggtccgtacgctggccctgtatccccgtaaggaactactcaaagaccagtttatggaaacttggggaaaatgccgagaagtggacgctcagtcagttaaactctctggacgtaaaatccgcatcggatctttctttggcgataccccccacagcatccagtacattgataaagacaaagatattcctttcgacttactgcgctgtaacacgcctaaatgccaaggcggaatgcgctggaaagcggaagatatcagccggggcaaagagatcctgcgctgtacgcattgcgcacatagtgtgggtgaagacgaagtagtgctcactcgtgtatcactaatgaacaatccaccggatattttgttcaccacgaccgaaatgcttaaccaacacctcggcaataacaaggccaaccacttgttcggtgtgggcataaacgtaattgcaccgccgatggtgttacttgatgaggttcatacttattcaggcaatagcggtgctcaaaccgcatatttgctgcgccgctggatgcaactggcacgctgtcgcccgcactttgtcggcctctcggcaacgctgagtgatgcagaacgcttcttcgcagacctggtaggagccaacaaaaagcatgtcatgctaattgaacccactttccaggagatggaggataaaggggctgaatatctgttagcactacggggtgaccctgtttcgcaaacggccttgctttctaccaccatccagaccagcatgttggcacgccgactaatggatacccgcaaagccacatcgcacggcacctggggccgtaaaactttcgtatttaccgacgatctggatatcaataatcgcctctatcaccaactttgcgacgctgagggatggcgtacacgcgggaagcaacttgtgcccaacgaaacccctctggcggctcagcgtaacgaacgcaacggtgtatccaatgcgctgacccttgctggtcaaaactggcgaatagctattgatattggacacccgcttgataattccgatcgggctatcgtagcgcgtacctccagtcaggacaccggggtggaccccaaagccgaagttgtcgtggcgacagcttcgctggaagttggctttaacgatccctctgtcggggttgtgattcagcacaaagcaccgcgtaacgtcgcttcttatcttcagcgcaaaggtcgcgccggacgttcaagaactatgcgcccttggatgatagtagtgttgtcagaattcggccgcgaccgcgtggtgtaccagcgttatgaagagttggtgacgccggaaatcaagggccaatcactaccattaggtaatatccacatccagaaaatgcaggcggcgatggcaaccctggactggctgagtatgaagatccccggcagtaacatctggtcactgctaaacaagccgcccaaaaacagagagcaacacgggcatctggaacagatgctcaatctgatttctgtcgtgctggaacaaaacgtctggcaacaggggctggaacaatacttgttctacgcgctaaaaattaccgaatcgcaacttcagcacatcatgtggtcaccgcctcgttccattatgatggaactacttccgaccctaaagcgccagttgactaccaaatggtcactgatgggcattcccggcgcagacagaacaccaggccgctcaccgctgcctttgtttattccggcagccctcttcagcgagctgaatttgcctgaactaagcatccagcttgagcgcccttttacaaaatatgaatacctaccatttattcaggggctgaaggagtttgcaccgggccgcatctccaaacgctacgccatttattccgatcttgaagccgactggctggtgccacacaattttgttccgttactaaaccaagtttcagaagtcgatttcgagatcaacgaggcatttggtgatacctggctgcctgagtgtttgattacgcttgcggatgctccagcaatgaaagttattcgtcctctgcaggtacttactcgggcccttgatttcaaacaaaatctgaccgagaaaagcaattctcagctgaagtggcatactcactttgccacaaatgctcaggccgaaacgatggcgattcccgcaggtccatggagcacagtgttgcagtccgccacgttctatacccatcagcatatgactccacttgagctaacgcgttataccacagccgctagtgcttcgctgcgcagtaaaagcaaacaacaggcttgggttaatttcagatgggttgagaatggtcaaccggttgcggtgggtgctcgtcagtgggtggatgggctgaagcttagcttcaccctgccttccacgctacatcagcaggtcatgaacgacgccaagttagctagttcgctcaggacgctctatttccatcaccgcattagcagtgaggcgcgtttcgaacatgacagcttcactgcagactggatctacgagtgctatctggcggcactgactaaagagatcgtcagccacaataccgtcgccgatgcaattcatgccctgcgcacgccggacggtagagagtcgctggcaaccattgccgattcactattccaggctgaaaatatctttgaaaacgacgatgatggtaacggtattgcggaacgtcaagagttacagcagcagttgagaagcctgttcaatgagccgcagcttctcgcgatgcttgatacacatagtgctgtgtttactgaagatctcagccagagtgattcattttgtcagtggcttcagaccttgttgatcaataccttctccggagccgtaaaacagaccggccatctactgctaccagatgtggacgacagaggattgcttgttgacgccgtttttgatggcgagcacctcgatatctggctcaccgaatcagagcctgggggctgtggaattatcacccgcctcgaagaagcgttccacagcgatccagtcgccctgctaaatctgtttatacgcagtttcgccgccagcgattacgagcaaatagatgatgatcttttcgaactactctctcgacttccttcaagcactacattacagaatgcgctgaacgatttgcgcatggcggaaagtcatcacgatcgccgaacagcgaacggacaactgcgtgctcagctgaaaaaacaaggatttgctctttctcacagctttatgtccgtgctacatacccgtattcttcgccctggcagccacccctctcacgatcggcgcttgctagagtatctgcgggaatggcaggcactagaggccaaagcgggttatgaagtcagcctgaatatattcgcccatacccaagcaactcaggaactgcctgatgcgaacgtcaccaaaattttcgaccgtttttgccagattcagggcatgctatggcagcgtggcagtccccttcgtcagtcagtactcagctactacaatccctttgataatgggccgaaactgacagaaagattgctgctcagcaccctcttccagcagcaagcaacacaagttgatgtgaccaatagcgactggcttcagcagatccatatagcaatctctcgcgaaggatttgctgaactgttgatccctcgggaagcccgttatcagatagtacagatcgtgtccacactgcaactggagcctatcgattatttcggcctgcacctctatccacgaatgggagccgtagactatcggggtggtaacatagtgttgcgaatcgaactagctgaagccctgcagtaa

SEQ ID NO: 169219 - DNA, 531 bp, Enterobacter cloacae; identical to SEQ ID NO: 107076

SEQ ID NO: 169220 - DNA, 2190 bp, Enterobacter cloacae
atgactaatgttccctcctggcttcgagcctttttcggcgaaggcaatttgctcagcctcgaaaaattactgactgacggacctggtgcttatccagaagagcaaaaaaatgccctgctacctttggtggatagcgcacgagatggcgaatggcccattattctgccgtggtgtgaccgcaaaaactgggttttctttgcgatggcggaagatgagcgcactctgttagaactcagtaacgtcatcggagcccgactcggttctgctgatgtcgaacctgaccgcagggtttacctgagtcccgcttctggtcccacactcaccgcggaaaccatactgttggagcactgcccaagggggtttattcgtattgaattgttggccgccaaacgtgaggataaactggcgaaaatgcgggtttttactgcactgacggaggtaattacgttatttcgccaacgtccatcgcttgttcgtacccgcaaacgcccgtttggtcgtatccttagcgatttcatgttggcaacaaatcaaaatgagatagcggccagtaacagctatctacaggaactacgtgacaacggtctgctgtctaaacgcaatttgctgttgctcgaacttcaacaggctgggaaatggcagaaatgggacaccctgctaaaccatccagatctccctgaactgatcagaggacgcattcctacttcactggttagaatgctgctcaccgcttatcagaaccgctatttaggttatgatatgcagagctacgcgcagcaggccccctcagtattgcgcccggctttcctttctctacatccgctctttatgcaggttccgctgctgggatacgaagaggaagatcttaacatctggaaaacttgggcaatcggagtggcgctagccggtgaaccaaccctgctaagtgccctgccaaaagcgctgaaatccaactggctaaaagaattacagcagtgggccgatcttggaggaattaggtacgatatctctacacaatctccagtctcattctctttgcctcctacgtcgctagaatcactggcctcttatctacaaacatcgctgacggcaacaaccgacacgctgaattcatacgccgacacactccgcgacatagatatacaactgctagatcaagcaaagaaagttccactacttataacgctgattgaaagtatcgaacggcttactaccactcatatctccggctgggatagttggttctcacatctgtgcaatcccaatgctgatggaaatgcactgttgcagattgtcgctctggaaagcgaacattggtccacctcctccttccaggaatccacattcattcgcctactgtcacagaatattccgccacacgcatttcccaccctgcgtaatgctatgccggccttcattaactggctgaggaaaaaccaagtgcttttaatgagctcaacttggcttaaatggatggatgttctggcgatggaacaaagtgtcagtccggcagatattcaactggcgacgctagcaacggagcatttccttcaaggttctgtcagccggactgactatcaggaatttgttgcgacactgcaactcattattgaacgctgcggttcgcttaaaaatataacttcacttgccgagatgatcgaactgttcctggatgcaccagaacacgataaagaggttagaaacgctctgtggatgaatattcaagcttgtgctgttggtgtgtggccgcgtctagatcactcaacccgcacgatcatgcgtaatctggccatcgacgtattgggcaagggtgccgattctgcgtttccgccggaaccaccacgaagtgatgacagtgagcttgaaacacttccgaatcttgcaggaaaacgagtcgccatttataccttgactgaaggcgctgcgcgccgagcacgagggatgattgaggcgttgtttcagggaatcaaagtagatgtgaatcatgatcataccgcgacggacaagttggtcaatttggcaaaacaggcggattactttatttttgccgcctcaagcgcgaaacaccaagctctgtatgcggtaacaccatatcgacgcgatcttatttaccctgaaggtaaaggagcgggttcaattctgaatgcattcatcacccatgttcaacatgccatgaatattacaggataa

SEQ ID NO: 169221 - DNA, 633 bp, Enterobacter cloacae
atgagtgagcagcgaccgcctccgtcacgcccggcacagggaccggttggctggctactggctctgaccgggcggctcatcgggctggttattggcgcgctggtgctgcgggtaatgctggaactggcggggctgtatttctggtggccgcaggaggggagcaaacatgtttttcaggtgatgaagcgggagcgggtggaactggttattgctttacagtcgcacctgctagggaatgaaattctggtgcaactggaaaaaggggcaaattgcgtacttatggctaacaggctcctgcaaaaaccgttcaccgccgtggcttatacgctggtgaattttatgcagcgcctggtatggcttgccgccatgctccccctgctttgcctgtgtgcaataaccgggctaacagaaggtctggtgcggcgagatctaaggcggtttggctccgggctggaatcggtttttctccaccgttatgtcatcaggtccggcagttcagtcgccaccacgctgtgggtgttttatctggcacagccgctgtttgtacctgcgatgctggttttactgccttcggccttatggtttgggataacgatatggatggcggcgggcagcttcaaacgctggttatag

SEQ ID NO: 169222 - DNA, 1353 bp, Enterobacter cloacae
atgcataatgaaattaatcccttagattatttaaatgaaaatttaggatcctacgatcctttttcattgagaattatgataaataaaacatatagcgaaaatattgaagaatcttctggattggactcatttaacaaaagagattttgcaacacttttccatgaatttacccatcaacttcaaaacacatcatcgatcgttggctttcaacaatttaatgcaatagtttcaatttggcataatacaagaaatatatcatacgaccccaacgataaagaaagcgctattctacggcaggaatcgcagagaatattacaaggttatccttgtaataaaaaagacgaaccacaaaaacgaggattattagatataatttcaattgaaaatttagaagacattctaaaacagaaatatacaaagaaaaaattgaaaataacttattcatataacaaatcaagtttcgaattgtcatttggcattggtgagttttatgaaagttgtgctgaaattttagaacgctttttttgcagaaaaattaaattatatgacaatttctttgaatcaaattccattccttataaaatcggtgagagcatagctaaaaaattctatccggaatgcagtgactactgtttgattgttttaatgttaacagctttacaacatgcaagccctcatcaaatatttatttttttagtacatgcttatggtgttttaaaattggatgagaaaactgtaagagaacaatgtaaagaccatgtagaaacacttattaaaataaataaagaatggatcaacaaaactggcgatgtaattgaaaatggttttccttttgatgatccttacttgggtgacgtaataaaattttttaacctaaccatcaaaaacaatcttaaaaaaagaatagaacatccatttttagaactggatttcctaatgacaatagacgaatataattataaggaaaaaatagaatcaattattaaaaattcaggagggagtataatttatgccaaagatcaatcaggtaactctttatgtgatgtagagaagatagtaatcggtgactatacttcaatttaccacaatcagaaagcatggttaacatttattatatctatatttctcacgatgcgaaactcaaagacaataagcattaccgaaactgatcactttgaaagatataaatgcccggcgtttctatattgcaatcataaaaataaaactattaatgctgccttttgtgaggcaacaccttataaataccccgtcgcaatagaaggtgcagataattgtgctcatcagttagcattatacaaaacagacttaagaaataataataataacaaataa

SEQ ID NO: 169223 - DNA, 309 bp, Enterobacter cloacae
atgcgtcattgctcattatttctgttgctaactttacttacaggctcgcaggcctttgcctctccggaatacacccaactcgccctcgtgctgaagcaactcgacggcgtaaaaacctcgctggcgcgagcccaaaccagctccagcaccgatccgcaatcacgctacttcttcgactacttacaggcgcagcaggacatctcaaccattgagcagggcatccaccactaccttgccccggcaagagcgcagccgcgcgccgttcaaccactcagcaccagctaccaacgggagaaccccgatgactga

SEQ ID NO: 169224 - DNA, 780 bp, Enterobacter cloacae
atgtttattagaaaatcaaatgatattcctgctgagcttaaggatgaatttcaaaggacagaagagattgtacttgaatttgtaaaatggttgcagttttgtctaatggacacggcaagagatagtaatttccaaaataatcacttgttatcatttttatacgaagatattgttgaaaccttaatgggggtattaactcatgttgttgatggaatacatacaccttcgataagagaaagtcgctatctactggaattatctataaaggttgcatttattcaacaagagaattatcagagttcgattgaggataaattaataagttttgatagagagattaaatctccaagcattgctccgatgcggcgtataaattttaattattttagcgatactacccgcaccctttttattgaggaggttggcaggttgtatggagaagtttcaagctttgttcacgttacaccaacttcaatcgaatacaggcagagtagattggcaactggtaacggaataggtaaagagtcagtcgataacttgatgcagcttaatgatttacttcgccgaatttacgccacagctatagtttttttgtctcactcagttcctcagtacgttataggtgactggttagtagataacacaggtgaactatctaattggtattatctaaagtcaaaatatatttctgaaattgatcagtcctttgattataagtttgaaagaagggatttattagaaaaaataagtgttgagcgcgcaaatttgatcgagttttga

SEQ ID NO: 169225 - DNA, 540 bp, Enterobacter cloacae
atgcagtcaacaataaaagcgtcattaattatatcaataatgctcctgagtggatgtacgaaacgtgaggttgtagttaatcactttaatgatagaacttccggagatactgctgaggtcagaatcatcggctttacaacatattcgcatctttgggatggatatgattgtaaccaaccctataagatgccgccaaaaggctggtatccccatgtcagacaaactttcgaagaacagccagcatatattgataaaggttttaaaaaatcatcacttcccaaaaataagtatcctctcgacatggcagagtatcatgttcgttcaggcaaactactcactttttgggctagcaatcatttaagtgatcaacgattatgtcaaaaaacgatgacaatacgtcctgagaaggatcatttgtatgagttccgtaattctaacgaccagaatatgtgttattttgaaatttatgaaattaataaatcaaccggggctgcaaagaaaatgaaagtcacagattacagcgacttgtgtcataaatag

SEQ ID NO: 169226 - DNA, 1158 bp, Enterobacter cloacae
atgccttccttgcggtgtagaaaactatctggtaacaaggtggtattggtgtatcagtggccggtaaacttaggcgcagccccatttggaataataaaggatgacactttgagacttaatgatgtaattactgactgcattaatcttaaattaagtggaactgcaacagataatgttattcaatgttttggtggcaatatactgaggaaagaaaagccagttttggcaattgaagtttcgagcaaagaaatattgctttggatgatgcaaggagcaacggatgtacatgtttatatcagcgcaggtacttttcatgtaaatgcaatgtatgcaccaactgtccgctttccagcagccagaatttattttatgaaatctaaagaccttttctggtttggccatatcgccgtttatctcgaacgacacggaatcaaactcactccagtagatgatgctagcttctcaaagcttattgatgatacggggtatatacaacgttataagccgtggtacgaaaaaaggaaagctgactcgagattattcgatggtctgctgggagggcggcttaagaatactgctgtagatcaagctatatggctgtcctccaatggaaagtgcttggtttgtggtgaaaaagccgatcgcatggcgaccagtactgtttgggggaagtcagggatgatgattggtatgcagctgtgtttgacacacgaagaggaatctcagaagcaatcaattcttctcaactatctctcgaatcatttgggtggaatagttatgttctcaaatatgcgtccactgactactgaagagatgcttgagcagacctgcgaaatacttaaggtaaatttcaactgcactatcatgaaagttgtaggggaaactgtaaccgcccgaagaccgtcggggatcaccgtagtaatcagacaccaatctccgtcgaattatgcctatataataatgacctctgaaggaaaacagttgtccagggtcgattcagccgatcatcatcaagtaccttacggccctgatcatgtacatttcgatctgcgtaaatctacaaaaaatgtcgtcgagacaagctttacatacggacatatttgtcttgatatgaaactgcttttgaaactgatccaagaggctgaaaataaattataa

SEQ ID NO: 169227 - DNA, 852 bp, Enterobacter cloacae
atggatacgttcaagttaaaaccatggctacatcgctggaacctcattcctgatggcactccatttataactcatacatcacagttgtatccggtcaaaacagcagctcagggtattaaagccatgttaaaagttacggatgaccttgatgaacaagccggtaatgcactaatggcatggtgggaagggaatggtgcggcacaggtgattgcacatgaaaatgaagccattctactctcaagagccacaggttccgcgtctttatcagcaatgtcccgtggagataaggatgacgcagcttgtcgtattttgtgtatgactgcgaaccaacttcattcattcgcaaaaaaaccgtttccccagcttacgcctttacatgaatggtttaatcctctaaaaccagcggccttgaagtatggcggtatcctgacacgttgcgcagaaatctcagaagaattgctttcttctccacgagatgtagttgcattacatggggacttacatcacggaaatgtgcttgattttgaaacatctggctggctggccattgaccccaaagggctaataggtgaacggggattcgactttgctaatatttttactaatccggatcttggtaatccagtacctcctgttgcgactgtaccggagacatttcaacagcgcctaagtatcgtcaccgggatggctgacctggacagagaacgcctgctcaaatggataattgcatggtgtggtctttcaaccgcctggtccctctcaagtaacgaaacggtttcaacaacgattaaagttgccgagctggcgatgactgaattggaacagtgcgtgggatatcaacaatgggtatag

SEQ ID NO: 169228 - DNA, 912 bp, Enterobacter cloacae
atgggcaagcttgaagacatgacattgctggttgaagtggccgaagcgggcgggctttctgctgccggacgtcgcttgtcactctcacccgcctccatgaccgcccgcctgaaagccatcgaagaacgttatcagacccgcctgtttcatcgttccacacgcgccatcacgctgactaaagctggcgaggcgttctaccacgcggcactgcgcgtgctggaggagatgcgccacgccgagtcgttactgacgcaaaaagagggtgtgctcagcggtaacattcgcctttccgcgccctcagactttggcaggcagtaccttagccccgccattgttgagttttcccgccttcatcccgaggtcaatttcttcgtttacttaagagaacatattgaggatctggtggctaaccggctggatatgagtatccgcttcggcaatctgccggacagcagcctggtcatcaaacatatccgcccgaatcaccgggtgttggtggcgtcggagacttaccttgaccaacatggtaccccctcctcgctggaggcgctggctgaccatagatgcctggcgctggagtctttaggcgtggtgatgaatgaatggcggtttgaggttgagggtaaggaacgcgtgattcgcgtggagccagctatggtctgtgacgacggcgcgttacttcgccagtgggccctcaacggggcaggcatagcgggcaaatcatggtgggatgtccaggacgatgtcgggaatggaaggttaaaggtgctgtttgccgatagcttcaccggcttcagtcgttttgaccgcaaagatgtcggacttcagtttgtctatccccagcgaaaactgcagccgctacaggtaacagcatttagccagttttttatcgactggcttaaaatgcaataa

SEQ ID NO: 169229 - DNA, 1110 bp, Enterobacter cloacae
atgagtaatacctcactttttgcaggctataaaatcggtcatctgcatctgaagaacagaattgttatggcgccgatgacccgcgcccgttccctgcaaccgggaaatattccctccgcattaatggctgaatattaccgacagcgagccagcgcaggattaatcatcaccgaagcgacgcagatctctccccaggggcagggatattcatggacaccggggatccattcgcccgagcaggttgccggatggcaactcactacgggtgctgtacatcaggccggaggcgtgattttttcccagctctggcatgtaggacgcatgtcgcacgccagttttcatcaggatggtaagcctgttgcaccgtcagcgctggcgccggacgcgaaggtgtgggtggttgatgagacaggtcgtggtcagatggtggagtgtccgcagccccgcgcgctgtcgcgcaaagatattcagaccattattttgcagtatcgtcaggctgcgttgaatgccatccaggcagggtttgacggcgtggaagtccacggcgcgaatggttatctgatcgaccagttcctgagaagcacctcgaatattcgcacggatgaatatggtggcacgcttgccaaccgcattcgttttgcgcaggaggtgctggagaccatcgctgatgccattggcggtgagcgcacggggattcgtctgtcaccgtttatcacacagcgcgggatgaacgatccgcaggtcactgaggccatacttatgctggcggcctggtgcgaagagaaaggcattgccttcatccacctggcagaagccgactgggacgacgctccacaggttccggaacctttccgtcaaacgctgcgtgaagcattcagcggaacaattattgtggcggggaattacacccctgaaaaaacagagaaaatacttgcggcaggctatgccgatctcgttgcattcggccgtccgtttatcgccaaccctgatttgccgcaccgccttgcgcatcagttacccctggctgaggtgagcgatcctggcacgctgtttggtggtaccggggtgggatataccgattacccgcaatatcgcgcaacccgtcagtga

SEQ ID NO: 169230 - DNA, 690 bp, Enterobacter cloacae
atgagcaaacgcattgacgtggctggaaaaaatggcgcgacgttgtcagtcaaaggtagtggccttatctatacaaaagagctgggatggcttgatctcggacatgccagaggcacagacatacgacttttactcaatcagttccgttctggtgaagctgggacaaaggatttctaccgggtctcataccgccagaagatgagctatcacggcacgctctttaacaccggtcgctatgtagagtgggaagtaaaaaaaggcagagcccgtagagaaattgacagtattgcgctagcgatgatgatgcatagtgcgtcactgtttgagcattggcagacccattttagttgggtaacagacagcggcttcagtgctgaagatctggtgtctgatttactgggattctactcggttgtcagtcccacgaattaccttgatttattaaccatcgatccaaaagataaagcgctgcgtcgctgggacttttacggctctgtgggtcagaataaaaataaatctttcctgcctttgcttttccctgatcctgatgacctctgcattcgacacacacctttttatggcaaattaccacactggatgaagcagattgatccgtttactgatatgggcagtaaaatcgcaagaccgttaatcaaaaacggggtcagtttcggttttctggcggactag

SEQ ID NO: 169231 - DNA, 417 bp, Enterobacter cloacae
atgaaatttttacgtaatacgatttacattattctggctttaatcattggaattactgtattcgctgtcagcttttcaccagcacctggcgaaggaaaaagttatagagaaagtgataccatcagttattcatggttcaccagtgatctgattaaacatgttccgagaatcagtcaggcgtacgaatttgaatatcgctcacaggatggtgcatcgcctgaaatgaattcagtaacattctatcatacgcgtgatgctgaaaaattacgcaactacctcaaagagaaaggctttacttacgagactacggatagttttggtgagcaatggactcactatgattcaggtctggtgacatcattaatcattgataaaagccagcaaatagtgattctgacggagctttcatacccctaa

SEQ ID NO: 169232 - DNA, 954 bp, Enterobacter cloacae
gtgctttttatctatatcgtgacgtttatcctgctgggtttttactggaaaaatgccggtttctcttttacccggcaggatgcctgggtcgcgagcggtattttcgcgctgatcttgtatagctttattgccgatcttaaggccttctgggcctataaatgcgccatcaagaatattgatttatcgttttttattggcaaaaaaagtccgaagatgaatgcgatcattttcgaaccgtttgttgtgttggtcgtcgctaccctgatttttgcaggtattaccgcgctcctccttgctctggctcagccgggtattgtgttgctgattctggccctcgttgcgccgctgcttatctggggaatgtttgccgcattgcgctatatctatacactgcaggtcattgaatcagccagagacaaagtaaaatacacgcagctttcacagtatgtggccgtcgctgtcatcctgtgtgtggtgatgaatctcctgaccataagccccttacgcaacagtgagcagtttgatctctatggacgttacttcaccttaaccgccatcattaccatggtggtgctctgtgtggtggtgctggcaatcaacctgctgttcttacgctttacccgacgctatgtttttcttggccatctgtttcttaacgagattgacctctatttctccccgtcaatcccgtggcggacgctgtctgagaaacccttatggttaagactggcgatgctggtgggggttgaatgtgtctggtcggctgtgatcggtgtgctgcttacgctgtcaggatggcaggtctggtttgaggtgtatttcctgctctgttatctgccgtgcctggtgtactacacgctgcatacctggtggaagtggcataccgattttatgatgtcgagcgatatgtatctgcgctgggcggagatcagcaaagaggactccctctggtaa

SEQ ID NO: 169233 - DNA, 369 bp, Enterobacter cloacae
atgcgtatcggtacggatatcgtcgaggtttcacgaataagtcgggcaataaccaactggcaggtagattttttacagcgggtctataccgaacaagaaatcacaaaaattgatctggctgaccccaattatgaacgtgcatcggggttttgggccgcgaaagaggcgctcgtgaaggcgctgggttgtggctaccgggatggtattaaatttcaggacatcgaaatcagccatgatgattatggatgccccttttttatttttaaggggcgcgtaaaagcgttgctggtcgagaaaaatattgcgaattcatcgttgagtatttcgcattgtcaaagttatgcgacggctgttgtcatactttattaa

SEQ ID NO: 169234 - DNA, 1194 bp, Enterobacter cloacae
atgaatgatgccgcaattaaaaagctcacaggaaatattaaaacaataatttctgacccgttggttggttatggcttctcaggcataaaatgcgatatgactccttttgaatctatcgcaaaagaattaaacaagagagataaagactttcaacttgataaatattcttgtaagttaatatatcttgatgctgctagggagttcaaaaagaaaaacggtgaccagcaatctttaagtgaattgtcaatagcacaaaaggatgagctggcaagttatatacttggtcactatttagcaaccccattaaagtatgatgtaattgttccattagaatggctaaaaccattaggttaccacaaggttgggactgctgtaacaatttctgaaggcaaacgtcttatcttctctttattacctgataattatgaatcatttgtagaaataaaaatttcaatgtggggtttcttttcatatgacactgaaaagttatttttaaaagaaacattgcaaacattaagtattttgatgttcatgctaaagcaaaatggagtcatatatagctcaagagcatatgataaaatcccttcagcattagatattttatcggataaacataaaaaattcctttctgttgatgcgaggcttttatgtgaaaagtatgattattttaatagttatctttcctttcctatttcagttagtaaatatataaatgaattggcattaactgaagattttagtttgctaaaaactgatgctgcaattgatatggtaagggttgcgctaaccgtcgccactgaacttttagataataattcagatgaagcaactagagttaaatcagctataggttggtttattcaggcggaaattaatgaagatgatactatgtcatttattcaagtgtgcatggggcttgagtcaatttttggtgataatgaatctgaagggggattaactaacagtctcgccgatagatgtgcttacttgattggaagaaatataagtgagcgaaaacaaataaaagatgaatttaaagaaatgtaccgagtgcgttcgaaaatagtacacggtgttaaaaatcatttaactcagaatgaggagcatgtaagaaatagagctttttattacctaaggaagtcaattttaaaagaaataagaaatttacgcgatttgccagaatgcaaactttaa

SEQ ID NO: 169235 - DNA, 165 bp, Enterobacter cloacae
atgcctaactgcaagaataaggttgctgtatatctgtcagatgatgaaatagagataattgaaagttataaaaataaataccagaaagaaaatgggattcctttaagcagaaatgcaattattaagatgcttatcagtcgcttatcaaaagaaatttcaatttaa

SEQ ID NO: 169236 - DNA, 3279 bp, Enterobacter cloacae
atggaatttagattatatgatgaaacaccttcgcagcaagatcttttcgatggtcaaaatcattctaatttagctaataagatatcttctatacttaacagaaaagatattaatactataggtcttgatggatgtcttggttcaggtaagtcaacagtattggctctaattaagaaccaattgcaagaaaatgacaaaattacattcattgatttcgatgttgagctataccatcacggttcaacaaagaaagcactcataaatgtacttcatgatggaatgcgtccaaaaatcaagagttatgttgctgaagcattcagtgattacaaaaacattgctttaggaaataaattctcctacgaaaaaaaacaaaatagctcgatgagtacttggaccttttcatttattttcacaagcttactatccctccaaagctttcgattcttcctgctagacttttctaaattcatgaataatgaaccctttagcaagttgacattactggccgagtcattccttttgatatcaccaataattactctttttttcttttcactatttagagataaaaataactctataaacttctcagacattattaaaaagaatagtgtcgataccattactgaaactgtcttgatatctaaagaagtgggagcattagaactaaaaggcgcattaagtggttttcttaagtgcactgatgaccatactttcatattaacaattgacaacctcgatcgtgtttcaaaagaaaaagttaaggaaatttggagtgatattgaattaatcacccataattcaaactcaaaactaaaaataataattccttactcagcagagcatcttgccaaatctctttctgacaaagatgataacgtgaatgaagggatggagtttctttcaaaaagattaccagttactttcagagtcccaccaataatctcaacaggatggagaagtgcttttgactacttctggagggaaactttttcaaataattacattgatcaatcaaaggaaattgctcaattaattgaaacatggcttccccaaaattatatgcaagtaacccctcgactactgaagagactcatcaatgatgtaaatattagtatatttacgacacccaaaacagtatctccaattgcagcatctttctatatattatcttgcagatataataacagcccatttatttgggcaacattaaattatgacaccgaaaatatcgaggattttttaaccttacataatgtaccaaaagaatactacgagaaatattcaagtagttatcctcaacttcaaagactatatgaaaataataagaataactggatcgaagagattctttgtttgcattttcaaactaacgaagatttagctaaaagcgaattaattggtgagcctttactgttagcaataaatcagggtaatgcctcagacttcttccgcttgaccgacacttttggttttgaatccatatggcgagcaacacttgataaaacagaccctacaaaatggataaaacttctttcagaagcagatgataaccatatctcaacttcacaaaacattatcattgatgttataaaatctctcaatacaaagaaattaactgttgaatcaactagtttaaatatagagctaattcaatccttagagaagttaaagtcaaaaaaaataaatatacagggagtatatttaaccgatataaaaaacaacctttcagctgcaattactgattataacagacaaagttttgatgatagcaaaaacaatatggataaaaataactgtgaatccatattaaaaatcgcaaattatttttgtaggctagatgatgatgatgaaaccacttcgaaaattttaatatcacaaaaaaatatatctggagtgttttttgccaaatatctgtattcaaatatgaatgaattagaaaatttaaacatcacagagattactttaaccacgcaggaattaataaaatcacttcatttattatcatcggaaaactccaacttcaatttatttgacgaattcttcttgtcacgaatcaaatctaatacagaggaactttatttagaaataaagaatgatactttcacagctgctcaggaagctctttccatcctagaggctaaagagattattcaaaatataaaccaagctaatttgcttgtgctttcctccgcatggcatgaaaaagacatgtcaaaatcccatgattcacttgatgaaataagagaaagttacccagtcaacttcgtatgccttttcctgttaaacacgattgaaactcagacctatgatataaatgatattatcctcaggagttctatcgatgaaaacattcttaactcgtctgaatttaatgaaacccttgccgaccatcttttatttagcacctcctttgaaaaaatagtgttatcattagatgaaactgaagtaacaaattatgtttcagaagcaataggcttactattatcacggaagaaaattgcaagactacatgtggctaattttataaaaacacattattccatcttgacatcacattattcgagagaaattatattagatttcttcagttcttgggatcaatcatctgcccgggaaataaaaaatgaagaagttataaagtttgaaaatatcgacccgctttatttaaatgatttactagaaaccaaagtattgcctttatcttacagagcagcaatcgaccacgtcaaagaaaaattagcaaagcacaaagaaataccaagtttgttcgtcaccattgaaaaaaatgctaaggccgttataacatattgttcgaaaaacggcataagcttaataaaaaatagcaatgatatattcagattgtggtttgcagaaaccacctacaatgaaataataaaagccaagaacacacgcttaattttcgacattctttcccaaaaggataaggatgtcaccatagaaaatttaactgacttggtctatcagagagattttgatgtaaaaaaacaaattgtattaattgagcaatttggagatttaatcaccctcaatgatcccgataaaagtttgataaatcggacaattattcgcttattcccttatgcgattgaatcgaaaaatcttgcccactggctagacaaacaaagttttaactttactcgctggaaagcaaatgaaaaggattccgttcaatcactaatactatctaaccctgataaatttccaaataatgcttctaaattgcaaaaatcccgcaaaaagaaaaaaaatgagtag

SEQ ID NO: 169237 - DNA, 1512 bp, Enterobacter cloacae
atgattcaagaacacaataaatggtgggaaaaaagagtgctacgttccgtggacaaccttaagttatggtctaataatccacgtttagatccctcaagtaagctcgttacagttcgcgattttgttgaggagttaatatctgatgacaatgatgaacaaaattttttaactttaatgagatctattgcgacacgaggttttcaatcattcgaccctgttgtagtttggcaaaataaagataaagatttcgttgttgcagaaggcaatcgaagggtaatggctctgaaactgttacgttcgcctgataaagccccaatgtctattcgtaaaattgttgtcaacctatcaagaatgattgacagagacgagctggagaaaattagggtatgtgtagcgccttcttacgatgatgctaggtggtatattttacaacgtcattcttcagcaagtaaccttgtcagatggcaacgattacaacagcaacgatttataatcgatgtctatgacgcagaagggcaagatattgacaaaaccatcgaatacactggttttaaacgtgcagcaataatcgaggctttacggtatgtaaaaatacgtgatatcgcgacaagacaagaagtgacacaatatcttacgcatgaagaaaaagagcaagtctatagccataaaattaatatgactgtattagaacgatggttcgggaatagccaagttcgcgatgcttggcatatcgactttaatgaggagggtgttgtaattaaggctgaaatgtcaactttttgttttgcttatgccaaattccttaagttaatgctaaataaaaacaatgagttagggttcttggtcaatactcgtaccattgattctagcttccaaaaaatatttgattttctacctaaagtaaaaagtctagaagaagcaaataaagatgatattccccattccggtattgaggttaatcctaccccagccccttcagacacccctgacccaatccatgcagacccaacaaaagttcaggatcctaaacccgaagataagccaaagttaaaaggtgatcctaggcggcgtcagttaactgattgctatcatgaaatatcaacaactagctacaaactaaaatcccttttcaaagagtttcaaaaactaccagtatttatctatcctaatgtgacagcagcgtcattacgtattttccttgagctcgctgtggatgaatacattcattcaaatgatctgaaggataggctgtccaagtatgaaaagaaaggctacaatgactttacactgcagcaaaagctaagtactctgcgcggcgaatatatagacgtaaaagaggctaacaaagttattgatcagttactacatgtaagcaatgattacagtttgaacacattgaacgaatacatacatggaagcaaagttcacaaagttgaacctcagtttttgaatcgcttctgggatatgttgacaccgcttttggcagtactgataagtttgaaggaaatttaa

SEQ ID NO: 169238 - DNA, 348 bp, Enterobacter cloacae
atgagtaagtttatcacccccatcataaacctacttctttgttcatatttaatcctggcatatattcttagctgggttgaatttgaaacctggcatgataaaacaatttccctttgtattattactgtaaccacctacattatttcaattgtactcaataaattattaccctgtaagatacattttttgggtgggttcctggatgttttatcaggccctttacttatcgtaggtgcatttgcttgcatagccttccttgagccgtggccacttaagcttattggcttattcatatacgtcgtggcgatgttttgcctacctacttttataaacatagatgaggaataa

SEQ ID NO: 169239 - DNA, 852 bp, Enterobacter cloacae
atgaagacacggcagtatgcgcaaaaatctatcttcgatctggaagcaatcttcgaacagtcccgcaacaatgttagtgaacttgaacagctgttgagcgagctgacctttcgcaacactgccagggcgcggacgctgacgtctaaaatcgagcaatctctaactgcacttagcgaccgcagcggggtcgctatgtcgacttccaatccatcaacatgtaatcccgattcggcgtccatacaattttctcaagctgtgccccacagtgcacctgcagctgtagagcaactgcaaccgaaggctatcccagacactgccatgcgacagcaattcgacaaaggccaaattgatctaggtccactcccgtctttctctccgtcagataaagcgaatgatgcgcgagcaatactggcagcatggacagccctcgaagcactgtcgcctcaaggttataaacgcccagaggatatggcaaccggcgaccgctccagggttgctctattggagcgaggtgttccatggggaccaaatgcccgcagcaagcccagttataagctttatttcgaggtcgtcctcggctccatcgctctcgacaaggcgacggacgagctggtcaaggtttttggcgaggatgaggagcgttcgcgcccggacggtaagaaagcggccatcggctcgatcctgatcgacaaagaaggctatgtgcttgaggacaaaggcgttgccgtttccagttttgcctgggcactcaagccggctctcgatctgaagcttggaagtttagggaattggccgaatgttgagccgcgcattatcgagcatctggatcgaatagttcgccgccacaactag

SEQ ID NO: 169240 - DNA, 2310 bp, Enterobacter cloacae
atgcaagtacaacatcattctgaaccaaacttgaagcatgagattgtggctttatttaaggcttctcaattgatacctttttttggcagtggatttactagagatattagagcaaaaaatggtaaagttcctgatgctattaaacttacggagttgattaggaatatagcggcagaaaaagaagggttaacacaaacagaaatagatgaaattctaagaatcagccagcttaaaaaagcgtttggacttctaagtatggaggaatatatacccaaacgaaaatcgaaggcattattaggtaacattttttcagagtgtaaactctctgatcacgaaaagacaaaaataataaatttagattggcctcacattttcacgtttaatattgatgatgctatagagaacgttaatagaaaatacaaaatcctgcatccaaatcgagcagttcagagagaatatatatccgctaataaatgtctattcaaaattcatggcgatattactgaatatattaaatacgaagatcaaaatctgatatttacttggcgtgaatatgcacacagtatagaagaaaataaatccatgctatcctttttatctgaggaggccaaaaactcagctttccttttcataggttgcagtcttgatggcgagcttgatttaatgcatttatcaagaagtacaccatttaagaaatcaatttatttgaagaaaggatatttaaatttagaagaaaaaatagctctttcggagtacggcatcgaaaaagtaattacctttgacacttacgatcagatatatcaatggttaaataacatacttcagaatgttgagcgaaaatcccccacaagaagtttcgaactcgatgattccaagttaatgaaagaagaagctataaatttatttgctaatggaggccctgtaactaaaatagtgggtgacaaaagaattcttcgaaattctataactttttctcagcgagatgtctgtgatgatgcaattaaagcactacgggatcatgactatatcctaattacaggtcgacgtttcagcggaaaatctgtacttttatttcaaatcattgaggcaaaaaaagaatataatgcctcttattactcttcgactgatacattcgatccttccattaaaaattcattgataaaattcgagaatcatatattcgttttcgactctaatttctttaatgcacaaagcattgatgagattttaaccataagggtgcatcctagtaacaaaattgttttatgctcgagttttggtgatgcagagttatatagattcaagttaaaggacagaaagatattacataccgaaattcagataaaaaataacttgattaatgaagaaggtaactatctcaacgataagctttcttttgagggactaccactttataaatcttcagagacgttgttgaattttgcttatcgatactatagcgagtataaaaatagactaagtggttctaatttatttaataagcaatttgatgaagattctatatttgttttgattttaattgcagcttttaataaagccacatatggtcatatcatcagtcacaataaatactttgatattcagagttttatttcgcaaaatgatagattatttgaattggagtcaactaacacagaaccaagtggagttataatctgcaattcaccatcctggcttttaagagttatcagtgattatattgataaaaaccctgcatcttataaaacagtatctgagttaataatatctcttgcgtcaaaaggatttcttgcagcatcaaggaatcttataagctttgataaactaaatgaacttgggaatggaaagaatgtccataaatttattagggatatatataaggagattgcacatacctatcgtgaagatatgcactactggttacaaagggctaagtcagaattaatatcggcacacacaattgatgacctcatcgaaggaatgagttatgcaagcaaagtaagacttgatagtgccgagcttaaaaatcaaacttattacagtgccacattagtattagcgcagttgtctgcaagggctctatctataaataatgataaaatatatgcgctgagcttctttgaaagtagcctagaatccatccgaaattataataataactcaaggcacataaacaaaatgatggataaaaatgatggtggctttagatatgcaatacaatatcttaagaataatccattaatagaactccttcctcgtaaagaagaagtcaatgaattaattaacttctatgagagccgtaagaaataa

SEQ ID NO: 169241 - DNA, 585 bp, Enterobacter cloacae
  misc_feature (539)..(548): n is a, c, g, or t
gtgttaagcaaaactcaaaagaatttcttgtggatgattgcagaaaaaacaatcggcgtagtgggtcttttctttataaatgctttggtggctaaatacctggggcctgtggtaattggtcaaatagcaattgcaactgctatttttcaaattgttcaggttattggggtgtttggcagcgatagtattttctataaaagaataagcataaacttgattagcggcatacaattaatgatgcctatatttatgttgagaagtataatatttatcttttttgcaagcgtttgcatactgtttttaaatgtgagaatggatttaacaggtatgacattagtgctgtcaatctgtacggcgtattatttttacactattgatacttatacaagctttaatgagtcactgctgaactctagagttaatgctattgcaaacgtagttggacttattttcggcttagtagccagagcattaatggttagatataaagtgccgattgtctattttggattacctcttataatgataagtgctattcnnnnnnnnnngtgctattccttattttctaaaatcatatgtatttag

SEQ ID NO: 169242 - DNA, 714 bp, Enterobacter cloacae
gtggatcatctccgagaccagagcagcggtgagatttactggttcaacaccgacctgaacggcgcgccgctggaagtgaccgacgagcgtggtgcggtacgctggagcggccagtacggcagctttggcgaggtacgccatcagagcgaagggttctcacgggttgtgaatcgcacagcgatggcacatcaaccgcttcgctatgccgggcagtacgctgacggtgaaacagggctgcactataacctgttccgctactacgacccgcaggtcgggcggtttattgtgcaggacccgattgggttgaacggtgggtggaacctttatcagtatgcgccgaatccgttggggtggattgatccgcttggattaacggcgactgtaggtcgctggatgggaccatcggaatatcaacagatgcttgatacaggaaaagtaatacaaagctcaacaggaactactcatgttgcctacccagctaatatagatgcttttggcaagcaggctaagaatagtgcgatatatgttgaatttgatgtcccggaaaaaacattagtaccaaccaatgaagggtgggcaaaaattgtaggaccagattctattgaagggcggttagctaaacgcaaaggtttggaaattcctgaaatgccaacagcacaaaacattactattaaaggtgagaaaattaatggggaagttagaaaaagatgctaa

SEQ ID NO: 169243 - DNA, 156 bp, Enterobacter cloacae
atgagtattaaaaatatatttttgcaagttaaaaatttatttaaatttaaaacttttattctgccacgcattgcgatatcgcgagtgcaaagcaccaagacgcgtaagcgttcgctaatcgcaatgcgtggcagctactaccttttgctgacgtaa

SEQ ID NO: 169244 - DNA, 639 bp, Enterobacter cloacae
  misc_feature (553)..(562): n is a, c, g, or t
atgagcagcatctttgaactctataaaactgaagaagggcggggccaacttcaggaaatattcagttatgctgcacagaagcacccattgagtctgggggcgagctttctggaaaaggatctctgggttacagagatcctacgtcttctgtttgatgaaggttttcttcatccatacacagtcgcttttaaaggtggaacctcattaagcaagtgctggaatgtgattgagcgcttttctgaagatatcgatttatcgattcattgggcggaacttgctggtcattcagaagaacaggaacaagaagcctggaaagcaagtacccgtagtcgaagtcagaatcaacgctttcgtgaacaacagcaaacaagactcgaagaatggaccgcagagttagtggaaaaacttaatgagcgtttccagtcttatggtatttccggcctggaggctcgtttagaggcggaaagtaggggagaaaaggtcgatatattctttcctcgtgttcacgaaagcgttgattctgacttcgactacgggtacttgctttccaggnnnnnnnnnnttctgcggcttaccagcgagatcatatcttattggagttcggtggtcgtaaccgagggaaaccgacggatacaataa

SEQ ID NO: 169245 - DNA, 675 bp, Enterobacter cloacae
atgactctgaggtgtctgttaaacccgtggcgattcacaatcgctgaagcacttcgactcgcagctagccgccataaacagctagatctcgatccggccgagttcggctctggtttcaggattttacctgttgaggcagaagacgctcagacgttagatctttttctttatgatactttatctggcggtgctggttatgctgaggtcgctgcttctaatctggaagaaatacttatagcaactctcgatttactcgaaggttgtgagtgcgacacttcctgtacagagtgtttgaatcatttccataatcagcacatccagagtcgccttgatagaaaactaggtgcttctttgctccgttatgcaatatacggtgaagtgccgagttgttccgcaaatgatattcaggtggaaaaactgtcgcagttaagggcgagcttagagctagatggttttcaatgttcagaggataggaccctggacgtgcctttggtcgtttccttaaatggccattctgtagctttgggaagctatcctggcctgattgacagacctgagtttgagcatggtgtctgtaattgcaaaaaagtcgatgatcatttggcattgaacgaatatcttctccgttcaaatcttcctcaagcacatctcaaagttagaaaattgttacgataa

SEQ ID NO: 169246 - DNA, 1050 bp, Enterobacter cloacae
atgagcgagtctgttaagtttagtttttatcaagtggatgaatgcggttattactcatggggtaacagttctccagtttttggttctctacaggaactgctaacggaccttcttcactggagtgcggacaagagcattgaaaataccaaattgtatgaaccacaagtaggtagtgactatctctcaacttatttgtttgatatcaagtgcatgggtgaagattggttggttactacttggaatgaagtaccatcaactgaagccggtatagcatctgttataagggattcgagtgttacttctcctgatgtgatcatgaaccgtatacaggataactccattccaggttatgcgacatatttttggatattaccgaatgatggcttgtttgctagtttgcggttcaaaaaacgtactcaaactgggcaacaaccatttagaaagtatatggagcaggcactttctttgatctcttcttacgtcagatatggtgaagatggagtcgatgactctagacaggtgattggttacgcaccggtaggagaggatttgattagcccaagtccttctcctcggttcaaaacttctcttgcgcatgatgtcggtaataggcagttcattagggaaaatgctactcgagttagcaaaattattcgtaaagagacattacgattgaaccacgatgatgaacgccaatggtggcaatctgccttaagccgtttggggatcagcagtggtagcgattatagaagaacagacgatgtgaatgtaaagtatgagttacgtcctgaattttttgatttgcaaaaagttgattcgatgatggaagagtgggatgaatctgagcctacgcgttcagagtgggatgattatggctttacttttaaaggtgatgccaataaggtccactggctgagctatagtactctaacggcatctgctgaattgaatgttgtttgggataataacgaggttgttaatagtgaatcgttgttatcagttttaactgctggtaaagcagagcttctacgacaaatacgtgaggagtaa

SEQ ID NO: 169247 - DNA, 552 bp, Enterobacter cloacae
atgttcgggaatatagtgaagttgttcatcatcgtttgcctcatagggttaatcggtgtgggattctggtatgggagatttgttccatttgctcaacagtccccactttttgaggctctcagaacgactgcgtcaataatatttgcagttgtgggagcgtggatggcaatcatctaccctgaaaggttgcgcttcacatttaaaccagacagtagtgaatcaacatctatgcctgtcaatatggggaagctattgcatccagcagtaaattctacatttattttgtgtattgtactaatggtgggcgttttggcaccattgattaagcaagtctcttttctgctcccccataaggaattactacgaggggtgtcatttagtttgctcattgcacttacaacttggcagatatggaccgttattttgacattggttcctgctgatatgattaagagtaaagtggatcatgaaaatgcgaaagctgctggtcgtaagagttttttttctcaaactcaaaatgttagtgatggtaaaaagcaagatgtagattga

SEQ ID NO: 169248 - DNA, 495 bp, Enterobacter cloacae
atggaagcgttcaataaagacatgttcctttacataggcaaaaagcctattgcaaacatcaaaccacttgaatcgctgaatgtccttcgtcggatggaaatcaggggagcaacagagaatgcaaaaaaggtcagacagcgctgtggcgaggtcttccgctatgcaatcatcactggtcgagctgaatacaatcccgtgcctgatctcacaagtgcaatgcaaggacatgagtacaaccattatcctttccagaacatttccgagattccatcatttttcgaatccctttctcagtattcgggcagtattctagttgttttggcctcgcgcttgctgattctcacggatgtaagaacgggtgaactacgaggtgctacatggaaagaaatcggcacagaatccgcagtgtggattatcccggcagaacgtatgaagatgcgccgcccgcatattgtgcctttatcaataccatcattgagcgcatccgcgaaatga

SEQ ID NO: 169249 - DNA, 858 bp, Enterobacter cloacae
gtgtttaaacttaaaagaccaatatatacttatggtaatgcattaactttatgttgtaatggaattactgggaataatgctttgctagaaaaagttcataatgcttcagctgatttggagttacaagtaagtgcttatgaaaattcagcattaactgaagaactattcacaattcaacctatcaatattgatggtattgcagaccctataatattaaatgatttgaaaaagtcagatttcataaagttatacaataaatatttggtcggaatgacgaagccagcaagagtaatttatgatgtacttatatcgtcagctaatgaaaaatgtcctttttgtggtgggatagggcgtccaaggaatctagaccattacttacctaaggcatattttccacagtttgccattgcgccgttgaatctagttccatcctgtcgggattgtaatatggacggtaagggagagagttttgccatattagctagtgagcaaatacttcacccctatttagataatgatcgttattttaatgagcagtggattttcgcacgatacttagcaggtgcccaaggtgagcctggggtaattgaatattttgtttctcctcctgatgaatgggacgcaaatcaaaaagagcgtgtgataaagcattttaatgattttaatttgtcgttaaggtattcgaaagaagcaagcgcaagacttggcaccttattgtctcaatataatggattgctacaaataccattggataaagaaacatcgaagaaaattatatttcagacagttatagacaatgcgccatttgtcaatcattgggaaagggtaatgtgtttggcacttctgcgagatctttaa

SEQ ID NO: 169250 - DNA, 504 bp, Enterobacter cloacae
atgttcttcgagcttctcatcaacgtactcctgggtcgccattaccgtagacgtatctatcgtaagctcaaccgaggcgatatcactgaccatgatcaccattctcacggtctgtgcacggcccgatccctcctccagcaatggtttgtaactttccgccatgttaccgacggcaatcagcgtgccggcatcatcgtaaagccccatttctcgcatccagaaaccacccgcttcaggaggaatgagaagttctgcgatcacatagttacgctttttattgtcctggctgattttattcaacgcgtggcgccagacttcattaaccagcttcgtctgcccggcatcaggaaccggcaacgtgcccccaccgtcacccaccgccatcgccgtaaaattgactttcttgccgttagggacggtcgcggcagccagtttttcggcaccggctttggtgataaccgttttatatttcactgtcattctgctctcacttatccgggataa

SEQ ID NO: 169251 - DNA, 240 bp, Enterobacter cloacae
atgcctcgccaatatgatattcacgcagcttttttagcctctatagaaaagaatccaaagggctacctttgcctaaaaacaaataaattcatcaataatttgcgtgagaggaactggcatttcatccaggcagacgctaacgcatggattgagagataccagccagatttcgctgataagacgacagacggtagcgacaacaggtactggatcctgcgtaacatggggagggtccactga

SEQ ID NO: 169252 - DNA, 495 bp, Enterobacter cloacae
atgagcgagaatctttctgcttcacagaaaaagatcaagaatgaaatagttcttagagctatcgggtctggcgctggcatcgcattattaattgcgggtgttgtttactttatttttgctattgaacctatgtttgcgagaataggtttgtccttaatagtatttacggtatctttttttattgcaactaaagttactatttattttctctctggtgattatcaatgtgaggcttgcaatgcaatatatagtattgagcttcttgatacagaagagatatttttatccgctatacctcgtagtgcaatcaaaaatggaggtcaggtaacatcaggtgatcgtaaaggtaagcatattgtaatacatgaaaattggacggaagaaaaatatgatgtcaccagaaaatatcgttgtgttgtttgtggtgacacatatcaggagcaaggggtggaaacaaggaaaactagcttttcaagtaccaaaacttatcggtaa

SEQ ID NO: 169253 - DNA, 552 bp, Enterobacter cloacae
atgaagaaaaaaacaaaagcagaaaaagctaatgaattagctgttagaagaaaaagggatgttgaatatcaaaataagcgtaaagagaaacttgaaaaacttggcgaacatagtattacaataagattggataatatcgattatgagtcgttatcggatatttgcgaaattttaggatatcaacgtccagaggcaaaaaaacgtaacctgatagaaatttactcagctagtttgattcacttgcttcgtattgaaagggaatcatcgatttacaaacctaaatcacgaacagctaaaaaattttatcggttatataaaattgtgaatcatttaaaacatgataaaaattactctgataatgaaatcataactaagatgacatctgataaaatgctcacccccttatcagtgatgaaaggcgggaaaaattcttcgtggaatgaaaaagcactaaaaagagtgttggataaagaaaaggtaattgagacgttaaagcaattagatagcgattttaaaaaacatttactcattaagtcatcaggaatagcataa

SEQ ID NO: 169254 - DNA, 687 bp, Enterobacter cloacae
atgcacaaagatccctcaataatagttaatgtgaacttgcgtgaagcccggttaaaaaagaaggttcgagaacatttgcaatcattgggatttacaaaatctgatgcaggagcgctacaggccccaggaaacacgaaagaggtaatcaggacccttcatagcgctcagcgggctgagcgacttgctgcaaaccaaaatttcataacactcaagtcctcaaaattattgaaattttttgcatctggtaaggatgttattcctgacaagatatcgcctgttcttgagcgggtgtcatcaggaacttggcaaggcgatctgtttagattagcggcattaacttggtctgtaccggtttcaaacggatttggaaggcgtctccgataccttgtttgggatgaaagtaatggaaaattgatagggttaattgctattggtgaccccgttttcaaccttgccgtcagggatagattgattggttggagtacagaggatagaagctcaagacttgttaatgtgatggatgcgtatgtacttggcgcacttccaccttataattttctgcttgggggaaaactggtagcttgcctacttcgtagtcgcgagttatatgatgactttgcaagagtgtatggcaacagtgtgggggttatatctcaaaagaagaatgaatcgccacggataatctag

SEQ ID NO: 169255 - DNA, 498 bp, Enterobacter cloacae
atgtggacgataccgtctgaacgagatgctatcaaaggagtaaaacactcacagcgtggctcgaaaatgcgaactcctcatctggtaccgttatctcgccaggtactaaatatccttcaacaggttcataagctcaatggcaatcgagattttgtttttgttggagatcacaatcctcgtagaccgatgagtgaaaatacagtgaacaaggcattacgcgtaatgggctacgatacgaaagttgaagtgtgcgggcatggtttcaggactatggcatgcagttcattgattgaatcggggttgtggtcgaaggatgcggtagaacggcagatgagtcatatggaacgtaactctgtaagagcggcttatatccataaggctgagcatttggacgagcgtaggctgatgttgcagtggtgggctgattttctagagtcattaaagtataagttgatgacaccttttgattacgcaaagactaataattctattcgttaa

SEQ ID NO: 169256 - DNA, 966 bp, Enterobacter cloacae
atgactaccaaaaagactgagtttgagtatacgaagctggctgaatttttttaccaacgccttgaaaatagggcgataccactcacggcaaaaaatatttctaatgaattgctagcctgtgcaccagattaccgaccagggtattggcggagactgcgatgtgctctggcatatcaccagaatatgctgggctatgttgatgctgccgagcgtattcggagggcgaaaaaccctgtgactgcacatggtagtaatttatcaaaaaaatccagacagccccgcgcgagggcgatcaatcaggcagatgaggatgctctgaaatcatattttaaccagcgtggtgacattagtatggtttctgccatcctcatttttaaaaacgcaggtattagacccgcagagctttcaggtctgagagtggatggaaatcggcttattgtgacgggcgctaaaaaaagccatagcggacaacggggggcagaccgcactttactgttggatggcatcgattctggcctgctcagatattgtgtcatgcaggcgcaacgagtagacattggtgtgatgcaggacaggctgcgggctgctggtaaaaaactatggcctaggcgtagggctctacccacattttatagctggcgtcaccagctcggctctgagctcaaaggttccggaatggaccgccaacgtattgcatatttgatgggccatcaggccactggctctgttgaccgttatggcaataggaaattggctagaggtgggcgactgcctagctgccctgctgatgccgatttaagcggaattcgtatgactcacagtcagctatcagcggataatacacattatatcaagcctgagtctccagtaataaatcaggtcaataataattctgtggggaatagaggattggccgcattcatacgcagagggaaaaatgaatccagtgggaatgatttatcatag

SEQ ID NO: 169257 - DNA, 1200 bp, Enterobacter cloacae
atggcgtatagaaaaaacaggatggcaatgacgattgaagtggcactaaaaaataatgttcttattatgaagccggcatatgcgccagctacatttaaggcttttcgtcgcaaatctgaacagctgaataaatggattggtaggcagattatctctgatgtgaccgcaaccgacatgggcctctttttggctaggttgcatcaggaatatagtaacaaaactgtaaatcactatctctcaatcttgcggcagatattcactcgggctgtggacgataggctgattgccatgagtccgatacaaaatataaaaacgtgtaaaacatcttccaacgatcccgatccatttttacagcatgagatccaggctctgaggagttgcgaggagcattacccgattgaggtggcattaatcaccctgggaatcggtactgggctgcgaattagcgaactcatggctcttactgtcgagtcaattgatctgaataagcagcagctgtttatcgatttagcgctggtggataaggaatttaaaatcccaaaaaccagggagtcaaaacgggtcattgaactgtgtggctggactctgagcgcagccaaaacactggttgagtatgcccatcaaagacaacctcagttaattactgtattacaagcggacaataaaaaatctttacagatgtatagaaccttattggcgtattcgcaggaagaagatcggccctatgtctctgttgacgattttcgggaggcattttttaggccctattgtgaacgagtagctgtacgctatcgagggcctagccaattccgccacacctatgcgagtcagatgctcactgcgggcgtctctgtagagcggattgcccgtaaaatggggctaaccagtaccgccatgatatataggcactacgggaaatggattgtagaggatgcacctgattatgatgccgttgaggatactgtgctggaccgctgttttaatggttttacgaaactggaaccagctacgatagctaaatccgacgagtctcatcagtgttatggttcagacactgcgtctatagacgatagtgattcgagaatacacgatatttccgttaatagctcatctacattacatatggatgataggcggatggcagctatacataaattgagccagcgatggggagtagacaaaaacaatatattcttatag

SEQ ID NO: 169258 - DNA, 1386 bp, Enterobacter cloacae
atgccgagctacctgctgaaaaaccgaaacggaaactactacacccgcattccgtttccccaatccctccgcctgttaggctgccccctagagatccgagtctccctgctcaccaaggatcgcagtgaagccacgctacgtaatctggttgcagcacatggcatcaagataatgatgggcagattacccgctctcttgaggactgacagccatcagccgacgacccgttttcgagaccttatcgcgccggatctggctcgcttacgccaacaactgctttcctctgctaacgggcttattcagtcgtccccacttccttatagtcagcccgatgacgtgtcagcagcatcctgctgcgactctccaatgagggcatcgcagttacagccgtctcttgagccgatgcagcaccttgatccggttacagtgcccaaggcaatgggccagttgcaggctgagtttctggagcgcaaatcgaatgaaaaaatctcatcacgttcgctccagcagctccagactcgtacaacagcacttatcaacgctgtgggtggtggcttcttcgtacaggctttgaaattcaggcatgtagatcagtttgttcaggagctggcgaccagtaagggactgaagactgtgcgtgaatacaaggcggcctgtacccagatgctgaattttgctgtgcagatggaatatacggccaaaaatccatttgatcaggtcaaaataaaatgtgcgcagccgaccccacgacagcgctgggagcccacccagctcagggcattgttcagctcggtaaacttcacccagcacgcttacagcaacgtcgatgactattggatacccttggtactactacacactggcgcacggcctgcggagatctgtcagctacgtgtcagtgatgtgatgacccagaataatatcgcttgcctcaacattaccgacgagggagaggcgcagtcgatcaaaaacggcaacagcaggcgactcgtacccatccacagcaggttgattgcgctgggattcctgcattatgtcgaattacgacgtaggcagggccatgtgcagctattcagttgtacggctacaggggagtttggcgaatggaccaaaaatttcgagtgccgcttctcccgctacctggggaaactgggatttgtggcggggcaacgacctaccgcctatgggttccgtcacaccgttattgatgagctgcaacagcgtgatacacccgaacatgcggtcgcagacctggcaggacatagcaaaattggttttacctatcgccattatggaaaatccacagtgcagcgtttgaaggctgtagtagaacaattagatttttctgatgcgcttaaatttgttctccctcaccgtccagaataa

SEQ ID NO: 169259 - DNA, 888 bp, Enterobacter cloacae
atggaagacaagctctacgtatttaactacacacaaaaccgagacaaacttttcaataacttaatcagcatcattgatgggattctttcagatggggtggttagggatgaagagatcctttacctggatacatggttattagaggccggagaaattattcaaaatggtgtcattagagggttaagttcgcgcgtatcaaaaatactgtctgacggcgcagtaactgaggaagagaggcaggaacttaaacaacatctactggatatccaaagggacatacttgatatcccagaggtggacttcttctcgaaagaatcggacttacatttgctcaatgggctttgcaagggactgatatcagacaaaacgttgtctgaagaagaggttagatatttggattggtggttaactcaaaacgggactctaaagagtaactatccaggaaaagaactctatacgctggtaaaagaaattctcaaagatggtgtaataacgaccgaagaaagccagacgttgcacaaggcattggtagattttactggctgcgatcttgaaagcggagttgtcgatggtctatcaacaaagcttcctgtagatagtgatgctgacattgatcttgaaggtaaagtattttgcctaacaggagtattcatggcaggtaaaagaagccatgtagaagatattttgaagcgcagcaatggactgatttctaatacagttactaaaaaaattgattatttggtaattggaaccttatcttctcgcgactggagattctccagtcacggacgaaagattgaaaaagcgatttcttatagagacaacgaaggtgttggccttaaagtgatatcagaagaaatgctttttgacgcattaccaagaccgtga

SEQ ID NO: 169260 - DNA, 687 bp, Enterobacter cloacae
gtggatacacttgctgaaagattgaaagccgcgcgagaaaagttgggcatgagccaagctcagcttgcagaccaggttggtctgtcccaacagtcggtcgcaaaaattgagaatggagatactctccagccaagaaagatcaaagagatagctaagattcttgaggtatcgcagaaatggttgatgcttggagttgaagagaatgggaagttgtcaaattttgtaatcgaagaagctgaagaagccaagctcgatccatctgtgtttgctgacatccccgttctggatattgagctctcggccggaaatggatgtgaagcagagattattgagagcgtagtggactctttcccacttcgaagaattgaccttagaaaggctggtgtcagcccatccaatgcgagaattgttcagatttggggtaatagtcttctgcccgttctaaacaacggagactatgttgcggttgatatgtcccaatcacggccaattagggatggggatctttatgcaattagagatggcgttcttctaagagttaaagttttgattaaccagccagatggcggactcatccttagaagtttcaataaagaagagtacccggatgaagtactcaactttgatgaacgaagagcaagaattcacgttatagggcgggtattttggtcatcacggtcttggtaa

SEQ ID NO: 169261 - DNA, 150 bp, Enterobacter cloacae
atgccgctggtagccaatctgaacttgctcgcaagcttaccgaaatatcaggtcgaaaagttaagcagcagcaggtttggaattggttacatcgcgagaaaagaccaccagttaaacaatctcagtttattgaacgagctaccggggtga

SEQ ID NO: 169262 - DNA, 516 bp, Enterobacter cloacae
atgaaatatttaattttaatacttggtgttttatttttgaatggttgtattccaagggggatggttgacggtgaaaaatacacaactgaataccgagcaagagaaaagtgtgcattagattttgaggtgagaaataaatttcatcaatttgcttctgcctctaattttaaagtggttagggttgagggtggtaattataaatgtatacaggttttcggcgatgagttaaaaaggcaacagatggactcaaatgatgaatatgaggccgacagaagtggattaacacttagccaatatagagataaaaaagaaagtgattatgaatcattgaagaaagcatacatcaactactatcaggctaaagaaagagtttacgaagaatatcgtaaagacgggaaactacacactgatatttcttcaggtccagatggtgtcattagagcaacgtcaatacaggggaatgctcgttgcgatactgttatagggaatactggaggaacatcatcatgtgaataa

SEQ ID NO: 169263 - DNA, 1371 bp, Enterobacter cloacae
atgaatgcggcgcgtaagtttaaagggaaattttccataaggaatcttaaatctatttatcaaaacaaaataaaaagctctggggctataggtatagatagagtccgtccctcgagtttagaaaaaaaacttaatgatgaactggaacttatttcaaaaaaagttaatgctggaacctataaattcaccgcatacaaagaaaagttaatttcaaaaggtgcaaactctaatcctagacaaatttcgattcccactgctagagatagaataactctaagagcattatgtgagtgcttgtcagatgtatttcccgaagcgaggcttaagttaccacatactgtcatggattctttgaaggaggcattgcacgagaaaaaattcacagaatatgccaagattgatcttaaatctttttacccttcaattgatcactcacttatagaacacgcgataaaaagccgaatcaggaaaaaagaatttagatcactaattatgtcggcattagctgtacctacagttaatgaattcaagggtagtaagcatgccataccgaatacaaaaggcgtccctcaaggcttagctatttctaatatccttgccgaaatatcgcttagaaagtttgataatgaattgtcatctgatcctaatatatggtttaaaagatatgttgatgacatattaattttaactacttccggtcaagcaagtatcgtagcagaaaatgttatcagaaaactagaatcaatagagcttaaaccacatccgctcaacgaagaaaactctaaatcagtagtgggtttgataggtacaccctttagttttttaggatatcaaattattggtgaagaacttttaattaaaagggatagtattcttcgttttgagtcatcgctcgcaaagatattcactgcctatagacacgcgctttcgcaggctaaaaacaagcgagataaagaaaaagcaatcgcttattgtaaatggaaactcaatttaagaattacaggatgtatttttgatggtaaacgtctgggttgggtttcttattattctcagatttcaagtaccgctcaattacgagcagttaaccatactattacaaagtttattaagcggtttggactggatgatgatatcaaagcaaaatccttgataaagacattttatgaaataaatcgtggggtggcatttacatcaagatatatccctaattttgacaatctcactatagaacagaaacgtgaagtagtttctatgtggattggcagagaggcagctaataaattgagggactctgaggtggaaaggaagtttaattacaagataacatccgcagttaaagagcttgaagaagatatcactgggatatcttaa

SEQ ID NO: 169264 - DNA, 549 bp, Enterobacter cloacae
gtgcgggataatatttggtttacttacaaagctcgtataaacgcacatcatcgtcttgaattgatggaaaaacattcgcagtttcttcttgtctggtatgctattttgggagcggtgctttctgttgtaacaatacgttatcctaaaattattggagataatacagatatttgggctgctattctgtctattgttttactcggtgtgtcgctagtagtttctaatctggattttcgtgggcgagctattgcaatgcgaaaaaattatttggctctccagaaactatattctgaaattcctcaagaacactctctcacgtcagctcaaattgcagcatataatgatctcttgagtgaggttgagaaccataaagaaatcgatgataaaatggctagagtttcctcccatttaacattaacaacgcgaaacctaactatagaagagataaaagaagttagacgctttaaaatagtaaggttcaccattacatctctattatatttcactcctttgattctcatgtggattaattatgaatgcggcgcgtaa

SEQ ID NO: 169265 - DNA, 693 bp, Enterobacter cloacae
atgaatacaggccatagcctgaagggatggtgtcacctggtcggcaaaacccagttcaaggcactcgctgccgttcatccaggtttcgtcctccagcattgccgcaatttcttcggtggattttccggttttctgcgcataagccgggatgagaacggattcaaccttgtcgagaagatccgcatagtcgcgcatgtcgctcgcgtcaccaccagcaaacccccagggcttatggatcatcatcatcgtgttttcaggcatgatgaccggattgcctaccatcgcaatcaccgaggccatggaggccgcgagaccgtcgatatgcacggtaatcgccgcgccgtggtgcttcagcgcgttataaatagcaataccgtcgaagacatcaccaccgggcgagttgatataaaggttgatgtgggtgacgtccccaagtgcccggagatcattgacgaactgtttcgccgttacgccccagtacccgatttcgtcatagataaaaatgtcggcctcgctgttattgctggcctgcatgcggaaccacgaattactttttgcgctggctttcggacggtggcgcgcccggttctttggcttcggcactggtgcctcctttatcattggcggggtcggtgtcaaacaccaggccctgttcacggttctcgtcaacctccgctttacggcgtgacttaa

SEQ ID NO: 169266 - DNA, 528 bp, Enterobacter cloacae
ttgagcggacaagattatcgagtgccacctttaagccgcaacgcggtgcgtggtttaaccaacaacttacgctcgatgctgaagatacatgatttgtattttcccgtaatagaaatgctggagttcgcgctaccgcagatcttacctaacttttcttttgaaacagctacggaaaaggagatggggggaacacatggtcttactatgcctcaggactcgttaatcattcttcgtgaggatgtctatgagggtgcccatgctggaaacggtcgtgatcgtatgactgttgctcatgaaattggtcatctgctaatgcataagaatattgcttttgccagagcggctccaggagtggaaattagagctttcgaaagcagcgaatggcaagctaaatgctttagtggagagttactcgttccctacagccatgcaccattattgcggggaatgtctgtagaggaaatcgcaaaagcgtgtggagtgtctgcgcacgctgcggattatcaaaaacaactgttaaaaaagtaa

SEQ ID NO: 169267 - DNA, 360 bp, Enterobacter cloacae
atgttaacgccgtttggtaagaaagttaggaaattacgtatagacgtcggtgtcacgctgaaaagcatggctgatgctatgggcgtgacctcgtcttacctctcagcaattgaaacaggaaaacgcgctgttactgatcctgtgctgaaaagcatcattagctatttcagtaatgaaggtgttcatgcaggtgacgatttaacaaaagcagcacgtgattctcaacaatctgttgagattaatctgtcgggtaagaatcaaaatgctcgggaagtagcgatggcatttgcacgcaactttgatgaactgagcgatgatgagtttaaacgtctacgtgaattgttaacgaaaaaacaataa

SEQ ID NO: 169268 - DNA, 276 bp, Enterobacter cloacae
atgggtgatcagccgcccgaagagttcgagagcaagaaaggcgagtacagcgataaattcgatgcccgtacattcgtttataccgcagttgcccacctcgggatgagtgaggcagacgcctggaacatgacgatgaccagcttccgggctgccatgaatgccaagttcccgcagaagggtaaagggaaggtgccaacccaggagaaatacgacgaggttatggactgggcagagcagatgctggcgatggatgcacagaggcatgggccgcactaa

SEQ ID NO: 169269 - DNA, 195 bp, Enterobacter cloacae
atggaatttggtaaaacgcagtgcaatccacacgtggattcaggagtagcggaaagcgtgacttttggtgagttcacgatttctaaatttggtgatggtggtgtctggatcgaggatggagatgttgatgccggctctttcgaagaagcgaaatttgtcgagcatatccgaaaattctacgacgaaaatctgtaa

SEQ ID NO: 169270 - DNA, 156 bp, Enterobacter cloacae
atgtacaagcgtatgtcacaggccagtcgtaaggggaggattttcgatgacgtgttacgacacgcaaagctctgggcggagaagcagcagattccgtcagacaagttcgaaaagaagcgcgttaagcgcgtgcagcagcagccaggcctgctatga

SEQ ID NO: 169271 - DNA, 1590 bp, Enterobacter cloacae
atgaaactcaactatctcactatcgggcaacggctcggtttcctggcggccattcttttactggcaacgctgtttatgggtattcacgggttgtcgattaacgccagcggattagtacaaaaccaacagatcatggccacggagaaggtggttgcggagagtatcgacacggcccgcaacgcgcaggtgcagtttaagattcaggtgcaggagtggaaaaacaccctgctgcgcggcatgcagggacaacaagcgttcgacaagtataaaaacgcttttgtcgaacagagccagaaaacgcaggcgctgttgaaaacgctcagcgaactgctgccgcaaattgggctgcccaataccgaggccatcaagaccatcaatttacatgctgaactggaaagccattatctggctgcgctgcagcaatacagtgttcaggacgccaccagcgcccaacgcgtcgatcatctggtgacaggaatcgatcgtgaaccgacacggatgattgatgagatggtcgccagcacgctgaaacaagcggagcttatccgtgcgcagaccgacgcgagtaatcatgagcattaccagcagacacgcctgatgctcatgctggtaatggccttcacgttgatggtcggcatgctgatcacctggtggctgatccgcagtatcactcacccgctggcacaggcggtatcggttgcccgcaatgtcgcagccggtgatttacagtctgctatcgtggtgtccgggcgcgatgaaaccgccgaactgatgcaggccctgcaggagatgaacggtaacctgacgcgtatcgttaccggcgtgcgttccggcaccgaaacgattgccggtgcgtcgcagcaaatcgccagcggcagccgtgagctttcgtcgcgtaatgaagcgcaggccagcgcgctggaacagacggcggcatcgatggaagagctcacctcggtggtaaaaaacaacgccgagaattcgcgtgttgccagcgatatcacccgggaagcgacccgtgtggcaaaccagggcggcgaagtggtggaaaaagttgtcaccacgatgagtgaaattaatcagctctccggcgaaatcagcaacattattggcgtaatcgacagtatcgccttccagaccaatatcctggcgctgaacgctgctgtggaagccgcacgagcaggaaccgaaggccgcggctttgcggttgtcgcctctgaagttcgtgcgctggcacaacgttccgcgacagcggcgaaagagatcagtgatttgatccagcgctcagtcagtcgtattgatgaaggcaatacgctggtgaaaaacgccggtaacgccatggaagagatcatgcaaagcgtgggacgcgtcagccagttagtggagacgatttcgctggccagtaatgagcaaagtacgggcatcgatcaggtacacatcgctattacccagatggatgccgccacgcagcagaacgctacgctgtcgcaggaatcttcagccgccgcgcacgcgatgcagcagcaggctgagaatctgctggagatggtgcaaattttcaaactgcatgagcagcgcaccccggcatag

SEQ ID NO: 169272 - DNA, 1833 bp, Enterobacter cloacae
atgttcactggtctcaaaaaaagcgaaagcaaacggcttgccgcactggagctgctgagtaaggaagataaatcccgcgatgcagcactagccgaatttgcgcgtctggcatgtgaagtgatgggcgtcgaaggatgttttatcacaacattcgacgacgaatatcaatatatcaaatatgttaagaatatcccgattgagcacgtcaaaattcgtatcgaacagaccatgtgccaatattcgctgcacggttgccagaccgttattagttccgatacccggctcgatgaacgatttaatcatcaacctttggtaaaaagcggcaatattcttttttacgcgtcggcaccaatgataaataaagacggcacggtgctgggcacgttatgtgtcagtcatcctgaaatttatacgccgacatcacgccagataaccaatttccaccgcgtcgccgcgctcgccaccgtttatcttgaatcctgctataccattgggttaatcgatgccctcaccggtataccgaatcgtcagtttctggtgaaagagatggagcgactgacgctggaaaaaacgagcggcagctacgccctgatgatttttgactgtattgatatgccgcgcgcgtatgaattatcccgctatctgggcgtggaagcgctggagaagatgctgcgcagtttcgggccactgctgcgcttgcgcttaaagctgaaagaagagaccacgctgtatgctttcaccaccgggcgctacgctgtgctggtcgatatggactatgcgctgacgctggcaaaacgggcggaaaaattgcctggaataaaggcgaaaatcaccggcgacatcgatatcaatctgacgatccacgcaggctatgtaaaattttcgccgcaggacgataacgtgcaggagattgtacgccagggcatcagcgcgctgcatgaatcaatccgcgaaaagatccgggtgttgcagttcaatccgattctcgatcacaagcggaataaagattttaagctgctctacgatctcagcgaggcaatcaaagccaccgatcagctctacctcgtttttcaacctaagatttcgctgcgttctggcaaaaccgaaggcgtggaagcgctgttacgctggaagcacccggaactgggacagatctcaccggcagtgattgtggcgctggcggaaaaaaccacgctgatgacggacttgacgcagtgggtgattaagtcggtgatttctcagcttaaacagtggaaacagcaaggtattctgctgccggtgtccattaacgtcacggtcagtgatttttcgcgccccggatttgccgatgaactggaacagaacgtgctggccgccgggctgttcacctcggatgtccgtattgaatgcctggagactgagaaagtgctggaaagcgatccggcactggaagaacttgaccgtttaaaattgcttggctttaccattttgctggatgactttggcgcaggatacagcaatatcagttatttacgccgcattcccatcgatgtgattaagctcgaccgttcgctggtaagccaggtcaccactgacaccggcagccggattatcgcccgcaacgtcattatgatgctcaaagagttgcattatgtggtgctggcggaagggattgaagatctggaaaccgcgcgaatgcttgccgaatacggctgcgatgaagcgcagggctatcttttctcacgtccgctatcacccgaggagatccctgcctggctcgcggataacaaaccgttccgcttattatcgaagatggcgacagagccgcagcagcaacatttgtacggttcgtaa

SEQ ID NO: 169273 - DNA, 819 bp, Enterobacter cloacae; identical to SEQ ID NO: 168648

SEQ ID NO: 169274 - DNA, 297 bp, Enterobacter cloacae
gtgaaaatatacatcgccgggccaatgagcggcctacctgattttaaccgcgccgcttttaaccatgcgcattttcatctctggtcgaaaggccatattgttctgaatcctgcccgtctaccagatggattaactcaggcggagtatatggacatctgcctatcaatgcttcgctgtgctgatgctgttttcatgctgcgtggctgggaaaaatctgcaggcgcccgcgcggagaatgccctggccgagaagctggaaatggaaattatcttccaggaagaggatcgcgccgcatga

SEQ ID NO: 169275 - DNA, 495 bp, Enterobacter cloacae; identical to SEQ ID NO: 159316

SEQ ID NO: 169276 - DNA, 336 bp, Enterobacter cloacae
atgaacgatttcgctaagcgagttcagcgtcttgaggcggagcgcggtaagaccatcacaactgaggtggagcttgtctcttacgtcaaagagcgtagcactggaaactccgaggctcgttactacgttaagcacagcaaccagcagacagtgcttgagcagggaatggtgataaacagagatggttttggtaatcatcaagccagcatcatcatcactgatttccccgggcagaaaactccggaagaagcagcgctaaaactagctgattggcttaagcgccttggcgagtccattgaggctaatttcaaaaagccagaggtggatgatgcctaa

SEQ ID NO: 169277 - DNA, 192 bp, Enterobacter cloacae
atgtgttatcagataagccaatctatgcgcggcatatcgtcgaccaagtatctttatgtgaacatatccgtctggactaatactccctgctttgtcacctgcctttacccctccggttctgtctaccttccagaagaactggcctgtgtcgctgacataagaaaggaaatcatttacttcttctttggttag

SEQ ID NO: 169278 - DNA, 1101 bp, Enterobacter cloacae
atgtgcaatgttgacgatacagtttccgatactcaaaccccgctcgaactgagccaggatgtgcaggcgctcatcaaaaacggtttggaatttttggataaagcccgagaagaattggaagcatcagagactaagttctctgtcgtcagcttctggacggcagtggagattttactaaaagtaccacttgcacatgaacactggtcgttggtctgtagtccaaagaaaccaataaaaaagcaggactacttggctggtgattttcagtctttgacctatgaagaaacccgtaatcgacttaaggatgtacttgaaaaaccactggataaggaaacggatagtgcttttgataaggtcagaaagcaccgtaaccgcgttgttcatttctaccatccaacttttacggcagatgaacagcgccagatactcaaagaacaagcggatgcttggtttgctctgaacaggttattaagggaggagtggaaagtcatttttggagttcaacataattggaagcttgctattggtgagactcgtttgattagaggaaatgaattttatgctcaggtgcggctcaatcaggtcaaaccagaattagaatcactagcagaaaaagggataccagttggtacttgcaatgagtgtcatcagcattcgttagtaacaaatactaaaataaatggtaatgaaaaacgcaaactagaagttacacgatgtaaggtctgcactaatgttttacggcaaattaatctagcttgtcctgactgtggaaaagttcagttgcttcatgaaggggatgaagtttttgaatgcggagactgcaaatttactctgagtagatatgatttgctagatgaggaagtattccatagtgtggatgaacagcttctctctgcatttcctgctggatgtactaactgcatgaatcctgaaagtgtatgcaaatttggcgaaggctatctctgtactcgatgtttatcctattacaacgagattcagcaatgtaatagttgtatgcatttgagcgatagtgttcctgaatttagtcatgttcgtggttgtgaattttgtgatggtgaccagcgttattttgatgactga

SEQ ID NO: 169279 - DNA, 180 bp, Enterobacter cloacae
atgcgcgaagttaaccgaaggttcaaagaccacagagggatccccgttcgggttatccggtgggagccagagactcaacgagttatctacctgcgggatggttataactacgaatgtttcagcccgctcgaacaattcaagcgcaagtttacagagttaaaggacgaccatgagcactaa

SEQ ID NO: 169280 - DNA, 516 bp, Enterobacter cloacae
atgaaaataaatccgggtcttatcggcgttctcgttatagctggcctgtcagtcgccctcgttaagagctgctcagacgccagcagccttcagagcgaaaacgacgttctgcgaagtgacaactctttgcaggggcaggtgatcgcctcacaagcactcaacttcaatcggttcaatcaggttgccgaacatgccaacaggcttaactccctgatcgacaccagcactgaagaaaccgttatcgaataccgggagattctccgtcgtgaaaaaacctgtgatctgcctgttcctgctgacattgctggtgggctgctcgaatacgcgcaccgtttacgtgccagcgccttgcacaccgataccggcgaacctgacgcagccgatgatcgtaccgctgccgccaacacaataacgtactgccaggctgtgctctggattaaaccgctgctggccgttattgaaaagggtaacaataatttggagggcatcaggcagattgagaaggagcgtcaatga

SEQ ID NO: 169281 - DNA, 543 bp, Enterobacter cloacae
atggatgagaaagtgatggctatagccaccctcaatgctgctcgagatgcggctgactgggcgttttggtctatgataggaacttggtttgctggtgtagcaacctttttagcagttctaacttctctttatatagcttttagggataaaaagtcctttatcggggggaaggtaaggcttggacatatattttctgatgtcgacgataaatcagttgtagctatatcggtagttaatcgtactcttcatgcagttaaattgaaatcaattttctgggaagttaatggtgattatgaatttcagcagttatttagaaatccagcatctgatccgcttccaattcgcttggaacatggcgatgaagctcattatcgaataattcttaacgaagatgatgattggctaaaaagaattgctatgagaataagtaaggtgaattcatcacctgaaaggctacgttgcgttgttgcgctttctactggcgagagggtgcgtttaaaaatagataagcgtataaaaagtaagataaaacaattcatgtaa

SEQ ID NO: 169282 - DNA, 828 bp, Enterobacter cloacae
atgtccgttgatggtcgccgtgatgccgtttatctgcgtggccgtggcctgctgataatccgagaacgtctggttcaggctgttgatggatgccttgttcccgttgacgtcagtctgcaaactcagcagcgaacgggccgttgcctccctctcgttgacgatcacctcatcaatgcggtccagctgagcgctgttaccggcgacggatgcagacagcgttttgcgcgccgccacctgcgccaggttgccctgaataatcgcgatagcggagttcttcactcctcccgtcataccgtccacagacacgctgatgttatcgatgcgctggcccaaggcggtatcggccgtcgctactgtctgctcaagctcgttcagagaagaagacacatctccgaccgtgctcgacaggtttgtaacgctggtctgaaccttcccgatatcctgggcgtttttggcgatttcctgcgcctgttgcgccagttcgtcgttggcctgtttgatgtcgtcagccatgccagcaattttttcattgctgtctaccgcgttctcgatcaggtctttgaacgtatcggagcctttcatgtcctccagaatgtcgttggttatttcactgacatctatcgaggacgtgcccatgacccagtcggtccagtccccggcgttaccgatacggtcaatcaggcgcgcgcggtaccactggcgaacgccggcaggcatggggccatgctgataatctgcagctgggtacggcaccaggaccagcagttcaggattggcgtagtcggcagttgtggcgcgctgaatctctgtataggccgtgtcgcctga

SEQ ID NO: 169283 - DNA, 147 bp, Enterobacter cloacae
atgtccccgcaggaacagtatctcgcgcaaaattctttagcgattctgcgtgataaaaacgttcgcgctggcgaagatggggcccgcttggaaaacggaaaatatcctacgttaagcctgttttttatacagactgctatctactga

SEQ ID NO: 169284 - DNA, 426 bp, Enterobacter cloacae
atgttcggattctttaaaaagaaaaaacctgacgctgcgcccgggcagggttcccgactgacggcgcaacagtttatcgcgctgacgctgagtgatgaaaagctgtcaatgcctgtgtatctgccggggatccgcagtgaggccgaatgcgacgaactgggtttatggccactcatctacatctggaatgtggatcgtgccgctggcacgttcagcctttctgttaacggtaaagccatcgcccacctccttgagcctttcgtgccccgtgaagaccaagcgtatgtcgaaattcgtgatgaagcgatgaaggttatcgctgaggcttcaacgcagtccgtgctggcaaccatagagaaaacgggcctcatgcccgatattttgttcgcgtaccacgctgaggatgtacagcaggagcagggctaa

SEQ ID NO: 169285 - DNA, 630 bp, Enterobacter cloacae
atggctgcattactcaatgttgagcctgtccgcacaattcgattgtacggcgtgctaggtgccaccttcgggcgtgaatatcgtttatcagtagcttcaccaaaagaggccatccgcgccctgagcgttatcgtgccgggttttgagcgtttccttaacaccagcaaacaacggggtttaacttatgcggtattcagcgggaaacgaaacctcgtaaacgatgaactcagtatggacaggagcacagaggaaatccgtatcgcgccggtgatcatcggcagtaagcgagccgggttttttcagacaatcctcggggttgcccttgtcgctgttgctgcgttcgtcacgggaggggccgcgatcgggattggtgggactgcttttgctggtggatggggagctgtggcggggattggggcatcaatggcgatcggcggcgtagtccagatgctttctccacagactaccgggctagccagcaagcaatcagcagataaccgcgccagctatgcatttggtggcgtgacgaacacaacctctcagggaaaccctgtccccattctctatggtaaacggcgaatcggcggcgctgttgcctctgccgggatttacgtagaagatcagcaataa

SEQ ID NO: 169286 - DNA, 741 bp, Enterobacter cloacae
atgtcaattaaagaacataattctcaaagcctttttttaatggccgatcttcttcctgcatcaaacgaattacgagattgtttggtcgagataatgagtcagcaaggaaatatttcttattatgttgaagaagaaaaaatagctattgctcaaagtatttatgcagaacaatttcatggtgatgctgaagcatataatgctttggaagagatctggaaatctctgaaattagatgaggatattcattcggaatatttatttaatgtgctttatgccttggctgttggatggccaaattcaaaattaattcaagcttacgttcaaataactgagcagccgaaagtatttttacatattgctttaatactttgtggtgtgacgggagatttagaaagagcacaggaatgtattgatgcgataataaaggaggctttacatgtaaatcatcctttcctctctttatacatagaggcacttaacaaatggtcatatacagagtcagctgatattcttttgcaaaaattccttaaaggggagatgtcttcacatttcattactgccttgaaattacttacatctactgggcgtgcaagcgaagagtttcgcctaaatatggttggttattttaacaatcaatttaattccgatgcgataattaatgaaggtgtcgatatttttaatggggaagttgtttcagttatccagataattgtggatgaatgtatgctaatgaccctttaa

SEQ ID NO: 169287 - DNA, 780 bp, Enterobacter cloacae; identical to SEQ ID NO: 6153

SEQ ID NO: 169288 - DNA, 1023 bp, Enterobacter cloacae
atggtcacttttgagacagttatggaaattaaaatcctgcacaagcagggaatgagtagccgggcgattgccagagaactggggatctcccgcaataccgttaaacgttatttgcaggcaaaatctgagccgccaaaatatacgccgcgacctgctgttgcttcactcctggatgaataccgggattatattcgtcaacgcatcgccgatgctcatccttacaaaatcccggcaacggtaatcgctcgcgagatcagagaccagggatatcgtggcggaatgaccattctcagggcattcattcgttctctctcggttcctcaggagcaggagcctgccgttcggttcgaaactgaacccggacgacagatgcaggttgactggggcactatgcgtaatggtcgctcaccgcttcacgtgttcgttgctgttctcggatacagccgaatgctgtacatcgaattcactgacaatatgcgttatgacacgctggagacctgccatcgtaatgcgttccgcttctttggtggtgtgccgcgcgaagtgttgtatgacaatatgaaaactgtggttctgcaacgtgacgcatatcagaccggtcagcaccggttccatccttcgctgtggcagttcggcaaggagatgggcttctctccccgactgtgtcgccccttcagggcacagactaaagataaggtggaacggatggtgcagtacacccgtaacagtttttacatcccactaatgactcgcctgcgcccgatggggatcactgtcgatgttgaaacagccaaccgccacggtctgcgctggctgcacgatgtcgctaaccaacgaaagcatgaaacaatccaggcacgtccctgcgatcgctggctcgaagagcagcagtccatgctggcactgcctccggagaaaaaagagtatgacgtgcatcttgatgaaaatctggtgaacttcgacaaacaccccctgcatcatccactctccatctacgactcattctgcagaggagtggcgtga

SEQ ID NO: 169289 - DNA, 144 bp, Enterobacter cloacae; identical to SEQ ID NO: 97057

SEQ ID NO: 169290 - DNA, 492 bp, Enterobacter cloacae
atgcagtgctcacctccgggcacgctttcgcacatcacttacccaagtccaagcacgcaaaaatttctacatgaactttctaaaatcaaacttattgagaaaacctctaattttacacaaagtgtccaaaagcaagcagccatgatattggatgaacagttattggagcgatacatcccggctagcagacctgactggcttgcaggacggacagacgcgtgtccactatgggcgggtaagatcagatatactctcctggctttgaagcagataaatatatgtaacggaccatgccggggattagggatggaggcggaaaaatgtgcgtctgctaatgataaatatgaatcctcacgacgtggagactggaaaaataaagcggctgccattaatatcctagagaaggaaataattgattctattgatacagggccgcctaagaacgcctactactcatcatgggaatcactgcatcgaacaataagtgattag

SEQ ID NO: 169291 - DNA, 2265 bp, Enterobacter cloacae
atggggatccacgtcatcagtatttgcgccattctggccataattccgctctactggctacccgctttgccaggtttgcccactatctggatgatgattgccgcaggcgttgcgttggccgtgccgcagagaaaatggctaacgttttcaggcttagggttgctctttttttgctggggtatgctggcggcacacgagagcgtatggccgatgaaccatttaacaaaagggccgcagcaggcagaggtggtgataacggcaacggatggcgcaacgatgcaccaggggaaaattgtcagcctcaatggtaggcgtatctggggtgcaacgggagtggcgatgtatggtaactatctgccacagcgcgtctgcgtagggcagcgctgggcgatgaccctgcggctaagggcggtacacggtgaactcaacgacggcggctatgattcgcagaaaaatgcctttgcccggcaccagacgctgagcggacgatttacccatgcggagatcgttgacgagcgctgtagcctgcgtgcgcgctatctgggatcgctacaggctacactttcgccgtatcagtgggggcccgtgatcctggggctgggaatgggggagcgcctgtcggtatcactggagataaaaaatctgatgcgtgagacggggacgatgcaccttatggcaatctcgggactgcatattgccctggccgcctccgtggtctggttactggtgcggggcgttcagtttttcctgccgggccactggatccgctggccagcccccttgctggcaggactgtgctttgccgcgttttacgcgtggttaacgggcttacagccgccggcgctgcgcacggttgtggcacttacggttctggctgcgttacgaatgagtggtcgccagtggtcaccctggcaggtgtggcttgcctgcgtggcggcaatccttattttcgatccgctggcggtgctgtcgcagagcctcgcgttgtcggcatttgcggtagccgcgctgattttctggtatcagtggttgccactcccgcaaccgctgcgtgaccgccgcatgcggccgctggctacgcttttgtatcttcaggtcgggatgctgctgctgttgttaccgcttcaggtactcattttccatggcttcagcctgtcctcgctggtggcgaatctgtttgcggttccgctggtcacctttatctctgttccgctaatcctgctcggtatgctgctgcatctcttgccgatggccgggctggaaaatgtcgtgtggctggcagcggataagtctctggcagggcttttctggctgctgaagcgcctaccggatggctggcaggacgttgatgaacgctggcagtacctcacgttgctgccatggcttgcgatagttggctggcgattccgcgcctggcgaacagcgcctgcgctatgtctggcaggcggtatcgtgctttcctttccgctctggcacagggcaaaaaccgacggctggacgctgcatatgctcgacgtggggcaggggctggcaatggtcgttgagcgtaacgggaaggccattctgtatgataccggtccggcatggcccggtggcgacagcgcgcagcagctgattatcccctggctacgctggcatcatctgaggccggaaggggttatcctgagccatgagcacctcgatcacgcgggagggctggcatcgctacgaacggcctggcctgccatgtgggtcaggagtcccttgccctgggccgggcatcttccctgttttcgcgggcagcgatggcagtggcagggattatccttcaccgtgcactggccgccgcaaaacaccgccgctaaaggcaacaaccgctcctgcgtggtaaaaattgatgacggggagcagagtgttttactgaccggcgatattgaagcgcaggcggaactggcgatgctgagccaccgctggcgtcagcttgcgtctacactgattcaggtgccgcatcacggcagcaacacctcgtcctcagcgccgctggttcagcgcgtggagggggcgatttcgctggcctccatggcccgctataacgcgtggcgtttcccgtcggtgaaggtgcttcggcgctatcgaaaggagggttatctctggctggataccccgcagtccgggcaaatatccgtgacgttttcgcaccacggcaggcaaattcgccgcttacgcgagcacaatttaccgcgttggtatcatcagtggtttggcgcgcccgtagataacgggtag

SEQ ID NO: 169292 - DNA, 663 bp, Enterobacter cloacae
atgaaaaccggcattgcctggaccgcgatcgcgttaatcatgccggtttgcgttttcgcgaccagcctgagactttcagccgatattgacctgctggttctggacgggaaaaaagtttccagctcgctcctgcgcggcgcggacagtatcgagctggataacgggccgcatcaggtggtattgcgggtggaaaagacaatccgcctcgccgacggtgaacagcaggtgtacatttcgcctccgctggttgtcagctttaatacccggcgcatcagccaggttaattttcgtcttcctcgccttgagacaaaaaaagagtctctggcattcgatgcctcgccgcgcgttgagctggtggatgggaacgcagtgccgatcccggtgcagttggatattctcgcgctgacaaaaaggccaaagggaacagactatgaagcggatacagggatctacaacagagccagcaggcgcgcctccctgccccagtttgccgcggtgatggcggatgacagcgccctgctttcgggcgtttcagagctggatgagcttccccctcagtcgcagacgcttaccgagcagcggctcaggttctggttccagaatgccgatccggacacgcgcgcccgttttctgaaatgggcgaaacgacagccgtcgtcatga

SEQ ID NO: 169293 - DNA, 528 bp, Enterobacter cloacae
atgagtattttatttatcagcgataactattatctgtgtagcggggttttaagcgctcagacaaccgtccatttcattcgcgacgacgaggatattcacgaccttatcggagtcgatcctgaactgaattttatcattgcgatagaacaagataacctacgtaacggggtcatcaggcaggtcaaaaaaattaagaatagttatatcgtcctgatgcatgagatagaaatgaacagggccgtgaaaatagataatattatctattcgtcaatgcattttaatattcgcccttttcagcagctgatgcgtttttacagagcgctcagaataaacgcatttacgcggcgagaatatgacgtgctgaagcttttccatctggaaaatcatgaaattgccaaaaggcttaaactctcccaaaaaacaaccagcacctaccgcgtgaagatcctggaaaaattaaacatgcgctcaagaaacattctggcgatgtcccgcatgaaatcggcgattgtcgatcagaaactgtga

SEQ ID NO: 169294 - DNA, 936 bp, Enterobacter cloacae
atgttgaacgttatcgttgacgggctgtggcgcgaggggaataaaagcctcgccgtcaggctggtggctgaaaacggcgaagcgctgccagcgtggcagcccggcgcgcacgttgatgtgcatctgccctgcggcgtggttcgccagtactccctgaccggagcatgtgaaaacgcgagctatcttatctgcgtgggccgggaaaccgcctcgcgcggcgggtcgcgctatgtacacgagacgctgcgcccggggcagacgttagcgatctccgccccgcgcaatctgtttccgcttactcaggcagagcgggttgtgctgctggcagcggggataggcattacgccgctgtatgcgatggccctgcatcttaacgctgccggaacgccgtttacgctgcactattacgtcaggaaccgggaaagcgcggcgtttgcgcgcgaactttcgcggttgggtgagtgcactattcataccgtcagccctcgctccgcgctggccggtcatctgccgctgcccgcgccggggttacacgcctgggtttgcggaccgtcaggctttatggcgaaagtgcgcgaggtcgcgcggtcgaaaggctggcctgacgaggcggtgcacagcgaggcgtttcagcccccggcaccgcttataagcggtgaggcgggcgagatcttcacggtcaaactggcctccaccggcgagcgctggccggtgcccgcggacaagaccatcgcccaggtgctgcaggcgaacggcgtagacgtaccgctgtcatgcgaaatggggatctgcggagcgtgcctgacgccggtgatcgacggggtggtagaccaccgggataccgtgcagtcagaggcggaaaaaagcgcgcctggccagcaggtggctctctgctgttcgcgaagccattcaggggagctggtgattgcgctgtaa

SEQ ID NO: 169295 - DNA, 492 bp, Enterobacter cloacae
atgatcgcactacaggactttaatcatttgccttacgaagaggcgctggcgcggatctctgcgtgcgtggcgttgcctgcctgggccgacgcgctggttcgcggacggccctattccagccagcaagcgttgttcagcgcggcgcaggcgctggcgcaaaagtgggatgaagcggccctggctcaggccctgagcgcgcacccgcgcatcggcgaaaccccatcgggaacggggccggaggccgcgctgtcgcgccaggagcagggggcggttgagcagcatcatgccgacgccctgcgggacggaaatgcccgctacgaagcccgcttcggacgcgtctttctgatccgtgcgaaagggcgaaccagcggggaaatagtagaagccctgcgcgcgcggcttgaaaacagcgaggcgcaggaactggagattgcgctcgaacagctgcgggaaattaccttactacgactggaaggagcgattggcgaatga

SEQ ID NO: 169296 - DNA, 324 bp, Enterobacter cloacae
atgagcacgctcagcacgcatatactcgatatttcaacaggcaagcccgcagagggcgtagcggtgcatcttgaacgggaaggggagcggctggcgaccgcggtcactaacgcccagggacgcattgccgcatttgttgccgatctgcctgctggccgttaccgactggtggccgacatcggtgaatggtttaccggcaccggccgcagcacgctctatccctgcgcgcaaattgattttgtgacgggggaggcagcagacgagcacttccatctgccgttcgtgattgcgcccggcggatggtcaacctaccggggcagctga

SEQ ID NO: 169297 - DNA, 1584 bp, Enterobacter cloacae
atgcaaagtaacgtctccacgcgcggcatggccgtcgcgccccaccatcttgccagccagagcgccctgggcgtgctgcgcgagggcggcagcgcaatagaggcaatggtggccgccgccgcgaccgttgccgtggtgtatccgcacatgaacgggctgggcggcgatggcttctggcttatcgttccaccgcagggcgaaccgatcgccgttgacgccagcggcgcggcggggtcgctggcaacgcttgccgcctacgacggattgccacacatcccccaccgcggcccgcgggcggcgctgaccgtcgccggcacggtgagcggctgggacgaggcgctgaagatctcgcaggagatgaccggcagggcgctgccgctggccggcctgctggccgacgccattgactacgcgcagaacggtacgccggtcaccgcgtcgcaggcccacgccacggccagtaaatacgacgagcttcacgacgtccccggcttcgcggagacctggctggtaaacggcaaaccgccgcaggccggaagccgcttctgccaacccgccctggccttaaccctgaagcgcctggtggaggacggtctcgacagcttttatcgcggcccgctggcggacattctggcgcgcgggatggcaacgctcggcatgcccgtcacgcgggacgatctggccgcgcacgtggcccggcgaaccgcgccgctgaaactgcagcaccggctgggagagatatttaatctcgccccgccgacgcaggggctggtctcgctggcgatcctcggcattacggaccggttagcgatggccgatgccgacgacgcgatgaccattcaccgcatcgcggaagcgaccaagctggccttcggcctgcgcgatgcgcacatcaccgacccgcgcgagatgcaaaccgacgttcaaagccttctgactcccgccgccctccaggagcttgccgacagggttgacgacgcccgcgcggcgccgtggggcaacgggaaaggcccaggggataccgtgtggatgggggtgatggacgagagcggccttgccgtgtcgtttattcagagcatttatcacgagttcggcagcggcgtggtgctgcccgacaccggcatcgtctggcagaaccggggggcgtccttcagcctcaacccggaacacctgctggcgctcgcgccgggcaaacagcccttccatacccttaacccggcagcggcgcgccttagcgacggacgcgtgatggtttacggctcgatgggcggcgacggacagccgcaaacccaggcgacaatttttacccgctatgccgtacagggcgtgccgctgcaggagtcggtaaaccgtcctcgctggctgctgggccgcacctgggggcaaacttccgacagcctgaagcttgaagggcgattcacacccgagacggtcacccacctgcaggcgctggggcatgaagtggaaatgttcccggactttagcgaagccatgggccacgccggggcgattgtgcgccaccctgacggcctgttcgaaggcgcatttgacccgcgcagcaacggcaccgccgccggattctga

SEQ ID NO: 169298 - DNA, 657 bp, Enterobacter cloacae
ttgggggtggtggaagccattaacggcgcgcgtcgtctgaactgccgctttaccggcgaggccggacacgccggcaccgtgccgatgacgcaccgtaaggatgcgctggccgccgccgccgagtggacaggggtgattgaaaaaaccacccacagccacggtggcaatctggtggcaacggtcgggacgctgcgctgcctgccgggagcggtgaacgtgatccccggtgaggttgaactctcgctggatattcgcggtccgcaggatgcgccgcttgacgcgctgcttactgaactgctggcgcaggcgcgcgcgatagccgcacgtcgcggtctggacttcggcgccgaggagttttaccgcatcgccgccacgccgtgcgacgcggggctacaaaccgcgttggggagggccgtcgaatcggtgcaggggcgctcgttatcccttcccagcggcgcagggcatgacgcgatagcgctggcggagcgctggccggtgggcatgctgttcgtgcgctgcaggggcggcgtcagccaccatccggcagagtcggtgatggctgaggatgtcgcgctggcaatcgaggcgtttgcgctggcggtggggcaactggcgaaccgcgttactccagccccagcgtatactgcgcgatcttaa

SEQ ID NO: 169299 - DNA, 525 bp, Enterobacter cloacae
atggttgacgaggagagtaaaatggcatggctggacacactgcttattcattttgcgcactatccggcgcagctgttcgcgctgctcgtcgtgatggcgttgagtaaatcaacggtgctgatctcctcggtgctgccgcccgcgtcggtgatgctgctggcggggatagccgttagccagtcgagcctgccccccgggctggcgtggcttgccgtggtgatgggggccaccgcgggatcggtgctgaattaccatatcggccagctgatggggcatacgcccttggtcgcgcgctttaccgccaggcatgccgataaatttctgcgcgtgcagcaccggttacggaaaaacggcgtgctggtgctctttacgtcgcgctttctggcggtgctgcgctatatcgtaccgctggcggcgggcatgctgagaatgagcgcggtgaaggtttacaccgtcagcctgctttctgcctgcgtgtgggcggcgctgtatgtcggcgtggtgaccggcatcagcgccttttga

SEQ ID NO: 169300 - DNA, 525 bp, Enterobacter cloacae
gtggtggtcaatctcacgatcgaaatgctgtcagagggaaccgattataatttcgaggatttcgattgtggtgaaccctcgctcaacacctttcttaaagaacatctggtgcgtcagcataacggacgtattttacgaggctacctgcttaaagaacgccaccgtccacacgtcctgggctattacacgttatccggaagctgctttgaaaaaacgatgcttccgtccagcactcagcagcgtcgcatcccttacagcaacgtacctagcgtgacgctgggacgtctcgccatacataaagcactccagggaaacgagtggggaacaacccttgttgcacacgctatgcgagtggtgtatctggcatcgcaggccgtgggtgtacacggaatatttgtggatgccctgaatgaacaggcgcaaaggttttatctgaagcagggttttatcccgctgaagggagaaaacagcaacgctctgttctttcccacaaaatctatcgaacgattatttgagcaagaatga

SEQ ID NO: 169301 - DNA, 801 bp, Enterobacter cloacae
atgaagctgaccctttcaccgccgccctttgagggcgcacccgtggtggtgctgattgccgggctcggcggctgcggaagctactggctgccccagctcgccgcgctggagcaggagtatcaggtggtgtgctacgaccagcggggcacggggaataacccggctaccctgccggaagggtataccctcgcgcagatggctgacgagctggcgcaggcgctggccgccgccggtatcacccgctactgcgcggtcggccacgcgctgggggcgctggtcggcatgcagctggcgctcgacaggcctgatgcgctcatcgcgctggtttgcgtcaacggctggctcgccctccatgaccatacccgccgctgctttagcgttcgcgaacgtctgctgcaggcgggcggcgcgcgggcgtgggtcgaggcgcagccgctgtttctctatcccgcaggctggatggccgcccacgccccgcgcctggaggccgaagaggcgctggcgctggcccattttcagggcgaagccaacctgttgcgcaggcttaacgcgctgaaacaggccgacttcagccgccacgccgcacgcgttcgctgcccggtgcagattatctgctccaccgacgatctgctggtgccgtccgtctgctcagctgaactgcgcgccgccctaccgcacgcccacaaaacggccatgcgtcagggcgggcacgcctgcaacgtcaccgagccggacgcctttaacaccctgctgatgaacgggcttgccagcctgctgcacagcccagaacccgctttataa

SEQ ID NO: 169302 - DNA, 333 bp, Enterobacter cloacae
atgagcacactcattctcctggccgcgctttcaggcccgataacgttcaatacctcacggcaggacgaaacgatcgccattattccgcgggtcacgctggtggacgcctgccgctgccgggtcgacgttttatccgtacgccagggaccggctgggaaaagtatctcccggcagaaaaataccctttttatccccgctaatcagccgattgatttaacccgtatacgtttaaatatgggttcaggggatgcggtaaaaataattgtcaccgttaccgatggaaaatcgcttcatttatcccagcagtggactgcgccgatgagtacgctttaa

SEQ ID NO: 169303 - DNA, 324 bp, Enterobacter cloacae
atgatcaaatccgcagcgtgtattatttccggtatgggactgatcctgtccgcctttttttctccggcgtattcagccacgattgaaaagggcgggattattcattttcgcggcgcgattgtggccgatccgtgcgacgtcactcctcagcagcatcggcagctttccatttcctgcccggataataaccatatcaacacgcaaaccatcagctatgacgaggctttaagcggccatcagtctcggtcaaatctggccgccgtcaccatgaaatacctgaatgaacagaaaacgctcgcggtcgttcaggtggactaccgttaa

SEQ ID NO: 169304 - DNA, 954 bp, Enterobacter cloacae
atgcgtattagcacccaaatgatgtacgaacagaacatgcgtggcatcaccgattcccagagccgctggttaggctttggcgagcagatgtccaccggtaagcgcgtaaaccgtccgtctgacgacccgattgcggcatcccaggcggtggtactttctcaggcgcagtcccagaatagccagtttgccctggcgcgcacctttgccacgcagaaagtgtccctcgaagagagcgttctcggccaggttaatagcgcgattcagtcggcgcaggagaaaatcgtgtacgccggcaacggttcattaagcgatagcgaccgtgcatcgctggcgaacgatttgcagggtattcgcgatcagctgatgaacctggcaaacagcactgacggtaacggccgctatatctttgccggatacaaaacggataaagcgccgttcgatcaggctaacggcgattacagcggtggcgatatcgggatttctcagcaggttgattccgctcgcacgatgcagatcggccataccggcactgaagtctttgacacctttaccagtaatgccaagccggaacccgcaggcagcacgcaggaaacgaacctgttcaaaattctcgatacggcgattgccgcgctgaaagacccaatcgagggtgatgctgcaaaagccgaggccctgacgcaaagtattgataaagctaaccgcggcctcagcaactcgctagacaacatactgacggtgcgcgctgacctgggtaccaaactgaacgagctggacaagctggatgcgctgggtgacgagcgcgcgctggggcagactcagcagatgagcgacctggttgacgtggactggaacgctgcgatttcctcctacaccatgcagcaggcggcgctgcaggcctcgtataaggcctttagcgatatgcagggtatgtctttgttccagcttaacagataa

SEQ ID NO: 169305 - DNA, 810 bp, Enterobacter cloacae
atgtttttaatcaatggccttgagcaagaaacgctgccggcaggcgacagggcgatccagtttggcgacggctgttttaccacggcgcgtattctcgacggggaagtgtgcctgcgtgatgcccatatccgccgcttacaaaaggcctgcgagacattactgatccccttcacgcagtgggacacccttgaaggtgaaatgcgtcggctggcgtcaggtaaaagatgcggcgtagtaaaagtgattatcagccgcggcagcggtgggcgggggtatagcggcgctgcctgtcagcatccaacgcggatcctttccgtttcagattacccttcccattatgaacgctggcgcgaagagggcgttaccctgacgcttagcccggttcggctggggcggaacccgatgcttgccggaataaaacaccttaaccgccttgaacaggtgcttattcgtactcatcttgaacagacggatgccggcgaggcgctggttcttgacagcgaagggtacattacggaatgctgtgcggctaatttactctggcggaagggcggtgacgtattcacgccttcgctggaacaggccggggtcaacggcattatgcgtcagttttgtttgcagcagctggcacgtgccggttttagcgttgtcgaagtaagcgtaaaggaagacgcgctgcagtccgccgatgaagtcgttatctgcaatgcgctgatgcccgttgtccccgttcgcgcttatggcccgctttcatggtcatcccgcgagctgttccagtttctggccccgttatgtgagcaaaccaggtag

SEQ ID NO: 169306 - DNA, 342 bp, Enterobacter cloacae
atgagccatcaaagaattcccagccactggacgatcaaacgttccactcccttttttacaaaggaaaatgttccagctgctcttctcagccatcacaataccgctgccggagtctttggtcagctttgcgttatggaaggaacagtgacctactatggctttgcgaatgaagaggcgacagagccggaagtgaaagtggtaataaacgctggcagcttcgcaaccagcccaccacagtactggcatcgcattgagatgaccgatgatgctcagtttaatatcaacttctgggctgaaccttccttcgctggtgaagaagtttacagcgctaaaaaagcatag

SEQ ID NO: 169307 - DNA, 168 bp, Enterobacter cloacae
atgatgaaattcttctttcagttttcaaagcgggtcgactacggcgaacaggaactttgcgcagagctgtcgctgttacagaggggtgattatcaggagtatctgtctcaggaggcaccgttttacccgctcccgaatgaggatgtaacgagtgaacccgcccgttga

SEQ ID NO: 169308 - DNA, 1092 bp, Enterobacter cloacae
gtgatcaaatggcttaggaaagcaaacagatcaaaaaattattatctgaaaaggacgaaattaaagcttaagcttagcctcttaagtgaaattactgctcgcgctcgctctaaaaatatcggtcatgatttaggcacagatcatttagtaatccctttcatcgctaagggtatcggagatgcggttgttatcgggggagtgattgatactctggtgaaaaacgatttccaggtctctgttattgctgataaaaaaacgcattttttatttaaggaatggacgacattagcaggtttgtatttatatgaacctcataataaaaaacctttgcttaatgaactgaagaaaatagggcccttcgcgttcattgactcgcatgagattactcattcaaatattgatacattcaatttaattagacttaccaagccttttagaacagtcggctttacggaaaagtatcgaatttatgatgaagtcatcaatattaaacatcctcagtcacacataagcaccaggtatgtagatttacttgaacgcttaggtatctcggtaacagattatgattattctgtaatcattcctgaaaaagatgctgcagccgcccggaaattcatgcaaaaaaccaccgataaaaagataatttcctttattccttacggtagcgttagtgaacgttttttctccgacttacaaattgaagctataacgaaccatatttcaaaatacagtcattcatatcacacgatcatcatcggtgaacaacacaaaattgccactatccctgattcagagaatgttacaaaaaacacagttccatcattcttttcagctgcacagataattaaagatagcgagcttatcatttcgccagatacatcatttgtacatgtctcaagagcttttaacaaaaaaattatatgcgtctaccccttcaagattatcggcgaatctgctgataacgccgatgtttgggggccaaattataaatcagcaatacagcttagattgaaagaacgccgcgttatggatgccgatgttcgacctatactaaatatgatagatgaacaattgaaagatataacaaattaa

SEQ ID NO: 169309 - DNA, 246 bp, Enterobacter cloacae
atgaccaacgatatcccgctcaggttttacgacattgtcgatgaatatgccacagaatctgcgaagccggtggatgaggcggaacgcacgccgctggcacgctatttccagatgctgctcacccgtctgtacaataatgaagagattgatgaagaggcgcagcatgagatggcggcccaggcggctattgatgaagaacgtattgacgatatcgccaggttcctgaatcagtggggtaatgagtaa

SEQ ID NO: 169310 - DNA, 1500 bp, Enterobacter cloacae
atgaagaagatcattaccgttgctatcatctcaacattactggtcatcctgtccctgtatgctgttaacgccatcatcgttgagcagcaaaagaaccggcagctggacgtttcccggacgcttttgcactattccgaagacctgacgcaaaatattaccagcaccctcaaaaatacctccgcccagggatgcgataacgcaagcctggacatataccgaaaattaaaaatccagagcccccatatcgccgacgtggggtttatcgaaaaaggtaaaatcgtctgcactgcgttctggggcaggctggcaaaccccgtagccctgccctccgagcttcataacaccttaaacggattcagcctcgcgcaattttcgcagaaagggttctttacgggcaacgcgaccatttttaatcatcttattattttcacctcacgttcggcttacgacaaatttactcccgttacggcgaactactcgcttcgcacttccacccgggatttcgacagaacctttttcaccgtcacgccgtccagtgacgaacagagccagataacgtccccgttatttacgcagtccgttacgcaatgcagcaggcaatgggatttgtgcgttaccgtcacccactacgacgccgggctggcctcgctgtcgggcatcgtcatggtgctgctttgcctgtttttatattttatctgggtcgccctgacgctgttttcgtttcgaatttacgaagaccgcctttcgctggagcgcacgctggtcaaggcggtgaaagcgaacacgataagcgtgcattttcagcccattatccgggttagcgataaaaaaattgtcggcgtagaggttctgtcgagatggcgggataacaatcataaagacgtctcccctgagctatttattccgttaatcaaaaagattgggctgtatccctattactacaccaacatgattaaaaaatcgctggcagaaattgccccgctggccaatgaatatcagctgatggtttcagtgaacgttggcagaacggaaattgaagacggcaaattcctggctgttttacgtcgcgaatgtttgctgaacaacatgccgttatcgctgataaaggttgagttatccgagaatggggtctctacgtcggcgatccttgaggaattttgtgaagaactcaagtcagcgggggtgaagatctctatcgacgattttggcgtgcaaaactctaatcttgccaggctgacgaacctgaagtatgacgagatcaaggtcgataagtcgctagtggatggcatcaacgaagattacaaacaggatatcctggcgatctttagcgatgcgctcgctaaactgcaaaaaacccttgtttttgaaggggttgagagcgaaacgcaatatcaatttatcgtccagagatatcccgatgccctgatacaagggtggtatttttcaaaatcgctgccgcggcaggatctggcccgcctgctggcaaacccggcgcgatag

SEQ ID NO: 169311 - DNA, 345 bp, Enterobacter cloacae
gtgattcagtgtaagcgcgtgtatgagcaaccgcattcagaagatggttaccgtatcctggtagacaggctctggccgaggggaataaaaaagaccgacctcgcgtatgatgagtggtgcaaatccctgacgccgtccggcgaactgcgaaaagccctccacggtgaagctatcgatttcaccgcgttcagcgaagcgtaccggaaagagctggcgcagcatgtggacgaaggaaaacgcgtcgcagccatcgcccgccagcagacggtaacgctactctatggcgcaaaagatacgcagcagaatcacgcccttgtgctggcggactggctgcgcagcctgtaa

SEQ ID NO: 169312 - DNA, 966 bp, Enterobacter cloacae
atggagaatttactggcgctgaccctggcagcagagacgccggaactacaagagggggaaggcccctcgttccactggcgatggctggggccgggcgtgcttgagctgacgccgacaggggagtatgacctgtcgctgctgctttctgccggcattcacggaaacgaaacggcacccgtggagattgtcgatattgtgctgcgcgcgctgttcggcggggcgttcgcgctgcgctgtcgtctgctggtggtgctggggaatccgcccgcgctggcgcaaaaccagcgctatctcgcaagcgacctcaaccgcatgtttggtggccgctgggcacagttcccggtgagtgatgaaacggcgcgcgcccggtggctggaggctaccgttgccgcgttttttgccgacgcggggacagcgcgctggcacctcgatctgcataccgccatccgcgcctcgtaccacgtacgttttggcgtgttgccgcagcgtcaccagccgtgggatgaagcgtttctggcctggcttggcgacgcggggctagaggcgctggtctttcaccaggcgccgggcggcaccttcacccacttcacctgcgagaatttcggcgcgctgtcctgcacgctggagctgggaaaagcgctgccgttcgggcataacgacctgacgcgctttgcccctacgcagcatgcgctttcggcgttgctgggaggtgagatgcagacacgcgcgcaggggcacgtggcgcgctatcgggtggtgcagcagatcacgcgccgcagcgatgctttccgtctgcatatggcggcccatacgctgaactttacgccgttccggcagggcgtcctgctggcggaagatggagatgaacgctatgtggtacagctatccacggaatatgtgttattccccaatccgtcggtcgcgtttggtctgcgagccgggctgatgctggaaaaaatggcctga

SEQ ID NO: 169313 - DNA, 327 bp, Enterobacter cloacae
atgacaaagacctttacgcctgagcaaattgacattatcaatcgtattgtcttcgaccatatcgataaaatgagtgaggaagtaactaacattattgaaaaaacagagaaagacgcacaccgggaactgtcggatcgcggcattgaaatggctgatttttatcctgccaatcagccgtttttaatgatgacactcgtacaaaaactgatagaccgggtgcacggtggcaataaggatcttgctcaaaaaataataacgatggaagcgaaaaggcttaacgtcagcgtaagcgtcgatgccgataaatcaggcgtatcggggagctaa

SEQ ID NO: 169314 - DNA, 678 bp, Enterobacter cloacae
atgcattttctgagtaaaactgtcgttgcctgcgtatttctttctgtcggtatttcagaggtaaatgctggcgtgataattggagggacgcgtgtcgtttatgatggcaataaaaaggaatcttctgttagcgtcactaacccggactcatcgccttatttaattcagtcgtgggtggaatcgcaaaatgggagcgctgagaaaacgccttttattattacgccaccgctgtatcggcttgataaagggcagcaaaacgtggagcgtatcgtattagcgggttcagttgctcaggataaagagtcactttactggctaaacatcaaatctattcctgctgcgtcgcgaaaaaataacgcgctgcaaatagcggtgaaaacacgcattaagctgatttaccgtccagctgcgctgaaaggggtcattccagatgagctcgcagataatttaacctggcggcgtagcgggagtcagattcaggtaattaacccgacgaaggtagtcatgaatttcaatgaaatcagcatcaatggtaaaaagcttgaggacgtaacctatgtgcttccaggggctagcgcgcgatttgatttgccgaaaggtattaccggtgaaacggtaaccttcaaaattataaacgattacggtggtgtcggaaaggtacataacgccagcctttga

SEQ ID NO: 169315 - DNA, 1524 bp, Enterobacter cloacae
gtgaataagcttaataagcgggcagttttatttaaactggcatcccttgcttgtttaatcgctactgcgcttgcttcagctacttatgcaaatgaatattttaacccagagttgatagagcttgataatccaggcatgaagggtgctgacctctctgcgtttgaggccggctcccagctgcccggcacgtatcggattgatgttcttatcggcgggcagattgtcgatacgcgtgatatcaaattcgacgcggtaaaaaatgcagaaggcgagacgattttgcagccctgcctgagcgtggcactgctcaacagctggggaattaaaaccggactatttcccgatctggcttcggggggggaatgtgcaaagctatcggcgatccctcaggcttccaccgagctcgttttcagtgcacagcagctggcgatcggcattccacaggcggcgctgtcagcgcaggcacgcggatacgtgccgccagaaatgtgggatgaagggatcgccgctgcgctgcttaactacagcctaagcggctcgaataactggggacatggcagcaacgctaacagcctgtacgccaacctgcgttccggaattaacgtcggtccatggcggatccgcaattatgccacctggatccgcgatagcaacggaaaccgaaaatgggacaatgtctacgtctacgctcagcgggcgatcgttccactaaaagcgcagctcacaacaggggacggtgcctctcaggcggacgtttacgacagtattccctttcgcggcgtgcagcttgcctctgacgacgacatgatgccggactcattgaaaggctatgccccagtggtgcgcggtattgcgcgtaccaatgcacaggtgatcattcaccaaaatggctatcagatttaccagagcgacgtggctcccggggccttcgaaattactgacatctatccaactggaagtgcgggcgatctcgatgtcaccgtgaaagagagtgacggcagcgagcagcgcttcagcgtggcctttgcttcattgccggtactacagcgagaggggcgcttcaagtttgctataaccggaggccagtaccgctcctctaacaacgatgcagatcaaaccctgttcagccagttgacggggatttacggcttgccgtatggcctgaccctgtacggcggtttccaggaggcgagtaaatatcattctctggctgccggtatgggtaaaaacctgggcgactttggtgccttctcaacggatgtaacccaggcgtggtcaacattacagaacatgcagagaaacagcgggcagtcctggcgtattcgctacagcaagaactttgtcgggacgggaacccatttcgccattgctggctaccgctattcaaccagcggctactacggcatgcaggaagtcctggataactatagtgacaatagcgcattacagaatcgccgtcgcaaccgcgctgagctgacgatgagccagaatattggtcagagcctggggggcgcttacgcttag

SEQ ID NO: 169316 - DNA, 1026 bp, Enterobacter cloacae
ttggtcagagcctggggggcgcttacgcttagcgccgtacgtgaagattactggaattcagataaaaccattgcgtcttacggcgccgggtataacaacgcctggcagagcgtgaactacggaatcacctatacctttagtaaaaatggcagtaccgacagctacagtcgtacaacccgctacggcaaagatcggcagattgcattgagcgtaagcatcccattagaggctttactgccgcgtacgtgggttaactacagcataaacgccagcaagaacaacggcactacgcacagcgttggactgaacggcactgcgcttgagaacaatgctctcagctggaacgtgcagcaaggccatggaaccgatgccgtgggctataccggaaacgccagcgttgatttcaaaggcacctatggtgaggcctatgctggctacggttatgacaagggtagcgatcgtctgaactatggattacagggtggaataattgcccacgccgacggggttaccttctcgcaaccgctgggtgagaccagtgtgctggtaaaagcacccggggcggtaggggtgagtatccagaatcagagcggggcaaaaaccgactggcgggggtacacagcagtgagcaacctgacgccgtaccgtaagaacgacgtggcgctgaggaccgatacgctcccggatgacgtggagctggagctgaccaataagacagtgataccgacccgtggtgcggtggtaagagcggattatgtagcaaaagtgggtatgcgggtgttaatgacgcttcatcaccgcggtggagagcctgtaccgtttggcgctatcgcgactgccgcaaatagcgagagcagttttatcgtaggggataaagggcaggtttatttgactggattgagcccaaacggaacgttgttggttaaatggggtaatgaagagtcagagcaatgtcgggtcaactacagaatcaatgaaaaagataaatttaccgctatttctgtcgttgcttttaattgtagctga

SEQ ID NO: 169317 - DNA, 960 bp, Enterobacter cloacae
atgtgttatcaaaataaacataggctgcgttggcgatttattccttcattcttatggttatgttctgtgcctgttgaagcagactgtaactatcagggagagggatttgaaccagcgcaaccgtttaacatacagcagcccgcggtatacgttcaacgtgacgcgccagcaggaaccgtgataagtagttttattaccaatgggacgggtgatatcgattattgtacaggcacggggacgataacgtatgagatgattaagtttagtaatccttcggcaatacctaactattataatacgaatgtccccggcgttgggattagcttgaggtttacgtctgcaggttggtatttttcaaaaatcagacagtattcagtattatcaccgacaatcacggttgttgctccgctggaagtcactttaataaagacgggcgaaatcacctcaggcgcgatcggttctggattactggcaaaggcatatggagatgatggaattcaatcgttaacggtcaactttacaggtaatcaggtgactcaactagcgtgttcaatcacaacgcctgatttaagttttcctttaggcgatatttcagcagcgaattttggaagtacggtaggtacagttccatctggcgcgcaaaatacgcagaatttaggccttgattgcgacaccaacgctaatatcaacgtcatgttacagggcgcgcaaaaccctgacgcaggtgccagaagcgtattagccttgactggacaggggaatgtggatgtggcgaaaggtgtcggcgtgcaattattatacaatggggccccgctagagttaaacagccgaattgttctgaaacgatctgctggtggtcaggaaacctttcctgtaaccgcacgttattatcagactcagcctactgttactaccggtaaagctaacgcatcagcaacccttgatttaacgtaccagtaa

SEQ ID NO: 169318 - DNA, 513 bp, Enterobacter cloacae
atgaatatactgcgcacggttgcgcacgccgccgtcttaattagctgtagcgtatttgcaggggagagcgttaacgtcagcgttaccggaaatatcgttgcctccccgtgtatctttaatgaaggaaataacagtctggatattaatctgggcaatatccaggcaaccaacctggcgatgccgggctcagcctcggatccggtgccgttcagcctccgcttcacccggtgcccgccgggaacgcgcggcgtgacggtctcgtttaccggcacccccgatcccatggcgggcgcggattacttcaggaacagcggttcggccaccggcgtggcgattgccatgcgtgacgccgaaaccggtacgctgaagggaacaggctccgctatgagccaaaccgttgccgcagacggaaccgcgaccctgcccatgcaggcctcggtggtgtccgtggtcggtggcgtcacgccgggaagcatcagtgcagtggttgtcatgacgatgcagtacaactga

SEQ ID NO: 169319 - DNA, 642 bp, Enterobacter cloacae
atgttaacgattctgattcaggaaaccgatctgtttttccaggcggggctacggtattttttcgaagatttttttgcgcataactttcatcatcgtatccgctttagcctcgacctgactcatgacaacgtcagccaggccgatatcatcgtcctttcattatgccagggtgagacgctgacctgttttccagagctgctgtcccggcaaaaggggattgtgattgggatggtcgacgatgagctgcgatttaccgcgttgccctcctgctttcaggacatcattttcattccccgccgggcatcgctcgatcgtatttgcggcgctctgtttatcgcctggttcaggacgcagttaccggactacgcctggagtaaaaaatcctgctttgagtgcaggcataaggatttatcccggcagcagattcgtattatggtgaatttttaccgggggctttcggttgtgcaaaccgcaagcgcgctaaagatgagcgacaaaacggtctttacccacaaatatatgatgatgcagaagtttaacctgcgaagtgatttcgggctggtggtattgctgagacggatgatggagaaaaagagccgtccgaacctgcttcgtgattatctggaaaataatcgggcctga

SEQ ID NO: 169320 - DNA, 519 bp, Enterobacter cloacae
atgctaacgaccatcatttaccgcagccatatctgcgaggacgttccagtgaaagcgctggaggacatggtagctgctgcaaattgtagaaatcgccagttcgatgtgacggggattttgctgtttaacggcacccactttttccagttactggaagggcccgctgaaaacgtcagggaaatctatcagctcatctgccaggatccgcgacaccacaacgtggtcgagctgctgagcgatcacggccccttacgacggtttggcaacgccggtatggagctttttgaccttcgtcagtacgacacggacgaagtgctgcaacaggtgcttgataaaggcacgacaaagtatcagctgacctacaacgaccgtgccctgcagtttttccgcacgttcgttgaggcgactgaaaaagcgaactattttgagctgcctccggcagactcctgggattttgtcagcgaagagacggcgctgtcgtcccagcccgcggtcgtgccaaaggggggcggagtgtag

SEQ ID NO: 169321 - DNA, 759 bp, Enterobacter cloacae
gtggcgcggataacgaaaatctcgatgacgctctgtgctttactgtttaccacactctcatttgcgccagcggcgaacgcctctgaacaggcgcgacactctgccgtacaaaaaacgcatctggcaaaaaacgcaaaaaaaaagaaaaaaaccaccggcaaaaccgttaaaaagaaatccaccgcgaaaacgaagaagaccgcctccaccacatcaaaaacgctccgctccagcacgcgcaacaccacccgcactgccgccagatccgctgccgaaaaatgcatcgtgcgcaaaggccataaaactaaatgcacaaaagtgacgaagctggccgacgcgcataaggttcgcatgcagaaggcgcaaaaaacggcgatgaataagctgatggggcaaattggtaaaccgcaccgctggggcggcagctccccgcgcaccggttttgactgtagcgggctggtttattatgcctataaggatctggtgaaattccgcattccgcgcaccgcaaacgaaatgtaccatctgcgcgacgccgccccggttaaccgtggcgaactgcaaaacggcgacctggtgttcttccgcacccagggacgcggcacggctgaccacgttggcgtgtacgtgggtaacggtaagttcattcagtcaccgcgcagcggccgggacattcagatcacctctctcagcgaagattactgggtgcgccactacgtgggcgcgcgacgcgtcatgacgccgaaaaccatccgctaa

SEQ ID NO: 169322 - DNA, 888 bp, Enterobacter cloacae
atgaagctggaagacgttgaagtatttgttgaagctgtcagggcaggcagcctggccggtgccgcccgtcggctgtcaatgagcgccatggcggcttcccgcgcgctgaatgcccttgaagcggagctgggggtgcgtctggttcactgcaccacgcgctccctctcgcccaccggcgatggcgaggtgtttttgccccacgcgcatgccctgctggaggataaaaccaacgcgctggcggatctgtttcccgatgggtctcaccttgccggacgtcttcgcatcaccgcctctgcggcgtttggacgcaaaatcatcgccccgatgctccccggctttatgcgacagcaccccgccctccaggtcgatttgctggctactgacgaacaaatcgatattgtcagccatgggctggacgtggccttacgtatcgcgccgctgagggataaccgcctggtggcccaccggctctgcgataacccccgcgacctgtgcgccagcgcggagtacctggcggcgaacggctatcctgaaacgcttggcgatcttgctgaacacagctgcctgaccgcttcagacacaatgcactggtcattcgagcagggcgatatccgccaccggcaaaaagtgtcgggacgtttttcggctaactctatagaggccatctttgaagcgtgtctggggggaatggggattgcgaatttgtcccgctggtatgttgaacccgcgtttgccgcgggccagcttgagcggatcgttcttaaggacgcgcggccggaagcgctggccgtgtgggcagtctacccgacgtcccggctgatccccgctaaggtaagaaagtttgtggaagccctggaggcgcggctggcgcaggatccactgacgtaa

SEQ ID NO: 169323 - DNA, 981 bp, Enterobacter cloacae
atgaaaaagataacaacgtcgctggcgctcagcggtttgatttttgttggttcagcgtgggcggatgcgcctgcacagattcgccagcaggttccgggctattaccgtctggcagtggggcactatgaggtcacggcgctgttcgatggctacaacgatctttcgccatcactgctgaagggagtatccgagaataatattcgcacgctgctggcgcagcgccgcatcgatgccgaacgtatgccgacgtcatttaacgcgtttctgatcaacaccggtaagcatctgatcatggttgacagcggggcgggccattgcgtgccgcagaccgcaggccagctgatcccgaatatggaggcttccggctatcgccccgggcaggtagacgccattttcctcacccacctccatctcgatcacgtctgcggtctgagcgatgccgcagggaaggcgcttttccctaacgctacggtttacgtcccacagggtgaggctgactactggctcgatcccgctaaagaggcgagcgcgcctgcgaatgcaaaagaatatttcgccatcgcgcaaaaagcgttgtcgtcttatagcgcctcggggcgccttaaaaccttcgttccgcccgcgtcgccgatcccggaggtgcaaaccgcctatgcgccgggccatacgtcgggcagcaccgtttatcgttttacgtctgaagggcaggcgatcgacgttattggcgatctcatccacgccccggcgatccagtttccccaccccgacgtctcgattcgctttgatgttgacgcgaagaaagccgtcgcgtcccgcacgcaggaatttaacgccctggcaaaaagcggcgaatgggtcgctgctgcgcacctgccttttcctggcgtgggccatattactgacagcggtcagggcttcagctggagccccgccacctatggtccctatcagcgcgccgcgcacgtgccgctgctgaaataa

SEQ ID NO: 169324 - DNA, 261 bp, Enterobacter cloacae
atgtatagctacgatgatgtagatagcatcaaaaccaatcttgaatggattgctcatcagtcagcgactcaccatccgctacccaccccgcacgaccaaaaagccatctttaatcttctgaaactgatccagacctacgaagcgctccttgaattaatcaacgaatttggtatttctgttatagatgcgaatatcgcagaaggcctgtccgttacggaaaacctgatagccaaactgaaacgtcccggagacgcaatttaa

SEQ ID NO: 169325 - DNA, 2274 bp, Enterobacter cloacae
atggatacccgcatcgtcgagctggcaggcggcatccgggcgacgctggttcatcaaccgcaggcgacgcgcgcggcggcgctggcgcgagtgagcgccggaagccatcacgagccacagcgcttcgccgggctggcgcatttacttgagcacctgctgttccgcggcggtcagggctatcaggacgacgagcggctaatggcctgggtccagcgccagggcggcagcgttaatgccaccacgctggcacgccactgcgcctttttcttcgacgttgccgccgatagcctgtccgacggcgtcgcgcggctgcgcgatatgctgcagtcgccgctgctttctctccatgacgttcagcgtgaagtcgcggtcattgatgcggaaaaccggctcatccagcaacacgatggcgcaaggcgtgaagccgcggcgcgccacgcgatggatgcaccggcggcgtttcgccgctttcaggtgggcagccaggactccctgggccatgatgcgaaagcgcttcaggccgccctgcgcgactttcaccgccgctactatggggccgggcggctgcagctgtggctacaggggccgcaggcgctggatgatttagccgggcttgcccatacctttgcggcaggttttgcttcaggtgaagcgcctgaagccgcgccgccgctgcgccttagcgccccagcggagtatgagctggcggtggcggagcgccccgccctgtggcgctgcccggcgatccggttaaatgacaacgtcgctctgtttcgggaatttttactcgacgacgcccccggcagcctgatagccggactacgggcgcgcgggctggccgaggacgtagggttagactggctttatcaggatgacgagtgcgtctggctggcgattacgcttggcggcgagcagcatgaagccataaacgagcaggttacgcactggctgcgggcgctacagcaaacgacggcggagcagcagcggcactactaccggctggcgcagcagcgttttagcgccctgtcggcgctggagcagctgcgccagcgggcgtttggctttgcgcccggcgcgtcgcccgccggtttttccgccttctgtgccgatctgctggcggcgccagcctcttatctggcctgcaaaaaaatggacgtcgatgaagctatcgtcagccagggttttgccctgccgcttcgccgctggcggcgtcagcgggcttcggataagcccatcgcgtttacgttttacccgcagaaagcgtcaggctcggcgccaccgctgcccgccgaagccgttccgctgctgcatgtgtccccgcagacgcagccgccagcgcttgtcctgcgcaggcctttttattctcgcgttggctggtctgaaggggtggcgatcggcagtcagttacgccctcacctttccgggctacgccatgtcggcggcagcggcgagtggcaaacggtcgacggcagctggcagcttaccctgcggctgcctgactccctcgctgtggcggaacgcatcatcagaaaaatagcagagtgcctctcgcgtcccgcaccggctattacgccagcggcggaaggcattgcgatccgtcagctccttcagcagctacctgaacgcctggccccggcttcgccaccggaaggctggctggcggcgttagccggcggcagcgccggggacgcacgccgggcaggccggctgcttgccctgcttgacgcgccggttaacgctgacggcacgccgcctggcggttttccgcgcgggatcgaacgaatcccgcatgccagcgcggattcggcgctgctggtgtttatccccctgccgccgggcgcgtcgctcgccgcgctgcggctgctggcgctgtggtgcgagccgcagtttttccagcgcctgcgcgtggaggagcagattggctacgtggtcagctgtcgctatcagcgcgttgccgaccgggacggcctgctgctggcgttacagtcgcctgaccgctcgcccctgaatctgctgggctgctgtaaacgctttttgcgtgagctgacgcagtgtgatgaggcgacgttcggcgcattgcgccagaagctggcggcggagacccggtcggcgggggatgccagcgccaaggcactggctgccctgcgccagcgctatggtttaccggtactgaccccgcaggccattgacgctctgcaacacgacgaggcgatcgcgctgggccgcgagatggcccgccgtcgccgcagctggcgggtgcttttcactggctga

SEQ ID NO: 169326 - DNA, 306 bp, Enterobacter cloacae
atgaaaaaagtattagctctggttgttgccgctgctatgggtctgtcttctgctgcattcgcggcggaaactaccgccaccgcagcacctgcggcagccaccgccgctccggccaaagcggttcaccataaaaaacaccacaaagcagcaaaacctgcggcagaacagaaggctcaggcggcgaaaaagcaccacaaaaaggcaactaaacctgcggcagagcagaaagcccaggccgctaaaaagcatcacaagaaagcggcaaaacacgaagcggctaaacctgctgcacagccggcagcgtaa

SEQ ID NO: 169327 - DNA, 1119 bp, Enterobacter cloacae
atgaccctgtgcgtattcgttctgattgcctcggaatttatgcccgtcagcctgctcacgccccttgcccgggatttaggcgtgacggaggggctggcaggccagggcatcgccatttccggtgcgctggcggtcctgaccagcctttttctttcccaacttgccgggaatatgaaccgtaaatatcttctgctgggcatgaccatgctgatggcgctatcggggatcgtcatcgctttcgccccgaactatctgatctatatgacgggccgggcgctgatcggcattgccatcggcgggttctggtcgatgtctgccgcaacggccatccgtctggtgccgcagcatcaggtctcccgagcgctggcgattttcaacggcggcaacgcgctggcgacggttgtcgccgcgccgctgggcagctatcttggatcgaccatcggctggcgaggcgcgtttctctgcctggttcccgtagcgatagcggcgttcgtctggcaatggtttagcctgcccgctatgaacgcaaaccagggccaggggtcacgcaaaagcgtatttcgcctgattcgccagcccgcggtttccgttggtctgatggcgtgtggtctgttctttatgggccagtttgcgttatttacctatgttcgtcccttcctcgaaaccgtcacgcaggtgagcgcctccggcctgtcgctgatcctgctggctatcggaatagcgggttttgtcggcacgacgatcgtggccctggtactgaatgccgccttttaccggacattaatggccatacctttgctgatggcgataattgccggcgtgctgatcctggccgggcatagcctgtggatcgttgccctgctgtttgggttctggggcatgctggcaacggcggcgcccacgggctggtggacgtggctcgcccggacgctcccggaagatgccgaggcgggcggcgggctgatggtcgcggtgatccagctctccatcgcgctcggctcgacggcaggtggcctgatgtttgactcccttggatggcagagcaccttcgggctgagcggcatattactgctgagcgcggtggggctgacctttaaggcgtcgcgctacgcaagataa

SEQ ID NO: 169328 - DNA, 678 bp, Enterobacter cloacae
atgacaaaaataacggcagaatatacgactgttgatctatcccgttgggcaagaaaggagcacttttcggtatttcagggctttgctcaatccacgtttaaccaaacggttcagctggacattaccgcgctgctaaaacatattaaacaggcaggctggaaattttatcctgcgattattgcccttatttctaaagccgttaaccggcatccggaattccgcatggccatgaaggatgatgagcttataatatggaacgaggtgcatccagggtacacccttttccataaagagacggagacgttttcatcattatggagccactttgacgggaatattagtcactttcagaatgtttatgcagaagacgtttctcgctatggtgataaccttgcctactggcctaaggaagagtcccgggaaaatgtttttttcatatcgaatattccctgggtgagtttcaccacttttaatgtcaacgtcgctaacatgcggaacttttttgcacccatgttcaccttcgggaaatattacgcgcaggacgggaaagtcttgctgcctttcgccgttcaggttcatcactcggtatgcgatggtttccatgtggcaagactgatcaatgagctgcaggaaatgtgtgatgacgtagcgtgctattcagaagagctgaaggtttaa

SEQ ID NO: 169329 - DNA, 318 bp, Enterobacter cloacae
atggctgttgaaacaaaattcgttgtcgtaagaaaaggtgaagagaaaatgacttttgccagtaagaaagaggctgacgctcacgacaaactgctcgacatggcagaagcgctcaccgactggctgctgcaaagcggaatgcagatggatgaaacgcaggcggaaaaccttgggctctatctcgccgagcagaaagaggccgtgcagcatattctgcgtactagcaggcttcccgatcttaatgccgctcctgttgccgataagacagacgcagaggcggatggcggtaagaaaatcagagccgttaaggctgcctga

SEQ ID NO: 169330 - DNA, 438 bp, Enterobacter cloacae
atgtcagaatcatctccgaagtaccatataaatgaagggcttatcagcctccctgatggctatcaggatcgtaccgtcaacgttttcgctctgcctgccggggatgcgcccgcgttcaacatctcccgcgatgccctcaaccccggcgaagcgcttgccgcgtatatcgatcgccagctcgccctgatggcaaaacatcttaaaggctggaagcagggtgagcgccgcgccgctacgcttggcgaaagcctttcacagggcgaaatcgtccacgccagctacctgcgcgacgcgaagcgcatctggcagcagcaggccgtgtttaataccgggggcgataacgttctggttttcaccatgacctgcgcacgtgcgctgagcgatgctgacggcgcgctgctgggcgatcttctcaggagctttcgcctccacgattaa

SEQ ID NO: 169331 - DNA, 1071 bp, Enterobacter cloacae
atgaaagccatcactctttatgacgttgcccgcgtggcgggcgtttcttatcagaccgtttcccgcgtgattaacgacgcggagcacgtttctccccgcacgcgggaaaaggtccggcaggccatggcggagctgcactatgtgcctaaccgcggcgcgcagcagctggccggaaagcgcacccgcacgctggggctgatcacggccgatcttgcgctgcacgcgccgtcgcaaattgcctcagccgtaaaatcccgcgcggtggagcagggggcaagcgtgcttatctcaatggtggatcggcctgcccggtgcggggccgccctgcaggagctgctggcccagtgcgtggaggcgctgctggtgaacgttccgctggaggatacgcaggcagaagcgctacaggacatggcttcgccggttccggtgctttttctcgacgtgtccccttccgcgcgggtgaacagcctcgtgttcgatgcggggcagggtgccagcctgggggcggagcatctgctttcgctcgggcaccggcgaatcgctctgctcgccgggccggaaagttctgtctctgcccgggcacgtctggcgggatggaaaaccacgctggctaaggcaggcgtggacgcgctggctttggcgcacggtgactggagcgcggcctctggctatgagaaagggcatcacctgctggcgggcccgacgctgccggaggcgatactcgtcgcaaacgatcagatggcgctcggcgtcatgcgcgcctgtgcggaaaaaggcatagcgataccgggtcagatttcggtggtcgggtttgatgataccgccgacagcgcctggttttcacccccgcttaccaccgttcggcaggcgttccgtgaagccggcgagcgcagcgtggaatggcttctggcaccagcccgtagcgaagcgcgctggcagaaacaacttcccgttacgttgatcgttcgccattccactgcaccgcgcgccgggctgcaggccgatcgtgaagcgctggcgcaacagctcagagcgctggcgctgctggcggagaaactggcccgaggctga

SEQ ID NO: 169332 - DNA, 345 bp, Enterobacter cloacae
atgaacagggactacgttgttgaacgctaccggacccgtgacggaaaagtgccgtttgaggagtgggtggcgaggatgcaaaggaaggatccggagttagcgtttcggatccttttacgagttgaccgggcggaaaaggggaatttcggtgattatcgctatctcagagacggcatctgggagttgaaaatgaattgtggtcccggttatcgcatctattttgcagtacggcatcgggagatcttattgttgctaatcgggggcgacaaaaagagtcaacgtactgatgtgaagctggcaatagactactggaaagattatcaaaaggataaaccggatgagtaa

SEQ ID NO: 169333 - DNA, 378 bp, Enterobacter cloacae
atgaaacgtggaatcaaagcactctttattacgctggctattgccacctgcgggatgagcgcgggagcgctggcggcacctgcggctaaggcgcaggccgtccaaaaccaggcggaggcagcgccccagggaaatgctaaagctaatgtgacgaccagcccgaaagctggcgaagaggagggtacgcgggtcagcatcaatactggctccgcagaagagctggcccgggcgatgaatggcgtaggtctcaaaaaagcgcaggccatcgtcagctatcgcgaagagtatggtcctttcaaaaccgttgacgatctcaaacaggtgccgggtatgggaagcgcgctggttgagcgcaacctcgcacacctgacgttgtaa

SEQ ID NO: 169334 - DNA, 924 bp, Enterobacter cloacae
atgagccggaaatttgattatcttggcgatgtcgaagccttcattaccgttgttgagcacggctcatttactgccgccgcggttgtcctctcaaccacgccctcggtactgagccgtgcagttacccgccttgaagcgcgccttggacgtcagctactgcagcgcaccacccgtcgtgtagggctaacggaagcagggcgcgtgtatctggagcaggcgcgcgcggcgttttctctgctggatgaggctgaacgtgacggacgggggcaggagggcaacttaacgggccgcgtgcgcatgagcgtgccaaccacctacgggcactaccgtctgccctccctgctggcacgctttgcccgacaatatccgcacgttaaggtcgagctgaacattaccaaccgcaacgtcgacctgattgccgaaggattcgacctcgcgatacgtttgggccagatgccagatagcggcttagtcgcccgtaagctggaggatgccgcgctggtactggtcgcgtcaccggattacctccatcgaatgggaaactctcagacgctggaggaactacggttgcacatgtgtttgccgtttatcctgccgcgtaccggccgcattgcaccgtgggtatttcgtgaagacgggcgcgatattgactggctgcccgtttcttccgtcgaaacgtcagaggacgtgcttggcgtggtttccctcgctgaacaggggatggggatttgccagagctatgcgtttatcgtccaggagaggatccagcggggccagctcgttgaagtgcttccgacgctgcgggggcggtcgcggcctttctcggtgatctacgcgccacaccgacgtcagtcggcggccgcccgggcaatgattgaacttctgacaacacccgctagcccgcctccaacatcccaaagctga

SEQ ID NO: 169335 - DNA, 1212 bp, Enterobacter cloacae
atgtctaaacgtagtttgcccgccatcgcggtggtggcgctgttgtctttcacgagcgcggccagtggcgcaacccttgaacgctggcgcagctatgctggcgtaagctgggatctggccgatcgcgcggcagccccagcggcgttttccgggtcggtgaatgcccccatcaccgggatccactttgatgcaaaaggcacagcctacgtcagtaccccccggctggtatccgccggcgcgcccgccacgctgagcgttctggatactgcggtttcgtcgggcccggcacgcctgaccgcattcccctcacgcgagggaaatgcggtggacgggccttacgggcaaagcctgcgcaacgtcctcggtttttatatcgatcgcagtaacggctggctatgggcgctggatatgggcttcgtcgcgggagaagcggaatctccggcgggctcgcaaaaactggtggtgctggatctgaactcagggcgcaccatcaaacgcatcgctcttgatggcgtggccgatcgtaaggccagtttcctgaatgacgtagccgttgatgagcgtcgccgcgtcgcctatatctccgacagcggatcgcgcagcgcgcctgtcaatcgtgctggccttatcatcgttgatttcaccaccggcaaggcccggcgcgtactggaccgacaccctgccctgctgaacgtgccgggcgtaaaggttgtcgcacacgggcgcgaggtatggccgggtaaaccgttgctgattggcatcaacggcattgcgctctcaccggatgccggtacgctgtactggacagtcacgacgggaacccatgcctatgcgctgccgacggcaatcctgcgacagccgggttcgaccgatgcgcaaatcgcgtcccgaattgaggacctgggtgacgtggggggcaacactgacgggatcgtgaccgatgcgaagggcaatctctacatcacagacgtcacccgtaacggtatcgtcaggtacgatcccgtcagcaaagcgatgtcaccgctcgcgtcgaacgaaggcgtctactggcccgacacgccgacgatccgccctgatggcgatctgattttcacatccagccggctgaacgatcatttcgcgggagcggttaaggccggagaagaacgctatgatctatggcgtttaccggcaaaggccttgacgccggagaaagccgttccgatccggtaa

SEQ ID NO: 169336 - DNA, 243 bp, Enterobacter cloacae
atggggatgatgacattcgtcgttaagtttgaagatggtaaggaaccatctgtgggcgctggaatggaagtatcaggcggccagatcgttgccgcgtcgtggttcgactaccgggatgatttcttcacaggtgagcaggtagatgtgatcgctaaggcgcttgaagaattaaatgcccaaggagaaattagcgatgaagacacctcatcattgttggaaaaaatcgaccttctcaccctgtag

SEQ ID NO: 169337 - DNA, 636 bp, Enterobacter cloacae
atgtttattcagacaggtagcttaaacaggatgttccactcccgcttaatcttcagaaaggcgacgccatggctcgccctctgcctggggtttcccgcagcaggttttgcctcgagcctggacatggatatgacggcaaacattatcaacaatacgtgccaggtgagcgtgccagaaaatggaaacgtgacgctgccaacggtgggaaaggggtggttttataccgctgagggcaccgatagactaacgccgacagaccccgcgggaggaacccgcttcatgattcaggtggtggactgtagcggagatgaatccggttccgggcaggcgctgcacttcaccttcaaaccgcagggcgcccaaactgccggcatgtcaaaacagatattcagtaatgatacgcctgccctgacaggcggcgctgaaaatgtcgggattgtaattttttcggaatcgactaatcaaaacgtcctcgacagcgacgggcagtctgatgtggcggtcaaaatagcgtccccctcagaccagcaaagctatttgaaagcgtatagcttttacgcccgctatcaaaattacggcccggtcagtgcaggaaaagtgaccgcgcgcgcattagtcagcgtgacatatcgctaa

SEQ ID NO: 169338 - DNA, 1506 bp, Enterobacter cloacae
atgaagttgccattaaaaccacatcttcttgttctgctttgcagtgcggggctttttgccgcctcgggcgtcatgttcgttaaaagccgcacgacggagcctgcccccgcggctccggctgcacaacaacccacagcaccgccagcccagcccgcaccggttgtcgcaccggcctacaccgccgcgcaaatcgaccagtgggttgcccccgtcgcgctttatccggacgccctgctgtcgcaaattttcatggcgtccacctacccgtctaacgttattcaggccgcgcagtggtcaaaggacaaccctaaaatgcagggtgatgccgccattcaggcggttgccggccagccgtgggatcccagcgtaaaatcgctggtcgcgtttcctcaactgatgtcgctgatgggcgagaacccgccgtgggtgcaaaacctgggggacgcctttctggcacagccgaaagacgtgatggattccgtacagcggctgcgcctgctggcccaacaggcgggtgtgctgcagtccacgccgcagcagacggtcactaccgtcaccaggtctgcaccgacaaaaaccgcgacaaccgccactccttccagcccaacggtgattaagattgaatccgccgatccgcaggtggtgtatgttcccacctataacccgaatacggtttacggcacctggcccgacgccgtttacccgccggtatatctcccaccctcacccggcgagcaattcaccgacagcctggttaaggggctaggcttcagcctcggggtcgcaacaacctacgctattttcagcaatatcgactgggatgacgacgatgactgggatcaccatcatcacgatgatgactgggacaatcacggcggctataaccgcaacggcgataacaacatcaatattaacgtggataacttcaacagaatcagcgggcagcacctgaacgggaataaccgcacctggcagcacaatcctgcttatcgtgaaggcgtaccttatccgaataaccagttggctaaccgttttcactccaccagcacggcgacaggattaagtgcgacacagcaaaggccgatcgctcgcgacagccagcgacaggccgctctcagccagatggaaaaagcgacaggaaaaacgttgccacaatcgacgcataccggcgcgcaagatgctcagcgtctggccccgacgcagcagcttaagcagatatcacagcgcaacaactaccgcggatatgacgccgggccgcaagccgtaaagcggaacagcgctccaccgcgtgaaaaacatcaggctcctgagaagcgtgttacgcagacggcgcagcaccctgccagagcacatcgcgccaatgcccttagcggcaacgacagccgctcggccagctggcaggcccagcagcagcgcggggcacatagccgtcacctgtcggcgcagcagcatccccaacagcgcgccgtcgaacgtaccgaacaccgcgaattccgtcatcgttaa

SEQ ID NO: 169339 - DNA, 792 bp, Enterobacter cloacae
atgaaaaataaattactcagcgcaatggtgttgctcatgatgtcggcgacggccatggcgcagcaatccttcagctcgccggatcgggccacccgcgcgctggcaaacgccattcgcgagcaaaacgaaggcgcgatgaacgcgctgctcggtgagcgctggcccgacgtcctgccgccggaaggagtcgatccggttgccgtcgaccgtttcctgcgcgactggaaggttcaccatgaaaccgtcgtcagcggcagcgtggcgcatctggtggtgggtgataacggctggcagctgccgatcccggtgattaaaaccgccgcaggctggcagtttgacatgcgaaaagccgctgacgagatcctgacccgcgagatcgggcgtaacgagcttgccgccatcgaagcattgcatgcctacgtagatgcccagcagcgctatttcgccatgcatcaaaaatacgcgcagaaaattgtcagctctgaagggaaaaaagatggtctctactggcccgtttcgccgggtgaagcccccagcccgccggggccggccttcagccccaaagagcccggtgcaggctatcacggctatcggttccgtatcctgcctgatgagaaaggctttgcgatggtggcatggcccgtcagctatggtcagacaggcgtcatgagctttgtgataaaccaggatgacaaagtgtaccaggccgatctcggcaatgactctgagcagaatgcccaggcgttaactacctataacccggataaaacctggcagcctgtggctccctga

SEQ ID NO: 169340 - DNA, 1146 bp, Enterobacter cloacae
atggagggtgacgtacagaccggcaccctttgggctatcgaccatgatgcagcttacgccgcattagtgcgtaaacagcttcatccgctggcgctcaggcgctgccagcagcgccatcgatggcatgtacatcactgctacgatatttttcgccagctcgccacgctgttgcaggccgggctcacgctatcccaaagcctgcaaatgctggcggaacagcatcctttacggcagtggcaggcgctgctgtatagccttgctgaggatctgagcgaaggctgcgccttatcggaggcaatgaagaggtggccagaggtgtttagccctctttatatctccatggtgaaaacgggtgaactgacgggacagctcgaagcgtgctgtcgccagctcgcgcagcagcagaaatcccagcagctgctgagtgcaaaagtgaagaaagcgctgcgctacccggcgatcgtcctgacgctggccgttgtcgtggtgctggccatggttacgctggttttgcccgagtttgccgcgatatacaaaacgtttaacgccccgcttccgctgctcacgcaggcggtcatggggctggctaccttcattcaggcgcatctcctcgcccttttcgccctgctcgcgacgctggttatcgtcgcctgtaaactgcggcggcatccccgctggcagcatatgctgttacgcataccggtgatgggcgcgctgtcgcgcgggcaaaagctgggacaaatatttaccgtgctgtctttaacccagcaggccgggatcgcatttttagacgggatggagagcgtgcaggaaaccgttgagaatggcttctggcaggagaaaatccgcgcggtacgcagcgatattgaacggggtatgcccgtgtggtcatcctttcagaaagcctctgtttttacgcccctgcgcattcagctgatacgcaccggagaagtatcgggttccctggacgtgatgctgctgaatctcgcacgtcaccatacggaacggacatttgagcaggcggacagtctggcggcaatgcttgagcctttgctgctgatcgtgacgggtgtgattatcggtacgctggtggtggcaatgtatctgccggttttccatctgggggatgcgatgagcgcgggttaa

SEQ ID NO: 169341 - DNA, 360 bp, Enterobacter cloacae
atgcttaacgttgggctggatataaccatcacacatcagccgttgggcttttactacggaggcgacgtcactggcccaatgccggagatccgaacgctggatcagatccgcccgtcgctgcgcaatccggactgcgaagggccagagcaggtgtatgccatcgcgatggacgtggcgcgcctggcggacaggccggagctcgaaaagcggatgctgctgtttggcgtggttacctgtgtcgcaggcacgctcggcgatgagccggttcgcagccaggggcacgttcaccgtatcagccagcacagcggctggtggtgcgggaatcatgcggttttcgctgacgatcatgtctttcactga

SEQ ID NO: 169342 - DNA, 237 bp, Enterobacter cloacae
gtgcctgatgccggctccctgatcgccctcatcaacggctggaaggccgacaatctgcgttgttataccgaaacggaagcgggcagacgcacggtgcgcttcggcgatcttccggcctactcgtgcggcggaacgcacgttacccagctggcggaaatcggtgaaatgcagatctcggggatgaaaataaaaaaaggacagctggtggtcacttacgccctcaacgagcaggcgtag

SEQ ID NO: 169343 - DNA, 336 bp, Enterobacter cloacae
atgacagaacgactttattacgccagtgacgcgacagaagcccgggtgaaggcgatccgctgcactgaagaagctgatggccgctacgccgtcgagctggatcaaacccttttccatccgcagggaggagggcagccggcggatcggggcttaatcgcggggatcgccgtggagagcgtgagcctgcggggggagcagctcgttcatattctggctaaaccgctggcgccaggggaggtggagattcaggtcgataaaagcgcgcgcgtgcgtcactcccgctggcacagcgcgggccatttgattggttatgccggcgagcgatttggctggtaa

SEQ ID NO: 169344 - DNA, 903 bp, Enterobacter cloacae
atgaaacctgcactgcttcccgatctcgccaccttcgtttccatcgttgaacacggtaatttttcaaccgcggcccgcattgcgggcgcgactccctcggcgatcagccgctgtgtttcacgcctggaaaaggagatgggatgtaagttactgaaccgcaccacgcgcaagctggcacttaccgaaaccggaaaatccgtttatgaacatgcgctggagatgctggaagcagcacagcaggcattagattccggcagcagtctgcaaaccatcgcgcagggaaagctcacactgagcgtgccgaaagcggtgggaaggtttgtgatccatccgctgatacccgcctttctggagcgctatccgcaaatagacgtctgcctgcgcctggaagatcgctacatggatctgatcgatgatggtgtcgatctggccttacggatcaccaactcaccttctccaggcctgtacggaaaaccgctgatgccggtaagccatattatttgcgctacgccagaataccttcgtcgcgcgggcacgcctcagcatccgcaggacctcctggcgcatagctgtatttcgctcggtgaaaccccggccgattcacgctggaaatttacgctgcaggggaaaacggaggtggtacagacgcacggccgctacgcggctaaccacacgggcgtgcggcttgacgcggttaaacgtcatgttggtatcggaagcttaccgctgtttacggcgcgtgaggcgcttgaaaatggggaaattgtgcaggttctgccggagtggaatttcatcgacagctattcaggtgagctatggctgctgtggacgcgtaacaagcatatgccagccagaatgcgggctatgattaactatctgaatgaaaaaatgccagtcacctga

SEQ ID NO: 169345 - DNA, 318 bp, Enterobacter cloacae
atggtgaaatggttaaacccgcgtcaattctccctgacggggcgcggcatcataatgggcggcatcgacgccgtctatgatctcatcagggtgaaattaaaatttttttatgtctcccccttgatggatgacgttgcgaccccatcttgtaagcaaccgcagtgtgtggacctgaaaaaaatcaaatctgggcagttgaaaaagcacgttctgcccttattacaggtacacaaccacatgttgactgaatttttagtggagacgtttagatgggtaaaattattggtatcgacctgggtactaccaactcttgtgtag

SEQ ID NO: 169346 - DNA, 690 bp, Enterobacter cloacae
gtgaaaaaaattctattagcagcgtctgttattttagcgatgtcgtctgccgctcacgcggcgggaaccgcagaattaaaggttaccggggtattaaccaactccgcgtgtacgcccacgttaagcggtgggggtatcgttgattttggcacgaccaatattggtaatatgtctgccacagcgactaaccagctcggcaataaagatctttccctctccatcagctgcgttgccccgacaaaagtaggctggagcattatcgacgaccgtgcggattctaaacagaacctgatcgtcgaaaataccgactggagcggctcaggttccgtatggagcagtaatagcctgttcggcgcggggaaaaccgcgggcggcgtcaatctgggcgcttattccgtcacgatgcagttgagcaacgtcactgcggacggaaaaaccaccggtatgatttcgggtgccaattccacaggaagttattcatggggccagatggtgggcgacagcgcacccgttcgtaatgacggcatagtttacacggttgcgggtgacgcaagcgtcgatccgctggcgtttaccagtgcggtattcccgctgcgcgtcgcgctggccgtacaggatacgacgacgcttgccctgaccgatgacacgcagattgacggacaggcaacaatcagtcttgtttatctgtaa

SEQ ID NO: 169347 - DNA, 639 bp, Enterobacter cloacae
atgctaaccggctataagttcgaatccatccgggcgctgcgcagtgaaatagtgattgcgtgggaggtattgtccacggccaagcctcacgtcaatctcgaagactacttttgcgcgatgcccgcgacgcagcgtaaagcgcatttctttgcgcagcttcgtcatgccatgttgcgcgaagaaggcaaaaaatattatctcaacgcgacatcggatttactgctggaaacggacttcctcgacaggctgaaagaagaaacgccccgcccggagaggcttgctatcgaagttaccgatcttcatcgcatcgtacagcttgatgatgacaaaagccgggccctgcggatatgcatcgccacgctgcatcagcggggtatcgaagtgtgggcagacgacgtctgcgaagatctcattccggctctgcttgccagccagatccgcttctgcggcgtcaaaattgacaagcatactttctggagcggccgcgtcgagcgggaaaagtttctgcacctcacccgccagtgcaagcgtctcgccagtaaggtgttgatagagggcatcgaaaccgcgggtgatttcgcgctggcccgcgccagcgcggccgattacggccagggctacctgtggggcaactcatga

SEQ ID NO: 169348 - DNA, 543 bp, Enterobacter cloacae
atgacgccttgcattatcaacgcgggctttcgggtcatcatcctgagcgaaaacgcctatttatgccttgggctcaagtcgattatcgctaccgccgtcgccccacgtcccgagatttactggattaacgacgttaatcccgaagggcttctgcacctgcaggagcacctcctgaatacccgcgccgggtcagactggctggtctttaccgatgcggcccgcgtggatgagattaacgctttcctgcgcggcgagcgcgccagagtggtggcggacaatctgacgcttgctcagctgagccgctgctttagcgacacgacatacgctttcgaaaacctcgccacgctcacgtatcaggagatgcgggtttgcatgctgtttcacaaaggattcagcccggttcgtatcgcacaggtctttggtaagtcacctaaaacgatttacacccacaagcgtaacgcgatgaacaaattttgctgccagaacctggcggaattccatcgaaaactctgcctgctggacgctcagctctcatctctgtaa

SEQ ID NO: 169349 - DNA, 741 bp, Enterobacter cloacae
atgatgctggcgctgctgtcacgctacgcgctggccgccacgcttcaggtcgcccctgtaacgctggatctccagagcgggcaaagagcaacggcggtttacctcactaacagcgggaaatcggccatccatgcgcagatacgggtgtacgagtggagccagaaaaacggtaaagacgtcctggccgccaccgaggaggtggtcagcagcccggcgatgacctcgctggcgccgggccagcagcagctggtgcgtattatcgtcatgcgcccgggcctgaatgaacaggagcaaagctaccggctggtcatcgatgagctgccggatgcagcggcccgcgcggccagccccaacgcggtgcatttcctgctgcgctactcaattccggtcttcattgccggaaaccagacagcgcccgtcagccgcgatgccctgagctgcgaacaggcggacaccccggcgactatccgctgctataacgccggaaacagccatattcgccttagccaccttcaggccctgacggccagcgggcaggctgtggcctcgattaaaggcctggcgggctacgtactgccgggacagaccgcgcttctgacattcaggcacgctccacgccatacgctcagcgcgctacgcgcctacatcaatgacgatcacaatgccagccagatacctctgcgcccgcttgccgctcgcgctcctgctttggctaccgctcatgctgtcagcccgggctga

SEQ ID NO: 169350 - DNA, 297 bp, Enterobacter cloacae
atgtatgccaggccgggcaacggcagcgcggtgaaagtcgattttaacgtccattacgccgtgacggttcaggcccggctggtggacgcgcgcggccggccgctgccgctgggcagcgtcgtgtcaacgccgcacggcgccaccatcgtgggacgcgacgggtttatctggcttgaagatccgcccctgcccggtgagctggtggtgaaaaccggtgagggcgagtgccgggtcacgcttccggccccgcgcgccgcgtcaaccgtaatgaatattggagaacagccgtgtcattaa

SEQ ID NO: 169351 - DNA, 507 bp, Enterobacter cloacae
atgaacattcgcattcgccccacttttgtcaacgacgttgccgccctgcccgccatcgagcgcgcggcgggccggcgttttcgcgactatccggcgctggcctggctggccgaaggcgacgttatttccgttgaagtgcacctcggttacgtcgcgcgcggactaagctggctggcgctggcagacgatcgccccgtgggctttatcctcgcagaagcccatccaacgtcgctgtttattgaggaactctcggtcgatctggactggcagggaaaaggggcaggacgccagctcatcgcccgcgccgccgcccatgcccgcagcctcggcctgcgttcgctgacgctaacaaccttttgcgaggtaccgtggaatgcgccattttatgcccggctgggctttgaaagggtgacgacgctgacgccggagctgcgccagaaaagggaagaagagaccgcgcacgggttagcgtcagacgaccgctgcgccatgcgcctgcctctctaa

SEQ ID NO: 169352 - DNA, 753 bp, Enterobacter cloacae
atgacccatacccgacacgtccgccagaactttaaccgcatctcgggccttgagctgcgcagcacgtggcagagcaccgtggcgtataaacgccattgtcatccccagctctcgattggtgcgatagtggaaggccagacctgctgcgtgtgtcatggcagagagtacatccttcatcccggggacctcattgcgatcccagcctatgcgccgcacagctgcaatcccgtcgccgggcaaccgcgcagctaccatatgctctatatcgacacggactttccgctggcagaacaggtcattcgcgaccgcacgctatttgcgctttacctgaacgttgttgagaacatgtcggctaattccctgaacgcgctgatttctgcccttccgcgctgcgccagccgcacgggtgagctacgttcaaccagccagcacgttcagcaggctttgctttccgaccttgccgcaccgccctcgcttgatgaccttgcccaacgcttctcgctccgcaaggagacgctgatccgcaccttcaggcaggacaccggcctgacgccgggcagctttctcaacatttcccgcgtggagtacgccaaagcgcggctgcgcgccggggacgatatcgccgacgttagctatcagagcggctttgcagaccagagccatttccacaagaccttcgtcagctataccgccgccacgccgcgccagtacgccacgggccgatcaatatcagacaataatcaggataagtaa

SEQ ID NO: 169353 - DNA, 162 bp, Enterobacter cloacae
atggaatttaacgagaaccgcgcaaggcaaccttttatcgcgtttgtctggatcgcgaaaacgctgcgtaactggtaccggattaatcgtacccgccgcattttgagtaaaatgagcgacgagcagctcagggacgtggggctgtcgcggcatgatttctga

SEQ ID NO: 169354 - DNA, 951 bp, Enterobacter cloacae
atgcgccagaatgcaaataccccagcgaaacgcctttaccttgtggcggattttcaggtatttggcgagcgctacggcatcgactaccatttcccgcagctcaaggagacgcaggccaccagcccggtgctccgcggcgatgtggaggagatgacgctctcttcagggatttccctgacccattccgacgttcacgtactgcagccctacgaaaccacctcccgccacagcagcccgctctatatgctggtggtgctggagggatgcgtcacgctcacgctcggggatgatgaatacgtggtgcgatccgggatggcgttcagcgcccgcctcagcgaagagcaggtgatgggcgcgcgacacgatgccgactgcaccctgaagacgctgtcgttcggcgtctacccttccgatgccagacgtgaaggcctgctggagtcgctgcttctggaatggcaaaaccagaagataccggggtttatctggcaggttccggaccacgtgctttccggcattgagcatgcgcaacggcagggggtaagtgcgctctcccgaaggctgcttctggaagggctgatgtatcagctgctgggacatggcctgagccagcgccagcagcatggcctgtgccggccagagcatgcgcgtctggaacgcgtgcggagcatgctggaacagtcgcccgaactgaatcacacccttgccgaactggccgccctcgcggcaatgagccagagcagcctgcgcagcaagtttcgtcagcgctacggctgtacggtatttgattatctgcgcgactgccgcctttcgctggcgcgccgctaccttcttgaaggctacagcgtgcagcaggcggcgtggatgtccggctaccagcatgccaccaatttctcgaccgcgtttcgtcgccgctacggcgtctctcccggcgaagtgcgccagccgcgctaa

SEQ ID NO: 169355 - DNA, 1362 bp, Enterobacter cloacae
atgaatggcaccccctcccgtcagattaaaaccggcagcgatccgcgcacgctaccggattatgcagccctgcgcgatgagctgagcaagctgactcatccggcgcgcccggatgtgaactggcaatatgtggaaaaactctgtctctctctgtttgagcaaaatggtgtcgagcttcagaccgcatcctggtatacgcttgcccgtacgcagcttgccggtttacccggcctgaatgaagggttagcaatactgaaggccctcataagccaccagtggggaacgctctggccgcagcctgtgcatgcccgcatggaaatcctcagcgggctcagccagcgtttgcagcagctgatgcgaaccctttcccttaactacagtgacctcagccagctttatcaagcggagcaacagcttacggctctcggggaggcgttacagcgccttgagcttaaacatctgagccagctcgataccctgcgtaccctgatgcataacggtgccgtaaggctcgaaaacagccatggtgcgtcagaaccgggcgttgtcattcagcatcatacagctgctgccggaatatctaacaatgctgcattgggtagtcccgtggcggcaaaaaacgacccggtgaggtgggtatatgtggcgcagccggagtctcagccaaatatcgacgttgtggcgagaccggaaccggtaaaaccctggggatcttttgcggcggggatgtgcacgatgctggtggcaggcgcggccgcggtgtgggggtggcagcacttcaaccggccagacccgcaggagcagcagcttgcagcaacccttgcgccattacctgcgatgctcacgcctgtacagcgggaagcggcacggcagcgcctgacgtcaccagagtcctttattaaagcaacgctgcagcagctaatccggctggatgcgcttcccccggactggaatattgcctacagcaggcagcttgtggagcaggcgcaggctttgtggccgaagcaggctgagtccatggcgctacggtggcagcaacagcttaacgccagcgctttgccgacagaaaatctggaaggctggcatcaggggatgacaaagctgaagcagctgagcgatcgtctgaacgggctggatgagcagaagggcaaatacatgaccgtcagcgagctgaaatccgctgtgttttccacgatgcaatcctttaaccaggcgatacctgtagaagaacagctgaggatcctggccaaaacggccgaaggccagccgttaccttctgcggcaagctcgcaggcagaaatgcacctgaaacaattaaccgcccgttattctgagattaagcagaaagcatcgggtagataa

SEQ ID NO: 169356 - DNA, 963 bp, Enterobacter cloacae
atggcgaccattcattccctgctcagcgcctgtctggccacagcagaagagacgggggccagagcgcaggcgcgtatcgccctgtgggacaactggcttgcgccggttgccgcggacaatcctgccggggatgaccccggttacgatgacgacttccagcagatgcgtgaggaggtcaataagctctccggggctgatacggagcttgtctgccagcttgcggaaaaggttctgaccacaacggccaaggatatccgcgtggcgacgtactacacctgggcccgtctgcacagggacggggaaagcggtctggcggacggcctcgagctgctggccgggctgcttcagcgttatggtagtcaactgcatccgctacgcgaccgtagccggacggcggcgctggcgtggctgggcagtacccgcatgctggacagtctctcactttatcccgaggtggcgaaggctgataccctgcgtatcgccggtgcgctctggctgaccgagcaaacattcactgacgatgcttcccgcccggaactgggtggcctgtatcaggcgctcgaggcccggctgatgaaatccggcggtgtcgatgccattgtcccccagaacgtggccgatacgcctgctcccgctgcaggcagcagcccacccgtcttgtccggtatcacctccggacaggacctgctctcacaggcgagggtgctggcgaaatacctgcgtgaccagccagacggctggctcgcagggcatcatctgatgaacagcatccgccacgacaccctgcatcagttaccaccgctatcggcagatggcaaaacccgtattgagccgcctaaaccggaccagcgcgctgctgaaacggctgtacctgcagcaaagctggctggaactgctggagcagggcgacagcatgtttacccggggagccaaccacctgtggctggatttgcagtggtatag

SEQ ID NO: 169357 - DNA, 3441 bp, Enterobacter cloacae
atgaccaaaggaaaaactacgccagcaactgaagtgcgttacagcatcagtggatacgttatattaattattggtcttgccgggatatgtgcattactgttatttctaaatcaggacagcgtggtggctaatggaatcacgttgcgcaaagcatggtctatttggggaggcgtgttttcagcattattattatgtatcactgcttcaccattctggttgcagagaaagcagaggaaggcacagatcatttatagtccagagaatataaacgatcgtaaagataatcagtctatcaagaaagagactctttccccccgtattctgttactcagggatttgcgtcggcatcttagatccacttacggtttattgtggtttcgtagaacccgcatcctgctaataaccggcaccgtcgctgaggttgaactactgactcccggtcttacttcccaactatggcaggaagaccgtggcacgttgttgttgtgggggggagatcttaatacaccaatcgacagtgcctggttgaccgcgctgcgtaaactgcgtcgtcgtcctgttgatggcgtggtgtgggtaacgtcggcgtttgaccggttgtctgccccctgtctggacccagtaattccggtgccgtctgaaagcaccatggattacctgtctcatgccatcagcaacctcatggatgcgctgggctggaaacttcccctgtacgtctggtctctgcacccgcgtgccggtaagccggaagggcgcattgtgcaggcgacaggctgtctgttgcctgccggttgtcgtaccgaggggctgactgaacaactctccaccctcatgccggagttgatttcgcatgggctgcagcagatctgtggtgatgtgaaacataacttcttgctaactctggctgaccagcttattcgcgagccacagagcgtgaccgcaccgctgtcggtgatgctcaatccgtaccgcccgttgccgctggctggcgtaatgttcagtcagccttctgccggagctgaacgtgccgttcagcatcgctggtttatggacagacgctgggatgtgctgcctgcttctgtccggatgctaccagcggcacttcgtccacgcaggcggggcataccgtggcataaggtgatggcttcaattgtcgtctcgatgatggtgggatggggtgtatggatggggatcgcatatgttgccaaccgcagcctggtctcgaacgcacaggagcaggtccggcggacgctggacacccggcagcctgaggccgggcggttgcaggcgctgtctgaaatgcaaaaaaccatatcccgcctgcaataccgagaggcgcacggggcgccctggtaccttcatgccgggatgaaccagaacgcagccctgctggcggcggtgttaccccgctacgcgcagggcgtattacctctgctgcgtgatgccgccgccgggcaccttcagcagcagcttgagggctttatccagcttccgccggacagcccgcagcgcagccggatggcaaaagccgcatatgaccagctcaaactctacctgatgctggcatacccgcagcggatggagcctgtctggttcagccgcacactgatgcgggactggccccagcgtgagggcgtcgcacaggggatctggcaggcgaaggggctggatctgctggctttttacggcgcgcagtctgcagcgcatacgcagtggcagttgccagcgaatgacgggcttgtcagtcaggcccgaaccctgctggtccgcctgatgggggtgcgtaacagtgatgccacgctgtaccagaaaatgctctcgcaggtggcgcaccagtatgcagacatgcgtcttgcagacatgaccggcgatacggacgccgcccggctcttcactaccgatgatgtggtgcccgggatgttcacccgcaaggcctgggaggaggctgttcagccagccattgatcgggtggcaaaagggcggcgtgaagagatggactgggtgctaacggacagcggcaagacatcgcagcagcaggcttcaccggaagaggtcaggcagcgcctgacggcacgctattttgccgatttcggcggcgcctggctggctttcctcaacggcctgcgctggcagaaagcggaaacgctctctgatgccattgaccagctgacgctgatggcggatgtgcgtcagtcgccgctggttgccctgatgaataccctgaatgtccagggtcgtaccggcagaaccggcgaggcggtggctgattcgctggttaaatccgccagaaacctgctttcccgggatacgcaaccggccattgaccagagtgcggttgcgcacgggccgctggatgctaccttcgggccggtgctggcactgatggataatcatggcggtggcagcgacgtgctcagcctcaagaccttcctgacccgggtgacgcaggtgcgtctgcgcctgcagcaggtcaccaactcttccgacccgcaggccatgacccggacgctggcgcaaaccgtgtttcaggggaaggcggtggatttaaccaccacccgcgactacggcagcctgatggcggcagggctcggccaggagtggagcggctttggccagactgtttttgtccggccgatggagcaggcttggcagcaggtgttgtctccggcggcggaaagcctgaacgcacagtggagggcgtcggtggtagatgagtggaacagtacctttggcggacgttatccgttcaaaaatgtcagcagcgacgtgtcgcttcccctgctggcgaaatacctcaacgccgacgccgggcgtatcgcccgcttccttcagggcaacctgaacggcgtgttacaccgcgaagggagccgctgggtaccggatagtattaatgcgcaggggctgaattttaacccggcctttttacgcgcggtcaacacgctgagccagattgcggatgtggtattcaccaatggtgaagccggtctgcactttgatttacgccccgggacggcagcaggagtcatgcagacggacatggtgattgatggccagaagctgacctacgtcaaccagatgcccacctggaaacgcttcacctggcctgctgacaccgaggcgccgggagccgccttaagctggatcagcacccaggccggtacgcggcagtatgccgatatgcccggaagctgggggcttatccgcctgctggatgaagccgatgtgcagccttattccggagccgccagcagcttcagcgtgcgctggaaggcgcaggacggcaggctacttaactacattctgagaacggaagcgggggccggaccgctcgcgctgctaaaactgcgtaactttgttctgccggatacgattttcagcgtcagcgccgccccgcaggcggatatggattttgccggtatcaccgaagaaggagacaactga

SEQ ID NO: 169358 - DNA, 1029 bp, Enterobacter cloacae
atgatgctggtgacaggtataaccttaaatctgcttgttggcagagatacccgttacgtgcatgtctttctttatggtgtgctacctgccattttcctgtggttatttctttttgggtgggcctggcatcgttatgaacaatccatgaatgctgctctgttatggaataatgaagctgaacgaacaaaattacactggaaaaattggtgtatgaaacaatggctcattgtgggaaatgtagttatgacgcccgaagagcaaggagtaaaggttttttttgggagttatgctgatatacccgcatttcccaaaaaagcacgcccgctattttctgcattttctactttacccactcgattacagtatgtggacgagcagttagagagacaatatcctggttatagacgtagtttgtatacagtcatcgtattgcttactgacaggcctcgcgaggaatcgacaagtctggctgtttatgagcaatgggatttgtatcccgaatatgcaaactcgattgaggaagtgcaatcacgcgctcagcaggacggcctgattcttttgcttggcctgcaggtttggccggagggggaaacgggtaaatacagtgagttcatttcagggcaactgatcgcgtcacctttattggttgaccaatgtaagttgacagtattggctgggctaggaagaattttgccttccaaagacttaattaaagatataggcattttgtttgaatataactcggtcgattataataatctccaacatgtatggcttgcagacattgatggtgaaaaccgaaagcaaattgtccagtatgcctatgcacaacagtggcatttgccaccaaaatatccttgtttttctctggatcattcatttggtcctaacggaccattggcatttcccgtatatatagcattgatggtagatgctgcaatcagtacagatgaaatgcaattgctaatctttcggcagaagaaaagtgtgtactcactttgcttgatcacccgggagctatttcaatga

SEQ ID NO: 169359 - DNA, 498 bp, Enterobacter cloacae
atgcagcccgagcggcagacgctggccaaaaacaccatcaccacagctaaggtttattttatgaaaacgaaattaacgccgatcgtattactgttctctgttgtcgtaatgcccgcgcacgccattagcgcacattatcgtgcccagctggaacgttcgggatgcacgcaaattagcgctaccgacggttcttgcgatatcagcaaaacgaaagcggaaaacgcggcgcaaggcgatcgaacgacagcggttcacgatcccctgcgggaagcctcattaacctcaaacacggttagcgccacggtttcaaacggcttttttaacgctacggttaacggtaaaaaagccagcgtaaaacgcctgaatgcgcatttctacgagattcatggcgatggtgttgtgatatcgcttagccttgatgaaaacggtattacggacgcgtcgtggaataaaatgaagggacgcgatcgcggtattttgcaggtcacgcagaaataa

SEQ ID NO: 169360 - DNA, 204 bp, Enterobacter cloacae
atggaaaaccgcaaattcagccaactgcgccgctgggcgcgggaagggatcatactcgtactgctggcgctggccgtgatctggagtgtggatcagtaccgcaagccgttattacccgccacgtttagcgctattccgatgcaggacgttgatggttcagtacatgacattgctgcactcagtcacaggatcggccgctgctga

SEQ ID NO: 169361 - DNA, 777 bp, Enterobacter cloacae
gtgatcctcgcaggcgtcacgcagcccggaaagccaggctacccctggctggttttcctgcacggtttttccggcgaccgccgcgagtggcaggctgttggagcgtcgctgaaggactatccccggctctacctggacctgccgggacacggtgagtcagcgggcgtcggcgtgacggggtttgccgggatgagcgcgctgcttacccgcacccttattagttacaacatactgaaatactggctggtggggtactccctcggcggccgcattgcgatgtttcatgcctgccagcgtcctgcgggcctgaacgggctgattgtggaaggcgggcacccgggcctgctccaggccgaggcgcgcgaggcgcggcttgtatccgaccgccgctgggcgtcacgttttcgcggcgagccgctggaaaatgtctttgccgactggtatcagcagcccgtctttgcctccctcacgcaggcgcagcgccgcgcgcttatcgccctgcgcagccggaacaacggcctgaagctggcagagatgctggaagccacctcgcttgccgttcagcctgacctgcgtcccgcgctcagcgcgcgtgattttcctttttactatctctatggcgaacgtgatgagaagttcaacgccatcgctgctgaacttaacgccacgcgtcatgctatccctcatgccggacacaacgcccaccgggaaaacccggatgcggttgccgcgagtctggctcagatactgcgttatcgaacaaaggacacgctatga

SEQ ID NO: 169362 - DNA, 462 bp, Enterobacter cloacae
atgatccagtggcaagatttacaccacggcgaactgaccgttcagtcactatacgccctgctcaggctgcgctgtgaagtctttattgttgaacaaacctgcccgtatcaggatatcgacggcgacgatctggtgggtgagaaccggcatatcctcggctggcggggtgatgacctggtggcgtatgcgaggattctgaaaagcgaggacgatttcgaccccgtcgttattggccgggttattgtcagcggcagcgcccgcggtgaaaagctgggctatcagctgatggaaaaaacgctggaagcgtgcagaaaacgatggcctgacaaggcgttataccttggcgcccaggcgcatctgcagcctttctacgcccatttcggttttgccccggtgacggaaatctatgacgaagacggcatcccgcacgtcggcatggcgcgcgaagcgaaacaggcgtaa

SEQ ID NO: 169363 - DNA, 378 bp, Enterobacter cloacae
gtgacccactttgagaaagagattatcgacgcgcacgtcgcaatagaaagctggttaagccgcagcgaaggggattatgacgccctgcttgcccgtttccggcaggattttttaatggttaccccaggcggcgctcacctggactacgcggggctgacggctttctttacgagccagggcggtagccgccccggcctgaagatcgtgattgacgagcttaccacgcgacaaacctgggacaacggcgcggtacttcattaccgtgaaacgcagacccgcccggatcagccggtaaacgtgcgctggtcaaccgccgtgcttaatcaggaaggcgcggtgataacctggcgtctgctgcatgaaacggcgcagccgtag

SEQ ID NO: 169364 - DNA, 2217 bp, Enterobacter cloacae
atgagcgttaacggcgttcagcttcgggtgcgcggcaaagtgcagggcgtggggtttcgccccttcgtctggcagctggcgcaccggctgaagctggcaggcgacgtgtgcaacgacggagagggtgtcctggtgcgtctcgcgggtagtgggggtgactttaccgcgaggctgcgccaggactgcccaccgctggcccgcatcgattgcatcgacgtgcagccgttcatctgggcagcggagccggtttcgttcgtcattcgccacagcgagggcgggacgatggacacgcaaatcgtcccggatgccgctacctgtcccgcctgcctggcggagatgcgcgaccgccgcgagcgacgctatcgctacccgtttatcaactgcacccactgcggcccgcgttacaccatcattcgcgcgatgccctatgaccgtccggcgaccgcgatggcgggctttccgctgtgtgcgccgtgtgaagcggagtaccgcagcccggccgatcgccgctttcacgcccagccggtggcctgcccggactgtgggccgcagctggagtggcgagccggtgacgctattgccacccgcgaaccggcgttaagcgcggcggtggagaggctgaaaaacggcggcatcgtggcggtcaaagggctgggtgggtttcacctggcctgcgacgcgcttaaccccagggcgataatgaccttgcgggcacgcaagcagcgcccggcgaagccgctggcggtgatgatccccgatgcggatggcctgccggaggcgatacgaacgctgttacgctcggccgctgcgccgatcgtgttgacgccaaaagcctgccttcccgcgtttccggaggagattgcgccggggctggatacgatcggcgtgatgctgcccgctaacccgcttcagcatttgctgatgatggactgcgggcgcccgctggtgatgacctccgctaacctcagcggccgtccgcccgccatcaccaaccgccaggcgctggaggcgctcggcgacattgccgacggcgttctgctgcacaaccgcgacattctgcagcggatggatgattcggtgatggatcgggagggcgcagtcctgcgccgcgcgcgcgggtttgtgccggatgccatcacgcttcccgccgggttcagcgagagccctgccatgctatgcaccggtgcggacatgaaaaataccttctgcctggtgcgcggggatcgcgcggtgctgagccagcattttggcaacctcagcgacgacggcgtcgacgcccagtggcgcacggcgctgtcgctgatgcagaaaatctacgcttttcagccggagcgcgtggtgtgcgatgcgcacccggggtatcgcgcccgccggtgggcgcaggagcaggcgctgcccgttgaaaccgtgctgcatcatcacgcccacgccgcggcgtgcatggcggaaaataactggccgctcgacggcggggacgttatcgccctgacgctggacgggatcggcatgggagagagcggcgcgctgtggggcggcgagtgcctgcgggtgagctatctcgactgcgaacggctcggcggcctgcccgccgtcgcgctgccgggcggcgatctggcagcgaaacagccgtggcgcaatttactcgcccactgcctggcgttcgtgcccgactggcagcagtacccggaaaccggtgccgtacagcgtgagaactggccgctgctggcagcggccgtgacgcgcggtatcaacgcgccgctggcgtcgtcctgcggtcgcctgtttgacgcggtcgcctgcgcgctgggcataaacgcacagcgctatgaaggtgaagcggcatgcaggctggaggcgctggccgcccggtgcgcgggcgtcgaccatccggtaacgctggaagcggataaccttgccggtttctggcagcagtggctggcctggcgggcagaaccctgcgagcgcgcgtgggcctttcacgacgcgctggcaaaagggctgagcaagctggcggcaacgcatgcccgccgtctctccctctcagcggtgtgcttcagcgggggcgtcctgcacaaccgtctgcttcgcgcgcgctttcgctattacctttctgatttcacgcttctgtttccttcgcgcctgcccgcaggtgacggcgcgattgccttcgggcaggcggtggttgctgccgcccggtcatgttcacaaaggacttaa

SEQ ID NO: 169365 - DNA, 420 bp, Enterobacter cloacae
atgactatcatcacgtccctgcttaatcagtcagacaacaccgcgcagcgcgagaaaatggccagcctgttaaccggtttattcaacggcgatatcgatccggcagaggtttttacgcccgattaccagcagattacggacggccactcacttgattatcagggttttgtacagcatctgaatcatgtccggacgcagatccgcgaaattacattcaccgttgaagcgttatgctgccatgacgaatgtgtggcagaccggcacagggtagccgtgacgtatccagaaggtcgccaggcggagctagaggtgtatatgtttgccgcactgcgcgaggggaaaatttgtagcattcatgaagtcacgcgggcgactggcggcgatccctctgaccgcgcgcttgcccacgcaacgcaataa

SEQ ID NO: 169366 - DNA, 729 bp, Enterobacter cloacae
atgctcactaccgagaggctggttcatcccggtgcataccacaccccgtggcacagccatttcgccgggcagctctggcgcatcgaaacagggctgctggtgattgagacgccgcggggacgttcggtggtacccgcaaaacatatcggctggatcccgccaggccagcaacatgctgccttttcacaaagcgcggttgaaggctgcgctatctatatggatcccgccatctgcgctgtgctccccgaagcgccagcgctgtttgagtgcgacgatctcaccagcgcgctttttttgcgcttatattcggcggacaaggcatacgatccgcgcaagctcacgctgctgctggcggaactggccgtggcgccacaggttgcttttcgcctgcccgtgccggccgatccgcggctgcaaaaggtggtgaggcatctgctgcaggccgtcgatgataaccagacggttgagagccatgccagccatgccgggatgagcgttcgtaccttcagccgtcggtttaacgcgcagacggggatgaacttcgttaactggcggcagctggcgcgcgtcatgcaggcgatggagtggctggcggcgggaaagccggttggctggattgcgctatcgtgcggatacagcagcgtcagcgcatttatagaggttttcagaacgtggaccggtaaaacgccggggcagtggctggtcagtgatgatgctgcacgaaggtaa

SEQ ID NO: 169367 - DNA, 279 bp, Enterobacter cloacae
atggatttttatttttcccgttttgaacatcgccagccgcctgaaccgcttaagacaccgcgctgggtaatgctcacatggcaggtactggcggttgccgcgctgattttaggcgctaattatctttactggcgctggacagcctccttaaataccgacgcgctgtggtatgccattccgctggtgctggctgaaaccctggcctggatcggcaccgtgctgttcaccataaacctgtggaaagaagaggatccgccgcaaaccccgcccccccgctga

SEQ ID NO: 169368 - DNA, 420 bp, Enterobacter cloacae
gtggctaacgacatctcgcttccggccacgttaacgtcggtctcgccgcttgcggcgtggcttgcgcaccagatggcgccgctgcccgtcagcgacgaatggcgctttgcgttcgatctcgccgcctgtgaaacggcaaccaacattattcgccatgggctacgcgaggatccgaaacgttgcttcaccgtggagttcatcgctaccgccacgggcgcgacgctgcgttttaccgacgacggcgatgcctttcccgctgaacgccttgaggcggcacgtaacgacgcgtcgttcgacgcctgccttctggctgaaagcggcagagggctgaaactcattttgttgtatgtggataatttcacggtggaaaacgttgcgggaagaaatatcaccgttctggagaaggggatggccggataa

SEQ ID NO: 169369 - DNA, 744 bp, Enterobacter cloacae
atggcacttccgcttctcgataacaccgacctgccgctggtgctgctcggcggcacgctctgtaacgcccgcctctggcagcccgtcattgagcggctgaacgttccggcggtgctgagcgtcacgctgacgggagcagagtccgcgcggcaggcgtcacgacggctgttaaccgtgctgccgccgcgcttcctgctggccgggttttctctcggcgcgattgtcgcgctgcaaattgccgccgacgcgccagaaaggctaaaggggctggcattgatgtccgccaatcccctcgccgatccgccggaaaatgccgcgcggcggcgggaagcggtacgcgccgcccggtcgcagggcgtggctgagtggctggcgtcgtccctgtggcgaagctatgtcgccccgtcacgcctgcacgaccgcgctctgcgggaggttatctgccggatggcggaggagtgcggcatcaccaccttcgcacagcagacggaaatagccattcaccggcaggataacagggcagcgtttaacgccctctcctgccccaccctacttatcaacggggcgcaggacgcgatctgcacgccccaacatcaccagttactggcggcaggcaacgcggacgcgacgtggtacacggtggagaccggcgggcattttataccgctggaaaccccggacgaggttgccccgccgctgcgtcagtggataacggagtgcatacagtgcgcaacaacagactaa

SEQ ID NO: 169370 - DNA, 765 bp, Enterobacter cloacae
atgacgctaccgcaaacgccttctttttacctgcacggcaaacgcgcgctggtcaccggcggctccagaggaattggctttgccgccgccgttgcgctcgcgcaggcgggcgcagaggtatggattgccgcccgggatcgtgacgcgctggcgagcgccgccggcctggccgccggacaccggctcacgcttcagacggtagcgctggatatcacccaaccccatgacgtggagcgcgcgctggcaaacctgccggatctcgacattctggtgaacagcgccgggctggcgcgtcaccagccatttcttgaggtcagcgaggaaaatttcgatgcggtgatagcgctcaacctgcgcgccaccttttttatcagccagcgcgtcgccgggcgaatgcgggcgggcaataaaggcgggtcgatcgttcacgtctcttcgcaaatggggcacgtgggcggccccgggcgcagcgtgtattgcgcctccaagttcgcccttgaagggctaacccgaaccatggcgctggagctgggcgaggcggggatccgggtaaatacgctctgcccgacctttattgaaaccgacctttcccgttcgtcgctggccgatccggcgtttcgccactacgtgctggagaacatcaagctgcgccggctgggcaggcttgaggacattatgggcccggtggtctttctcgcctctgatgccgccgcgctgatcaccggcagcgcgctgatggttgacggcggctggacggcaacgtga

SEQ ID NO: 169371 - DNA, 1311 bp, Enterobacter cloacae
atgaagcgcctgctaccgccagacgacgttccggaagagatcgcccgccgtcttgaaatcatccagcgacaccgtgcgctcaacgcgatcctcggcgttaaccctgacgccatctctcaggcgcaacggtatcagcagctgcgtcggcgcggcgtgcaggttggccctttgcacggcgttccgctgatcgttaaagataatatcgcctgcgcgccgatgccggttacccttggctgccgcgcgctggcctcgctcggtgcgacatcggatgcgcttgtcgtacagcggctgcgccgggccggggcgattatcctcgccagggccaatatgtccgagtttgcctttgacgtgcgatcgcgaagctcgctgggtggagacgtagcgaatccgctttgcccgtcggtgacggccgggggctccagcggaggctgtgccgccgcggtcgcggccggaatggccgatggcgcgctgggcaccgataccggcggctccatccgcattccctgtagctataccgggctggtaggtcttcggcccgcatttcgccgggcgcagctggacggcgttgcgccgctgtcgccgagcaaggacaccgtcgggccaatggtacatagcgttgaagatgccgcgctgctgcatgcggtcatccacggattttctccggtaaccctaccggcgcgcccgctgaacggcgcccggttcggtgtggttaccgcgctacagggagaggatgaagcacagctggcggtgtggcaggcggcgctacacgcgctgagccgcgccggggcgaggctggtggaggtatcactgcctttgctggacgacgtaaggcaggcgacgtgcctgagcctgtatgaatttcgcgttgcgtttgaccgctggctcgctaaacagcctggtgcgccatcagggctcgcggaaattgtggcctccggcgctttcctgcctgagttcgcgccgtttctgaagcagatgctggcctgcgatacgctgaaaaccccgctctggctggcgggacggcgccttcagcgcctgttgcgccagagcctgtgccaggtagcggcggagcagcgcatcgatggctttttgtatcccaccgtacagcgcttaccggacagcatggcgaagatgccgcccgggtgcgcgccggagcttgccgccatcagcggcctgcccgcaataacgttgccgtgcggcgtgaacggtaatgggctgccggtggggatggagattctatcgccgcaggaggacgagacggcgctgatggtgctggcgctggcgtgcgagcggtgctttagtcgcgataaataa

SEQ ID NO: 169372 - DNA, 2535 bp, Enterobacter cloacae
atgattgatttcacacagcgactaaaaagaaaagaacgaaatacagttattaatccactcgagatttatgaatctttagataggcgcagcgttgctggacctttaagaccctcacagttggaaatattaaataaatggtgggggatgtataaggataaaaaagataatattataaagttgcatacaggcgaaggaaaaactcttatagggttacttcttctacagtcaaagttgaatgaatataatcagccctgtgtttatgtttgccctaacatttatcttgcagatcaagttatggatgatgctaggaaatttggtattccctattgttctattgatgaaacgagagcattacctgatgattttctttcgggcagaaagatattaattacatatgtgcaaaaattattcaatggaagaactgtattcggacttggtgctaaatccgtagatgttgggtcaatcattttagatgattctcaggcttgtattgattcaataaaaagctcaatgatgattaaggtaagaaaggatcattcgctttttaaaaaaattcttgggttattttctgatgaattacgtgatcaaggagaaggttcttttttagaaattgaaaatggtgtttctcagagcaccattttagcagtgccttactggacttggatagaaaagaaagatgctgttgcaaaaatcctattggattatgtagatgataaaaaagtaaaatatgcatggccgcttattaaggattcattacagtgttgccaggctttcttttctggtgaatatttagaaatatcaccatttacatctgtaatcgaaaagtttggaagttttagtaacgcaaaattcagatttttaatgtctgctacaactcaagatgactcgttctttatcaaggggctaggttttgatatcgatgctgttaagaaccccatgaaaagtgatactcttctttggtcaggcgagaaaatgattttgattccgtcattgattaatgatgattttacaagggatcgtattttaaattggttgttgcagccctacgataagagaatttttggaactgtttgtctaaccccgagctttaaaaataaagagcaatttgaaaagattggtgcagtagtctctactactgataccatgtttagtaatgtcgagaaattaaagaatggggtttattctgaggctattgttttcgctaatagatatgatggaatcgatcttcctgatgattcttgtcggatattaataatcgattcaaaaccattttctgaaacattgactgaaaggtatgaggaagaagtaaggcctagtagtgacataatcaatattaagattgctcaaaaagtggagcaaggtctcggaaggagtgttagagggcagaaggactatagtgttattgttcttgttggcggtgatttggttcaatttattaaaagcccgttaacaaagaaatatttttcagagcaaacaaaacaacaaattgaaattgggaatgagatagtttcttttgcaaaagaagagttggctggacaaaacctgagctcttctcaaatacttgttgatatattaaataagtgtactactcgtgatgacggatggaagcaattttatgttgaaagaatgggtgagattaaaaaaagtgtcgataataaagggttgtatgatctaattctgcttgaaaataaagctgaaaaactctttgttaaaggggatgtggatagagcttgcaagacaatacaggatatctgtgatcatcatgttcaggatcctagagaaaaagggtggtacctacaacttttagctagatatatgtattctttaagtaaggctgaatctaacaagtatcaaaaatctgcgtttcaaaacaacaactcacttctcaagccaagagatggtattgaatataaaaaaatcggaaaaataaacactagcagaactcaaagaatcaaagaatggatggcatcgtacgatgactatcagtctttgatgattgatattgatggtgtccttgaaaatcttagttatggagtccattctgagaagtttgagaaggctttagatgatttaggcggtatgattggtttcgtatgccagcgtccagataaagaaatacgcaaaggacctgataacctttgggctgatgttgataatcagtacattatgtttgaatgcaaaaatgaagttgatgaggatagaaaagaaataaacaaagatgaagctggacaaatgaacaaccactgtggttggttcgatgatttctatccaggggagaagtgtcttaagtttatgataattaatactcgtcatctttcttatcatgcggactttactcatgaagtaagaataataaagaaaaatagtttgagaacattaaaaaacaatgtgaggggttttttcaaagagtttcgtgggtttgatattcatcagttgtctgatgagaaaattcatgagcttattataccgcataagttaagtgtacatgatttttataacgaatacagtgagtccgtaataaaaacaactagatag

SEQ ID NO: 169373 - DNA, 231 bp, Enterobacter cloacae
atgactgaactcactgaattgcctgatggaccgtttactcgccagcaggcagaggcggttgcgtctcaatattccaacgttgctatagaggacgacctggggacacatttccgtctggttatccatcatgagcgttgcatggtctggcgagcctggaactttgagccggatgccggttactggctgaacaggtatatcgctcgttatggcatccgcaaattccctgcataa

SEQ ID NO: 169374 - DNA, 876 bp, Enterobacter cloacae
atgaataaacatgatggcctccaggcctttgaacacccactagctttactaccccatagcctccgcaacgacatccttaagcaccttcgcaaccttacgcagtacgagccagtgatcggcattatgggcaaaactggtgtcgggaagtcgtcactctgtaacgccctgtttcagggggaggtaacacctgtcagtgatgtggaggcctgcacacgcgatgtgctgcgcttcaggctcagcagtggctctcacagcctgctactggtcgacttacccggagtgggtgaaagcaaggcacgtgacgaggagtacaccactctataccgccggatcttgcccaaactggatttggtgttatgggtcatcaaggccgatgacagagcactttcagtggatgaacacttttatcgcaaggtgatgctggcgtatcagcaccgggtgctatttgtcgtgaatcaggccgacaaggccgaaccctgccatcagtggaataccaccagcaataccccctctcatagccagcagtcgacaattgagaccaagcggagcgctgtacaacagatcttcctgccgcaccatccagtctgtgttgtatcggcccgaactggttgggggctggatgcgatggtagagacgatgatgcgcagcctgcctgaccgggccgcgagcccactgacaacacaactgcatggaaggctctgcaccgagccggtaaaaaagcaggcacgcgagcgctttggtcatgccgtggatgaaatgattggcaatgtggagtcatcatcttttctgccagcgcctgtaagggctgtgattcgaaccgtgcgggaagccgtggtgtccgttgcccgtgccgtctgggattggattttcttctga

SEQ ID NO: 169375 - DNA, 510 bp, Enterobacter cloacae
atgaagattgatattctaagtagtgacggtatccatgcctcagaaaaggaagcaattaagaggatggtagaagttttcaatgcatctagttttagccaaaaatggcatggctatgctggtttcatgatgatggatacaacttatagagatcgagagattgatttagttcttctgacgcatgatagactccttatcgtggagcttaaaaagtggcgcggaaaaattgaaccaatgcatgatcattggttacgtgatggtgatgacatggggcgttcaccagttaaagtccttgccgataagtggaaaattttatcatcaaagattaaaactcgtctaagtgcgccagcaacagaagtatacattgattacagagttgtcatgtgtggtagtgctgatttttctgaaattccagaagatgaaaaatcatttgtatgtacacttgaacagtttttaaaaattgccaaatctgggggggtaccaaggcgaatttggtccacaaaaagcgcgtaa

SEQ ID NO: 169376 - DNA, 324 bp, Enterobacter cloacae
atgtcagttaccctgagtaagcaacaaggatttagcatcgtggaggctttgctggcaatgatgctgctggttgtggttgtcacggcattgaccgggtattatcgcgcgctggcaacgcggtttacggcgctgagccagtatcgcgaactatggcagcatgcctggaatcagtcgcagctctcaacgttgccgcttccgcccggctggcaggtcagtcgggggcagacaacgcagtccggatgtgtcagcatcacggtcacacttatttctcctctggggcggcagggcgcgttaacgcgtctgcattgcccggttagccggtag

SEQ ID NO: 169377 - DNA, 381 bp, Enterobacter cloacae
atggcgtcgctggcgctggttctgcttatgctgatgctcggcacgctgatcctcaccggattaaaccagcagctgcaaacctacagcatgctggtaagtggcgagagccattttgtccgccagcaggctgccgtgcaatctgccctggagtggggacgggttcagcgctgggctttgcagccggaggtgcagtgcaggcaggtgcagcgtgtgcgggtttgcttacggcggtttgacgagcgcgttttgctcatcgccggcaatgacgacctgctgctgtggcgaggaggagaggtggcggaagggcagatacggttttctacccacggctggagcgatttctgcccgcttaaggagagtgcgctatgtcagttaccctga

SEQ ID NO: 169378 - DNA, 561 bp, Enterobacter cloacae
atgtcagtaaatcaaaaagggttctcgctcacggaggtgctgattgcaatggcaataggcagcattctgttactcagcacgtcgcgtttgctgccggggcttcagcggagcgttttgctgcaatccgggcagcttgaactggaaggtgaggtctggcagcgtctgctcgcgatcggtaaacagctacagagagcaggctactgtgccgggcattgccaggggcagggaatggctctcggcaggcaagggcagtgtctaattgtgcgatgggatgccaacagcaacggccagtgggatgccaccgcgtcagaaaatgacagcacggggtatcggcttgaggccggttcgcttgaaacgctgcggggcgcgacatcctgtgagggtaagggctgggataaactcaccgaccctgagcagatcttcatcgagcagttctgggtcagcaaatccgaccatcctggctttgcaccggtaatgacgcttgagttgagcggccgcagcaaaggtgcactgaccgcgcccttttcggtccgctatagcgttacggggtttaacctgtga

SEQ ID NO: 169379 - DNA, 465 bp, Enterobacter cloacae
atgaaaaatgaacatggctttacgctgattgaaacccttattgccatctcgctggtggtgatcctcagcgccacagggctttccggctgggaccgctggcagcagcggcagcggctctggcaaaccgcctgtcaggtgcgggatttcctggtgttcctgcgtaatgacgctaaccgtcacaaccgcgaacatacgatcgcgcttcagagtgacggggaaaacgcctgcctggtcagctctgcggcttcggggtgtgatagcgccagcccctttgcgatgaagccgctgtggcccgggatcgcgatgggcgacatcacgccatcgctgggattttacggcttaagggacaccgcgtgggccggacatatacgggtggagagccgtgccggtacgtggtgggtgattgtctcaaacggcgggcgtatccggctgtgcaatgccgcaggagaagctggatgtcagtaa

SEQ ID NO: 169380 - DNA, 210 bp, Enterobacter cloacae
atggcagagggaaggcaaaaggggaaggaaaaaatcaaaaaggccagcaagccactgacctttatcggtttatcgttcgataatctgggatacttcgtcgcgattgatttgcatttgattgccttcccgatcgcggtaactcacaaggccggtatcgtcgtcgacttcgggtttgccatcggtcaggatcatgcggccatccttggttga

SEQ ID NO: 169381 - DNA, 213 bp, Enterobacter cloacae
atgagggttgatatatggcagaacaacatcgtggtggttccggtaatttcgctgaagaccgtgaaaaagcatcagaagctggacgtaaaggcggccagcacagcggcggtaatttcaaaaacgatccgcaacgcgcatctgaagcgggtaagaaagggggacagaacagtcacggcggaggccgtaaatctgataactcctgatcttatttaa

SEQ ID NO: 169382 - DNA, 399 bp, Enterobacter cloacae
atgaagagcctgcctctctttttggctatatttagcctgagcacattatcaggatgtagttctcccccgccggacaaggtggaacagattaaccatctgcaaatctcgctggtgctgccgggagaaaaaccggctgcgacagatatttctcatattgcgtcgctgtatcaggataataagcagcagattgatacattaacgcacgcgctgaaatcagaatatcttcagaacacgagcgcaaaagaaatttttgtttcggacagtgccgttcagcgcgtttatgcctcgctgaccaaactggaacaattagatatggttaatcagcagtacctgaaggataaaaacataacggggctgcagaatattcatatcgtacttaagccgcttatggccggctga

SEQ ID NO: 169383 - DNA, 351 bp, Enterobacter cloacae
atggataaaatgattgccgtacaaaaaaggctggaggccgcgctcttgattcttgcagaggatgcggagattaaagcgcgacaggagcgtatttatcacgagtgcttgtgccacataactctgcatgatatgccacgggtgttgcgcagggattattatcagctcctgtctttaaccaacatgctctgtcgcgaaatcggccacaggcactctcacggcgcgatgcaggttgatgcggaacagcagctggtcactgtcctgccgcgcaggctgttgctgctctataagcgactgacggagtggatggcgattgaaacctatcttcgcagccagcagcacgttctgagctaa

SEQ ID NO: 169384 - DNA, 612 bp, Enterobacter cloacae
atgattatagttgtgacatcctgtagatatttcaggcagggctttgccgcgctggcagaaagcatgaggattgaggcaccttcattcaaaaaggtgctgtatatcgatgatattaaacacgtcaaaaaagaggagcttttgcgcgctaaagtcgtcctggtggattatggccagtcggatatcagcgtgctgaatagtttgctggaaataaaaaatcgctacgagaacagctattttattcttgttacccgggatatctgctatgacagcacgatagaaaatattcttattaataccattgcggactgcaccatcgactgtaaaatcgccgtacgtaaaattagcgcctgtcttgcccattttgcgcttgaagatcagcaggtgacgattgtcaaaaatagccgctggcaccatctcgaaaaagaaaaacgcctgacgcgaatggaaacgatgctgctgccttatattgtgtcaggaaaaaagaataaagagattacgcgctacctggatctgacgggaaaaaccgtcagccaccatcggcgcaatatttatcgaaaattcgcggtcactaatttgaccgggctttataaaaagttcgaccacagcgtataa

SEQ ID NO: 169385 - DNA, 4377 bp, Enterobacter cloacae
atgacggaatcatttcaactgacgaaagtcgccgcaagtatgagcatgatattaggtggcagcctgatgctggcaccatcgtttgccaacacctgcactactttttcagccgccggaacctgcggattgaccgaataccagatgacctcaaaactggatcccgtgccgacggcctggtattttacccagccaacccaggacgcagcgattaacggtcaggccaaaaaacagaatatctatttcgccagcggcagctcttcccgtcaggcaagcgacgtgcagcagcttagggtggacggcgcggatctcagcgggtattacatcaacgccagtaaaaacggctcggccgcgataaccctggccaacaacgctaaggtagactggcttgaagccgggggcgctacgacccataccaaaatcattatcgatgactctaccctgaacggcgccagcgcccaggtggattacgataagaccgccagaacgccgacgttctcgaaaaattatgctaaaggctacgccatttacctctccgccggcgacaatggcaacaccgatattgatatccagaacggcagcgttattaacggcaagatcctggccggcggggcgggaacacacgatattaccctgcgcgacagccgcattcagggcggcagcattctgctgagctcaaccaaaaatgacaacactatctccgttataaacagcagcatcgacaccaccggtgccgtgaccgccacggacaacgccatcaatatcaccaacggctcaacccctgataaaacgcacgcggtgacgattgataacagccgcatcacagggtcggtcaatattgccagcaccggcagcaccaacgcgctgagcgttaaagactccaccattagcaaaacgatccaggccgacggtaacgccgtgacgatgaagaacggcgcgaccaccctgctgaccctggacaacagcgaggtgagcggccatgccctgctgtccggtacaggaagcatcaccgcctcgctggcccaggcgcgccttcacggcaatcttaccgccagcaaggcggcacaggttgcgctggagataaccgcctcgacgctggacggcatcctcgacgccagcgcgggcagcgacgccgcccttaacgtcaccgactccaccctcggcaattccgaccaggccgacggcaccgccctgagcctgaagggggagaaaaccgccgttctgacgctgagcaacagcggcgtgaacggccataccctgctggagggcagcgaaagcgtctctgcaacgctggataacgcgcaaatcagcggcagccttgtcgccagcggcgcggccaggacgacgctggatatcacccgttcgaccgtgaagggcaacatcgaagcaggccagggcagcgtggatctgcacctgaccaacagcacactcggcggcgacgttaacctcgccagcgacggccagaaggcaagcgacgtctggctggacaatagccgcgtggcgggccatctgtacggcggcgcggccagcaccctgcatctggccgctatgcctacctttgagggtgcccagttcagccgcttcggtaccctggaggtgaccggcgataccgttctgaacggcggctttaccaataataacgtcggatcggccctgaacgtaaaagggaacaccgtcaccgctccggtccggctgagcagcggcaagctcaccttcagccacacccggctggttgccgatacgctggcgctcagcagcggagcctcgctgaacctggccaaccacagccagctccaaacccgcgccgaccagctgttcaacgccgcggccagctccaccgaaccggtgaaatacaacgataccggagcgcgcacccaccttaccgacagcaccctgatcctgaccgatgccgcctatcagctggattacgttaaaggggtaaacggcctgctgggccagagccagggtaacgcgctggtgatgctgggcacgctgcaaaatccggagaacgccagcggtaccgccagcgtgatcgacgccgccatcaccggcgcggtgctggccaatacccaggtcacctctgctaaaaaccagctctacatcggcgcggagagtgccccgtccgaccaggccatcgccgtgcctacgggctttggtgcctcgcagctgcgctttgaaggagaaggcaaaccgtctgtgaccatcggcaacgctcagtcgctaaccctgaccggcgcggcgggcgccctgatcgaggtcgccggcgcgccgcaaactccggttgccgtagcggttaataacggcacgctgaatctcggcgtgacggccatgcaggacgtaaccgcgcacctgaccggcaccgtcaccatcgctccgcagggcaccatgaacgtcgttgcgggcgaccataccctcacctccggcggcacggctgccgggatcgtcagcagcggcctgctcaacgtggcccatcaggccaccctgcacgccgacgtggcgctacaggatcaggggcagctggccgtaaccggcgcgctgcttgcaggccagcttaccgccgccgaagcgtcgcagatcgcggttggtgacagcaccgccgccgggtcgctgatggcagagcgtcttgatcttcagggtgcccggctgtttatcgacccggcctggacaccgggcggcaccctggcggatgcctcccgggtggcaagcggcggcagcgaggttaacggccgcgtaaccgtggggcaaaacgccctgctggtgctgggggatacctccaccgccgtggccgaagcgcgctttgcggacagcggactacgctggggtgaaaacgccatcacggcggcggtctccatacaggcgccgcagtatctcaacgccgcccagggcgggctgcgggttgacggcactctgaccggcagttcagccgaccgtgacgccgcctttaacagcgtcgattttgccgatcgctctctcctgatgctcagcaccaaagagatgaccaacggccaggccgcgctgaatgccaccggcggcagcctgagcgtggcggacagcgccgcgctttatgtcgcagatgcgaaggccaaccagacctatgcggttgccagaggctttagcgacgtcagcatcgccggaaacggctggcagaatgagaaccttctgctgaataaactgctgacggccacgacgcaggagcgtgatggcgaggtgctggtcaccacccgggcacgcgccgcacaggacgtcctgccgggggtggtcaccgcacacgcgctggatcggcttatcgccagcggggaaaactcacgcacggccacccaggcgggcgcgcgttatctgtccgttgccatcgatatcccgcaggcgagcgtggaggacgtggtgagtaccgttaacagcgcggcgcaaatcgcgacggcgggaggcgtgcagcataatacctgggcggcgggcagcgcggcggtggatgccgtgatggagcgtaactccgttgctaacgcggcgctgcagcctgctgacaccgacgccagcgtctgggttcacgccctgtacggcaacccgcgcagcagcgatctgcgcgccgggaacctgagctacgggcaggacagcagcttctacggcttaatgatggggggagacaaggcctggcagaccgatcgcggtacgctgcgcagcggcgcggcgtttcatgccggtaacggcgacagcgattcacgcggtgacgtcagcgctacccataatgatttcagcttctggggcataaccctgtaccagaactggagtcaggatcgctggaacctgacgggcgacgtcagcctgacccagaccagcagcaacgttgaccagaaacagccgggctggatggaggcaggcggcaagctgaaggcaaacgtggacggaatgctgttcagcgcgggcgttcggggcgagtacctgatcgaaaccaacgtgctggatatcatcccccatgcaggcgtgcgctataaccagctcacaaccgatgcctttgataccaaaaacagccaggatgaacgcgtcttccataccgataaaggcacgcagacaatctggcagttcccggtaggtgtgaaagtggcgaaagccttctcgctggattcaggctggacgctgagcccgcaggccgatgctgctgtggtcgccgtcagcggcgacagggagagtcagaacaccctgcataccgttggcattagcgccagcgataccattcgcgctgagattatggacgacaccgcctttaacggccagctgggaataaaaatgcagaaacgcaatatgacgttcggcgtgggatataacgttaatgcctctcagcacgacaccagtcagaccgtgagcgctacctggtcgctcgccttctaa

SEQ ID NO: 169386 - DNA, 645 bp, Enterobacter cloacae
atgctggacataactcatttcgggctttttgccctgtctgtactcctgctttccgttacccctgggcctgatatagcctacgtggtcggtcaaagcgtggcgaatggtagacgagcgggaattatctctgccgccggggttgcattaggtagctgtacgcatgcggttgcaagcgccgtagggttaaccgcgctgatcgcagcgtcgccggtgatgtttaccgttattaagtatctcggtgcagcttatctggtgtatctcggcagtaagatgattttgggaaccctgacgaagcaaacctcggatcgcagcgaagcagacgccgttaaaacaaaagcgacccatgcgagtctgctgactaaaggtttcataaccaccttaaccaacccgaaggtgctgctgttcttcatctcttttttccctcaattcgtttcacccggtggcgagcacaatgcggcttcttttctggtcctggggatgacctacgcgctgatcgcttttatgactgatttaacgttcgccgtgcttgctggtagtgccgctggcgccgtttcacgaaacagaaagctgcagaaattgctggatcgaattgttggcgtaacatttattgggttaggtctacgattggcgatgactcgccgttga

SEQ ID NO: 169387 - DNA, 729 bp, Enterobacter cloacae
atgtcagaccagacgctcaggcagacccgacagcaggacatcctcaacctgatgagtaaaagcgactggctgaccacggaggcgctggcggataagctttccgtcagcaaagagacgatccgccgggatctgaaagccctgcagcagcagggcaagatcctgcgccagcatggacgcgcgcgcctgattcgtctggacagccgcgacagcggagagccttttggcgcgaggctgaaaagccattatgccgacaaagccgatattgcccgccacgcgctgagctggatcggcgaagggatgaccatcgcccttgacgccagctcgacctgctttcatctggcgcgccagctaccggatatcgaactcaccgtttttaccaacagcctgcccatctgccaggagatggcgaagcgcaagcgaaccacgttaatctgctccggcggaacccttgagcgcaagtatcgctgctatgttaatccggcgctggtgacgcagattaaagggctggagatagacctgttcatcttctcctgcgagggcgtcgacgagcagggcgtgctttgggatccctccgggcacaacgcggcctataaagcgctgctgttaagccgcgccagccagtcgctgctgctcatcgacaaaagtaaatttaagcggtcgagcgaggtgaaggtcggccagctgtcgcaggtcacggaggttattcagagcgagggcgggaagcgataa

SEQ ID NO: 169388 - DNA, 2601 bp, Enterobacter cloacae
atgcgcaaattaacgaacctgaccctgctttcgcagagtattgtaatggcattggcctcattcagcgcccatgcgtccatcacgcctgccgcatccacgccggattgcaaagatggcgcgacaacccaaacctgcggattatctatatatgaccatggtaattactttgaggatccaggagtaaccaatgccgttatggcgaacgctacggcaaccaatatttatatggatggccatcgtaaagagggtgatacccaaacgttgaccgtctccggcacggatatgtctggtcattatattcagggcagcaacggcggcacagtgaatatcaacctgaacaacggcgcaaccgtggatatgattgagaccggttcagaatttaaaacaaccaatacgacgataacggtcgatagttcgacgctgaacggtgaaaacagcgcgggtgattacgacagagataaagcttatatgatgggctccgccatttatcttgacccgatggataaaggctaccataacgtgaatatccagaacggtagcgttctgcacggcagtattgtaagcgcgggcgcgggtgtgcaaaacattaacatcagcaacagcacgatggataaaggtggcatttacgcgggtagcgataaatctgataccaccattaccctgaccaacgccacggtagacggatctcaaagcgagattgcccaaaatatcgatacgctggcggaaaaacttagcgaatatcagcccttcagcgatttgaatctggatgcgtttggcgacgtcgccgttgccatgtacggcacaaaagccgattcgctgacactcaataacagcaccgtgacgggtgatatcggcgtgattaacgaaaaaggcacaaccaccctttcgctgaataaccgtagcgtggtgaacggcaatattacgctgggcggaaattcagccaattcggttctggtggataacagcacaattaacggcgcagtgaataccagccagaacagcggtaacaccaccatcaccctgcaaaataacgccacggtgaatggcgatattaccaccggcgcgggtgatgacacggttgtgctcaccaataactcccacgttaacggcgacgttgacggcggtgacggtagcgatacgctttcaatggacgccggcagcgctatttccggcgaaataagccagttcgagacggtaaataccaccagcgataacagcatcgccattgataaaattcacgatgcgaccagctggagtttgcaaaacggctccacgctcattgccgccaccaccggcagcaatgcgatggttacgatgagtaccgacagctttgtgaacttcggcactattaccggggccaataatgcggtcatcgtaaacagcattaccccgtccgcgatgaatcagcagggcgtcatcctcggcaccttcaccacagcaggcagcagcgcaccgcaacattatgccgccgcaaccttcaccaacggcaagcaggaggttgaaaaccgcagcggtgcctataactacgataacagcctgaatattgttgctgccgacgcggcaccgcagacgatgctggcagccgataatagccagagctggaatattgaatttaacagccagaagggaagcctcgccagcgacgtccaggggctggttgcgggtctggatgccgccgagcaggccgggcatcaggttgcggatgacattagcaaccatatgaaccaggttcatctcgcgaatatgctgggcgacgagcaggacggcgcgcaggtgtggggcgatttcctctaccagaacggcaacttcagcaacgacgtggactataaaagcattacccagggcgcgcagggcggcgttgactggacggctcacctgagcaacggcgacagcgttaccggcggtattgccctggcctggacgcgcagccgcgtgcaggacaccagcaacggcgcagatagcttcaatgacagcgtttacggtaactactacagcctttacggcggctggcagcaggcgctgaacggcagaacctggggcctgttcgctgacggcagcttcagctatggcgatatgcgttactccctctccgccagcaacgtcaccggcgataccagcggcatgaccgaggcgctgagcggctcgacggacggtagcctgtatctggcgcaggcccgcaccggtgttaacgtactgctgcctggtgagaccctgctgcaaccttacgccaccttaggctgggatgagacaaaagcaaacgggttctccgacagcgaagtgacctttgccgacagtcaggtctcttcctggaacggcggcgccggggtacgtctgaccaccatgcttaccgatctgaacaaaaacgtgacggtaatgccgtgggtggatgcccgcttccagaaagagttcagcgatgatacggacattaaggcagcggattaccacaacaccgccggtcacaacaacagcatggggatctttggggcaggcattaacgccagcatcgcgcataacttcacgctcaataccggcgtgtatgttggcacgggagacgtggataacgatgccagcgtgcaggcgggtatgagctacagcttctaa

SEQ ID NO: 169389 - DNA, 282 bp, Enterobacter cloacae
atggcggtaccgggctcgcggtataagccgtctgcacggcagtacagcggcaacacaccgcccccggaatacgacgagggcgtgatggtcaggaaagtggatatcagcggaaagctgagcgtgaaaggggtaagtctgagcgcaggcaaggcgttcaggggagaacgggtcgggctgaaggagatgcaggaagacggccgctacgaggtgtggtggtacagcacgaaagtgggggtgatcgacctgaagaaaaagtcgatcaccatgggtaaaggatgttaa

SEQ ID NO: 169390 - DNA, 585 bp, Enterobacter cloacae
gtgaaaaaactcaccgacaagcaaaaatcccgtctctgggagcgacagcgcaataccaatctacaggcgagcagcctccttgaaaaaggtcatggtcctgctgaaccccacattgatacgctggagcttgggccttcagcacccggtttgccccatctgtgccacattcaccgccatctgtatcgcagcgagatgaagcgggcaggcgagttccgtaccgacgatatttttaaaggtgagatccctttctgccatttcgaatacatcgagacgatgggaaatgaactgatggcggcgctggaaagcgacaggtatctggttggccttcagaaagaggcgtttatcgaacgcataagtcattactactgtgaaatcaatatgctacatccgttctcgagcggtaacggcattgcgcagcgcgtattctttgaacagctggcaatccatgccggctacatcctggactggcgcgatatcgatcctgagcagtgggtggcggcaaaccagagcggtgcaaccggagatttgaccgacctgaaatccatctttgccaaagtagtgagcgaagcgcgggaatctgagtag

SEQ ID NO: 169391 - DNA, 462 bp, Enterobacter cloacae
atgaatatgtggtatcaacgctgggccgacgcgcctccttcccggcgcgtgctttgctggtcgatcgcctcggctattgttgcgcttgcgatctgggggctgctgctgagacccgcttatatccacttcgcccgcattcaggcgcaggtccttagtgccgggcgcatcaacgcgtcgctgtggccacgggctctgcggcagccggtggtagcgcaggtgagaggcgcgcattcggctgagcccttttccccgctggcgcttcagggagagggcgccaggctggtgcactggaaaccgcggcagatcgggggagagctggcgcttgacgcttcatggcaggcggtcccggcgctcttttcccgtctggcgcgtaaggacgtgcgggtaagcgcgtttgacatcgcccctcagggcacgcagcttcgcctcagcctccagctggagaccggccatgcccggtaa

SEQ ID NO: 169392 - DNA, 495 bp, Enterobacter cloacae
atgagcatgccgaatctcttaccgtggcgccgggaacggcgcattcagcagctgcggttctggggcctgctgtacgccgcctcgctgctgttgatgctggcgggaggcgtcagcctgcgtgtggcgcagagcctcgcgtcacaggcgttgcagagcgatctggcgggaacgcgtgcggttcagaaggtattgaaagcgcggcagccgcagcctgcgaaagcgagctccccttcgcagccgccggagccggtagcatggcaacccgcgctggaatcccttgccagcgcgatgccgcagcaggcctggctgacgacgttacgttatcagcccccctcactgatcctgagcggctacgccacctctttcacggcactcaccgccatgaccgatgcgctggagcggataaaggggtttatccccggtccggcaggcgcattgcagcaggatagccgggggcggtggatgtttacgtttcagcttcatagccggaggtag

SEQ ID NO: 169393 - DNA, 1758 bp, Enterobacter cloacae
atggacaacagtgaaacgttatccccttcaacgcgcctggccgtcgtgctggcgggcgccttacagggagtgctctgctatgccattacctggtacatcgggtatgcgaaattgccgaccgatacgctgtggttgatgtgcgttattcctgccaccgtggtaatgacgaccacgatgtcgcttgctgtgacatcgttccgaaagccttttttgtggctggcgctcgggatgaccggcgcggccgttgcggccatgggcggctggcttaagtggagcgtagcggggctcgaaagctggagcatcagggatgagatgctcgttttcggctttcacctgctgctgatgacgctgttcatactgccatggctacagcggcgtctggatcccgtcccgactacctccttttacagcgacttttatcagcgaaactggcataacgcgctgacgctgctcgttatttttgtttcaaatggcctcttctggctggtgcttttcctgtgggccgagcttttcgaacttatcggcatacgcttttttgatcggcttttcttccattctgacgggtttatttcagtggcgactggcgtagtttcagccagtgcggccgtgctcacgcgcgtgcaggtacggttactccttgccctgcaaaacctgctcaccctgatcgccaccggtctgctacccctgatggcggcgctggccctgctctttattggcgcgctgcctttcgtcggcttcgaaaccatttcggccaggatatccgccgcgggcttgctcactaccctggcgctgctgctgctattcctggtgacgatagtgtggcatccacagcgtcaaacgctgccttactatgccccgctgcgagggatgattcgccttgccgtggctatcgtacccgcatatccggttctggcggggtgggcgctttggctacgcatttcgcaatacggctggtcacccgagcgtctttacggcgtgttgataaccatcgtggcgctggtctgggcggtcggattttgtgccagcgtcctgatacagcgtcgtgagccgcagcagatccatacgtacgtcatcccggcgaccgggctgctttccctcgtcttcctgatgttgatccatacccccgtgctggatccgtggcgaataagcgtcgcaagccacatggcccgctatcagaccggaaaaattaccgcggatcgggtaagcctccacatgctcagccacgccgggcgcaaggggcgtgaggcgttacaaacgctgcaaaacgatccgcagtttatgtctaacccgaaacgcgcgcgtgaagtgaaagggttgctcgccggcagcccccggggagcgggacaaatgacggccaccatgctggagaaagcgatccagctcgcgcccggcatgccgcgtcccgatagcgcgctatggcaagcgatgctcagggagcagtatcggtttgaatcctgcagcagggcgcagagaaactgtttgctcatgccgctggacctgaatgctgacggtaaacctgaggccgtgctgtaccagtttaccgatcgcgccatcatggcctatacgcataccggtacgggctggcagcacgtgggggatggttggacaatgccggaaggactgacgcgcgaggagctggaccgtgccttacagcagggaaaggttaagccggtcgtgaagccctgggcagatattgaaattttcggggaacgcgtagatatgctttacggcagtggcgctagcttacggcgcccataa

SEQ ID NO: 169394 - DNA, 1350 bp, Enterobacter cloacae
atgattaatcctcttccgctgggccagtggctcaacgcgccccgtcctgacgatacgcccgttgcctggcgcggggagcgcctctggacgctcggcgacctgcgccacgacgtcacgcgcctggtcgacgcgctgcgtcatgaaggcggcgatcgctgggcgctgtgcgttgaggacggctatctgtttattgttgcgctgctggcgacgctgcacgcgggcaaaacgcccgttcttcccggccacgcccgcggcgcgcagcttgatgagcagcgggcgctgttcagcggcatcctgagcgataccgcgcttgacgttcaggggcgacagctgcgggtgacttgcgcaacgcggacggaccgcgccttttcaccgctgcccgatatcgacaaaacgcgcgtgattgagctttacacctccggctcgaccggcacgccgcagcgggtgagcaagccggtggtcagcctggatcgcgaagcccgcctgctggcggaccattttggcgatcgcctggcgggccgtcacgtcgtggcttccgtggttctgcaccacctgtacggcctgacgtttcgggtcgtcctgccgatggcgctcggcctgccgctgcacgccagcctgctcagctatgccgaacagctctctgccctgcccgacgataaacgctatcttttcatcagcagcccggcgttcctcaggcggcttgacccgtcgctgacgccgccgcccgtcgacctccttctctccgccggcggcgtgctgccctggcgggatatcgccgcggttcacggctggctcagcgtctggccggacgagatttatggcagcacggaaacgggggttatggcctggcgctaccgtcaggaggaaagcacgctctgggagcctttccccggcgtgacgtttcacggcgaccgcgttttgtcgccgctgatccacgagccggaggggatcgcgctggatgatatcctgcatttcacggctgacgggcggttcagcctcgccgggcgtcgggggcgggtggtgaaaattgaagataagcgtatttcgctcgatgaagtcgagcgccgcctgctggcgctggacggcatccgcgaggccgccgcgctggcggtcacgcgcggcgggcgtcagggcattggcgcgctgctggtgctcagcgacgaggcgcgtctgcacagagaaagagtgggtaaaaacgttcaggaatctgcctggcgtcgcgcccttcgtccctggcttgagccggttgccgtaccgcgctgctggcgcatcgttgatgaaattccggtcaacagcatgaacaagcgcgtgaccgcgcagctacaggagctatttcatgaagatgcatga

SEQ ID NO: 169395 - DNA, 474 bp, Enterobacter cloacae
atgcgctatttaccgccaggcgattatcttcctcacgacgcgccgatgatgctgctcgaaaccgttgagagcgtcaccgacgacagcgccgtctgccgcgtgacggtaaacgggcagggcgtccttgcgccctttctgaacgctaatggcgacctgcccggctggtttgcgctggagctgatggcccagaccgtgggcgtctggtctgagtggcaccggatgcaaaaagggctgccgcactgtgcgctgggtatggtgctgggcgcgcgcgagctggcgtgcgccgcgggacattttgccgcaggcagcacgctgaacatcaccatcgaacgcctgatgcaggatgaacgcttcggcagcttcgagtgcaccgttcagtgcgacggcgtgcccctcgccacgggccgcgtgaataccttccagccgagcgaggatgaattaaccacacttttcaaccagggaacaccatcatga

SEQ ID NO: 169396 - DNA, 408 bp, Enterobacter cloacae
atgccattcagaacggttattagatggctccatcggcttctcacgcttgtacttctcatcatggttacgggttttatctggctaaaccaacagcccgatccccgcagtaacgacgagctgcagcatgtttatcacgtttcggatagcgtttggctgtacatgacggcgaatcatcacggtggcgcaaccgtgccaactatttaccgttattatctgtcaaataagctggtgggcgatgacgcggacattattcagcaactctcaacgaaacttcccatcattgagggcactggcactattacgaatgccagcttaaccaaaaacggggcagtgagcatatcttacagcggtaaagttatctcgattcaggaaaatatctcagacctccggttcacgattacgccttaa

SEQ ID NO: 169397 - DNA, 528 bp, Enterobacter cloacae
atgcctgtttttaccaccgcgcgcctcacctgctcgcccctgcaggagcaggactggcccttttttctggcgcttcagcaaaacgccgaggtaatgcgttttgtcgcggaggatcgcagcgaggaagacgttcgggaagcctttgaggcgcgcctgacgccctggacgccgggctgcttacgctggctgtgccttgtcgtgcgcgatacgtccagccagacgccgctgggcgtgaccggctacgttcaccgggaagcggattgtgccgaagtcggctttctctttgcgcccgcggctcagggaaaaggttacggctatgaatctcttaaggctctgtgcgatttcgcgtttacgtcgggcaaaattcgtcgcctcaccgcgaccgtgacggcgggaaatatcgcctcaaggcggctgctggaaaaaacgggctttctgctggaaggcgaacttcgcgagagttatttcctttcggggcaatggcataacgactggctattcggtttgttaaaaaaggaatatcgttaa

SEQ ID NO: 169398 - DNA, 339 bp, Enterobacter cloacae
atgacaggttatgcactgcaaatatcttctgctgcaattgctttaattaaacaacagcagggtctttccctggaaaaatatcgtgatgaaaacgggatgtgggttattggctacggtcacgtgatacgccagtgggaaaagtttaacggccccatcactccggcagaggcggagtacttgcttctcgaggatatccagctttatgaaacgctgctgcgggaaacgattggacgccccttaccccaacagcagcatgatgctctggtattaacgctcttcagcttcgggaatgaatccctggtgccagagacgatccttcaggccgtcgcccgggtgtag

SEQ ID NO: 169399 - DNA, 153 bp, Enterobacter cloacae
atgagtatgctacttaccctgcacctggtgaacacgcgtcagtccgatccggtgccaaccgatccgaccccaatgcctgaccccatcccccgtccgcagccgatgccggacccgccaccggatgaagagccgattaaattgtcgcatcgttag

SEQ ID NO: 169400 - DNA, 822 bp, Enterobacter cloacae
atgaaagacagcatcagaaagtatattctctcctgggtggagcagaataacttcactattttgcatattgatgatcttgttgcagatatcggatatagcagaagaaccatcgaaacatggtttaaggagcattatcagctctcactcggagaatatattctccgaaggaggctgagccgtgctgccattatgctaagaatgacgtctattccggtgacggatattgcctatttattccattaccagagcagccagagtttttcgagagcctttaaaaaaatgacgggtctgacgccctctgagtacagacatgccagagtgtgggattttgatatcttacagccctcatttttattaagcgaacaacaaacgcctgagctcgaaatatgtgagctgaatgagacgcttatctttaaccatcaaattatagagcacgatcatctttttgatacctcggtgcatgatattactaaaaaaatcaaaaagctcctgacagaaaaccgtcatgagatcgagaaaattaccctgctgccccgccgacccgaactcggcaaaagccgatcgtatctggtggaggtgttaatatcttacgctttacaaagcgacactaaggataataaacaaacgtgcgtagtgcgtggtaaatacgcaagaatgccctttagcggtagctgggaaagctacagcgcctttaacaagattgccttcgttaaggcgatggttaaaaatcgcctgacgctgcgcgacgatatttacctcatgaaatttaattcgtacagcgaggaacatgtcgattttgatgtttacatccctgtcctgtag

SEQ ID NO: 169401 - DNA, 1347 bp, Enterobacter cloacae
atgaataacgttacgttggccgagaagatgatcgtgctgtgcggtgcattcctttttgcactcatgatcgcggtgaactccttttgcgtgaatgacagtccaggtttcagggttcccatgacaacgtacctaattgtcatgattgcgctgttttttctggataccatcatctttatttttatccagatgcagtatgcgtctgacaggtcgcacccttcattattaatactgagcctggcgtttttaagcgggctggtctacttcattgaaaccatcgtgattattcagcttccggaaaacgccgggttttcctatgcggtaaaaactaacgatacggcggtgttttattttttccgacagctcagcctgatctttttgctggcgctcgccgtttgggtggagaagctctcaacccgatcggtactcgggcgtcgtaataaggctaaactggctctggcattatttattccgctggtcgtatttccggtgctggcccattatctgagcagctaccatcccgcattgtcgttaacgatagcgtcagacggtcgtgaccgccacgatccggtctggaacgtcagttacgttaacgttctgatcgcgctctggtcgtttttgctctgctatatgacctatgtgacgcgactgtcatccgggatctggaacagtattattgtggtgtgtctctcggccatcatttataactttttcctgctgctgcttgatacgtacaatatgtcactctggtatatcagccggacggtagaagtatttagtaaattgtttgttatttgcaccttactgtttcatgtctttagcatgttaaaaatttttggcgaccgggttaatcgcgatccgcttacgcaaatcttcaaccgtaaatatttttatgaggcgcttcagcggatccgcacgctcagaacagaaaagggggccagcataatgatgctggatatcgataacttcaagtctattaatgatacctggggccacccggcaggcgatcgcgtcctactcgcggtcgtggatatcatcaaagacagcatccgggataaggatatctttgcccgactgggaggtgaggagttcggccttctgctgccggatacggacgcaaatctggcgctatccgttgcagagcgcattcgccagaacgtccagcgtcgcaccggacagggtaaccactatgcgattcccgcagaggtaacgttaagtattggcgtgtgctctgccattcagaacagcctcaacagtaacgatgtcattcgtaacgtggatgatgcgctctatgaggcgaagcacaacggtaaaaacagaaccgtcaccagacaggctgaatgcagctga

SEQ ID NO: 169402 - DNA, 399 bp, Enterobacter cloacae
atgaaaaactggatcatgtattcgcgcaggaatggcctgcgcaagggcgtggaactggcggtaacctgtcttttatgggccgtgttcacctacttcgccacgggatttatctctttttttcttaagggatttacgcaaggggatgacgcgtattcgcggctattcctctatttcatcctggcgatactcaacgcgctggtgctggttctctgggcgctttataaccgctataaacaccataacgtagcggttcagcccgcccgcgtcgcgagtgaggcggagctggcgacgagcttttcgcttgcgcagccggtttatcagcagttccaggccaataaaaagctgtacgttgattttgacagccatggcgatgtggtgaatgtcacctcagagcagtag

SEQ ID NO: 169403 - DNA, 2022 bp, Enterobacter cloacae
atgttacggaaaggatttcaaacattactcgtactgctcggcattatgctcgtggcagcgtgcgtcgacgggcgcgggccggcctataccagcccggccctgcgcgaaaaattacgcgccgagacgccatggccggcgaatggcttcgtgacgattgcgtatcatgaggtcgaagatggcgaagcggatcagcgctttatgtccgtgcggacctctgcgctgaaagagcagtttgcctggctgcgcgctaacggctatagccctgtcagcgtggcgcagatccgtgaggcacaccgtgggggaaaaccgctcccggaaaaagcggtgctgctgtcctttgacgacggattcagcagcttctacacgcgcgtctatccgctgctcgtcgcctatcagtggcctgctctgtgggcgccggttgggagctggatcaacacccccgccggacaaccggtgcaatacggtgatgagaagatcgagcgtgaacgctttgcgacctggcaacaggtgcaggagctctcccgttcgccgctggtagagattggcgggcatacctggaacagccactttgggacgcttgctaacccgagcggcagcatgcttcctgcctttgcgaatcgtcggtttattcaggacggccgtcgctatgaaaccgaaacggaataccgggcgcggatacggcgagacgcgcagacgctgataagccatgtaaaagcgcataccggcaaagcacctacggcctgggtgtggccctatggcgcggcgaacggtacggcgattcaggagctaaaggcactcgggtttgacatgtttttcacccttgaggacgggctgtcaacggccacgcagctggatgcaattccccgtatcctgattaacggcaacccgacgctggaagagtttgcgcttcaggtgacgggggtacaggagcagcagcttcagcgcgtgatgcatgtcgacctggactacgtatttgatcctgatgccgggcagatggaaaaaaatatcgatgcccttattcagagagtgaaagacatggggatcaccaccgtatacctccaggccttcgcggatccggcgggtgacggtctggttaaagcggtctacttcccgaatcgatggatgccggtaaaggccgatattttcagccgcgttgcgtggcagctgcgtacccgggcgagcgtggccgtttatgcctggatgcccgttctgagctgggaaatggcggaaaccttaacccgcgtgcatagcctggagacaggggatgaggacggccctcaggtcaatccttcacaatatcgtcgcctgtcgcccttcgacgatcgggcaaggcagcgaatcggtgaggtgtatgaagatctggctgcgcacgcctcttttgacggcattctttttcacgatgacgccgtgctgtccgatacggaggatgccagtcccgctgcgctggatgcttacgaaaaagcgggctttggacgtgatattcgggccattcgtgacgacccagagcgatttgaggcatggacccgctttaaaaccgaaacgctcacccgcttcacgcttgagctggcggataaagtaaaagcgatccgcggcccggaaatcaaaacggcgcgtaacctgtatgcgttgccgttgattgaaccgcaaagcgaagcctggtttgcgcaaaacaccagcgactttctcgcccactatgactggacggccgtgatggcgatgccctacatggagggagtgaacggtcgggagggcgataaatggtttaaagcgcttattgctcgtgtagcagcgttacccgacgggaaaaataaaatgattattgagcttcaggctcgtgactggcgtcccgacggccagcatcaacatattgcatccagcaagattgcgcactggatgcgtattatgcagttctccggaataaaacattatggttattacccggatgattttttgaataatcagccgaagataaatgttattcggccagaattctcaactagctggtaccctgaagatgaataa

SEQ ID NO: 169404 - DNA, 2430 bp, Enterobacter cloacae
atgaggattgcacagttaatagctaaaacgttagttgtcggcacgttttacctgccttgcgcgccggtgtcggccatgctgccagcggatgataaccagtacgacgtgctgattattgaagcgagaaagggaaatactcagcctgcattaacctggttttccggccatcaacggcttgatgaatcccagattgccgactggatgcagattgccctgtgggccggtaaagacagcgaggttatcgacgtttattccaggcaccagcattacgcgctgccggcgagagcctgggccgcgctggcggtagcgtggcgtaataaacaggagtggaaaaaagcgctcaatgcctgggaccgcatttgcgatgacagcccgtacacggcggagttttgccggggaagggtgttaacgctggccgacagcggcgagtatgccggtgcgctccgtgagatccgtcggctgcagaagagaacgccggacagcaaaaactacctgactgaagcctatgtgcacaggcttgccggaaattatcctgatgagttactcgctattacgaaggcgatgcgcctgtcacagcatcctgaaacgctggctgatgcctatcgccaggcgctggcggataaccagctgccgtcagccgggttaaagcacgttcaggcgcaggggaaagagcctgatgcccgcgaacgtgcggacgcagcggcggagttagtcaggctcgcgtttatgccgacccgcggtgaaaaagagcgttacgtcatcgccgatcgggcgttgtccctttacgacgggatgatcgccgagtggaaagagaagccggagcatgaggcggtgtatcgccgtattcgcttcgacaggctgggggcgctgctggcccgcagccgccatcaggaggttatcgggcaataccaacagatgaaacaggaaggtctggtgctgccggagtatgcccagtactgggtcgcgtcagcgttcctcaaaacgggccagcccgaccgggctcaggcgatgctctccaggctgttttatcagaatcctcagaaggttgatgatatttcggaggaagagcgtgccgaccttttttacagccatctggaaagtgaaaactatcgcccggcaaagctgctgacgaaacgcgtcgttgataccacgcccgccacctggtatccgcgcggatcgtcagtgcccgtgccgaatgataagtggcttgaggggcagcagtaccgctcctcgcttgcgatgtatgaacaggatcttgcccgggcggaagcgctgacgcgtagcctatcgcaggcggcgccgggtaatcaggggctccttatagatcatgcgcgcgtgctgcttgcgcgtggtctgccgagggccgcagaagcgcgcttaaagcaggccgaactgcttgagccttccagcgttgccctggaaaccgaacaggcctatgccgcgctggatcttcaggaatggcgacaggcggaggagctgacaaaggatgtagcgcaacgcgcgcccgacaacgcggcggtaaagcagctcagcaaggcgtttgccacccatgagcgcgcagaattaaggatggggggggcggtcagcctggactctgattcgcctgattcagggcgccatgatgttaacgtcaataccaccctttatagcccgccgcttaactataactggcgtggattcgtcggctacggcttctttgacggccgtttccaggaggggaaaggcgtggttcgcgacgggctcatggggctggaatggcgttcgcgagacctgtgggcagaggctgaagtctcggagcgacatttcaacggcgacaggaaagtcggagcacgccttgcagcccgggttgatgtcaacgatagctggcagctgggcctggaaggtgaacgcttatcgcgtaacgcgccgatgcgcgccatgaaaaacgatattaccgcgaacagcggtggggcggaggtacgctggtatcagcatgaaagccgtcagtacagtgcccgctacctgaaaaccgctttctctgacggtaaccgcaggaatgaatatttcctcaatggtcaggaacaggtctgggcttcgcctgatatgaacctgagtatccagcccggcgtgtattacggcaccaacagccagtctgacacgccttacttcagcccggaaaaacgtctcgacgtgatggcaggcgtgacgctggatcatcggctgtggcgtcggtatgaaaacagctggacgcagaccttcagcgccggtgcaggtaatgcgtggcagcacggctatggcagcggccttatcacccatcttggctacgggcaacgcgtgtcctggcgcgacggtggtgaagccggtgtggcgatacgctgggataaacgcccctatgacggaaagcaggaacacaatctgtcagttgattttaacgtgacccttcgattctga

SEQ ID NO: 169405 - DNA, 963 bp, Enterobacter cloacae
atgcacatcgaaacccctatagtcagtgacatccgcagcgcctcacgtctgatggtgcgagagcttggatttatggcctcgacgctggcctcaacgaattattccccttccgccgtccatactctggtcgaaattgggttgcgtaaagagatgacggccggacagctagtccagctgctggggctggaaaaatcaagcgtcagccgaatgctggctcgtctgatagccgctggtgaactggaggagttcgcatcaccggaagacgccagggcaaaatgtctccggcttaccgcaaaagggcatgcgaccgtccagcaaatcaacgcttacggtagcgagcgggtgatttcggcaatacggtcgctgactcccgatcaacagcaggccattgcccgggggttatcgctttatgccggtgcgctgctgtcgtgccgcgaaaatcctgcggataaattctcagatgagctggagattgttgagggctatctgcccggtatgataggccgcatcacggagatgcacgggactttctacgcccgcgaacaccagttcggcagcttctttgaagccaaagtcgcttcggggctggctgagttcagcggacgtcttactaatccctgtaaccgaatctggctggcgcttatccagggcagaattgttggctccgtagccattgacggtgaagatcttgagcagggagaagcccatctgcgatggtttattcttgacgatggatgccgtagacatggggcgggcaaaaggctgctgaaggaagcgatgaatttttgcgacagcatgggtttctccgcggtacacctctggacgtttaataagcttacggccgccagacgtctctacgaatcctttggctttcagcttgccagtgagtgggagggcaagcagtggggaagcctgattaccgaacagcagtttacccgccttaacggctctttaccggaatga

SEQ ID NO: 169406 - DNA, 411 bp, Enterobacter cloacae
atgaacggaaaagcggtggcagcgatcctcgggattgcgatattaagcggatgtaccagcagtaaaccttcccctgatcggcacgcgttttattttgtctcgcatcagtccggcttcaccggcggcaattacgcctctgacgtgcagaagaactatcgccttaacgtggtgcagttccgcgagctttacgcgcgcggcagggccgaccgcacggaaggccggacgcaggaagaggcgcatcaatacgccgaaagcatacgcgatcagctgaaggaaaatgcgaagtcgcaggagtccttcgcaggcaattcgaaggataagtggacgtcggcaatggatgaaaaggatgctgctttatttggcaacgaactggcagcgacttatcttgacggctataacggcgtacaatag

SEQ ID NO: 169407 - DNA, 1185 bp, Enterobacter cloacae
atgacattaatggcgggcagttcacctgcggcagccgagtggttccagcgcgcgacgttgctgcgccgggagcagctcggcaggctggccgcgcttggcgtgctggtgaatggcatcagccgtctggcacatatgctccagtgcgagcgcggggcatccaacgtctggctctgctctcagggtaagctgtatgtccccgaatgcaaagccagtcgcgggctggtggatgaaaatctcaccgcgctgcatgccgagctcagcgcgcacttcccggtcacggggagcggcgtctgcgagcgcatcgcctgcgcgttgctcagcctggatacgcttccactcctgcgtaacgggatagatgcgcaaatcgtcacggctccccaggccatggatcgctacagccggatgctccgtcagctgctcagtatcgtaccgcagctgaatgacagcattgacgatccgcaaatcgcgggccgttttgttgccctctatagcctgatgcagggcaaagagctggtggggcaagagcgcgcgcttggggccattggctttacgcagggttttttcaatgaagacacccgtcagaagctggttgaccgcattgacggacagcaggcctgttttgagatctttttatcccatagccacgcggacgtgcagaacacgttcgcccgtcactgccagcccgaccgtgagacggagcagctccggcgcgtcgcctgcacgcggcagccctccgctgacaacggcaataccgcgctgaactggttttcactgcaaacgtcgcggcttgagcatctgcgcacgcttgaggagatcgtgattgccgacctgatggtggcggtggatgaggcaattcaggcctccggtgcggccgcgatgggaggcgatgaacgcgacgacccgattgcgccttacccggataaacccctgctgacgctggtgcgccagcaggcgcgcgagatagaacagttatcccgccagctggcctccctgcgggacacgctggaggagcgtaagctcatcgataaggccaaaagcatactgattacccaccagaacatgagcgaggagcaggcgtggacggccctgcgcaaaatggcgatggataaaaatcagcgcatggttgatatcgcccgtgcgctgctcaccgtcaggaacctctggccgctaacccctaaggagtag

SEQ ID NO: 169408 - DNA, 591 bp, Enterobacter cloacae
gtgcgcctttttatgattcagcaatttgaaacgggcggacaggtgcaaattatttctaatgataactattttatcggggggctgaaggttatcgcagaagagatgccggctgtgaatacccgccatctcgtcatttttgataccgggttgcgctcggcatatatttttgattctggcgaactgcaaaggaacaaaatattcgatccttacagcgcgttgctgcactgccgcagtttttattttaagcgtgatgtttctctggagacatatgccttttatctgtctggccatcgggttaatactctggggagaccgcacttaaccgagagagagaaatgggcgattagggtgatgtgcgaagaaaccgatgctgatgacaaggccaggttgcgccgtatgaaccgaaaaacctatagctcgcataaggtaaaggctcttggtaagcttggcatcagtaatgcgctcacgctttattcgctgctgcgggtgtggaaggataattggcccgccctttgcccggagagcccgcgggatggggagccttcccgatacaggcctgtaaacgtggtggctagagtagctaacttgtaa

SEQ ID NO: 169409 - DNA, 804 bp, Enterobacter cloacae
atggctaccatgtcaattaactccggctttgagccgagaaaaatagatcatagcattttacattccgtgacgaccgccgtgagtgatggtctgagaacgattaagcgaggctttctttcctgtctggaatgtgttgcaaattcgctggaaacgatgggcaggtccgttcagtccggactgcggcatgttgcctcggcgataagctcgcttgtgccgaataagagtaagaccgcaggtaacccgaaactgaataatatccaaccggctgcggctgaagagctacgtttggccatgacggaacgcatggataaaaatcctgattatatggtgggtatgttcagagaaagcctcgagctggataaaattcggacgatcaacgccgcgctgaagcagccgggaaagatggcggatgctatccgtagcggtgatatttcgggcacaaacgcggcggtttgcgtcaagcgctggctgggtgaaacggtcggtgaaaataagctcacggcggtagaaatcgagagtcttaataaattcaaagatgatccgcaggccgtgcaaacgctggtctccagccggtttggcgctgatgcacagcgttacgatgtcttctgctcattactttccgttcctcagcgatataaagagatttgctatgcagaaggggtagataataagtcgccctataatctcaccgtactaacgaacgcgggattgccgctgcagatcttttcgcatgaagcctatatgcgtgatccagcgaaatgcaatgacgctttgtttgtcctgatggagcattgctccagatag

SEQ ID NO: 169410 - DNA, 249 bp, Enterobacter cloacae
atgagtaatatggtggtggataaccatgcagaatcgttggtcgctaaccttatttaccaggtgaacggcgtgctgcctaaggatatttcattacaccatagccttgtgaatgacctgcttatggattcgattgagctgatcgatctgcttatgcgccttgaggaaattggcgtcgcgattcatgagtctgaaataacgagcgagctgactgtgggggatattgtcacgcacgtggcgtcaattcactga

SEQ ID NO: 169411 - DNA, 2118 bp, Enterobacter cloacae
atgcgcggaattacccgaagtttctcacaaatagaattaatacgcccaaacgtgcaaagcaaaggggtggcaaagaatgcaatgcagcagcacgaggtgcttgcgaagcttaagcacgtaaataacacggcgcgcgagaattttattactcaacctcatgacgaaacgcttgctcgtgacgccctgcgctctgaaattcaattaggcgttccggtcaaactgcataatgccagcctgacctataacgggacgcgagcaagggatcttatcggattcatatctgaacaggtgaaggagcacggcacgccggcggataaagaaaagctggacagcgtaagcaacaagctggcgaatctggccgggcgcgagaaggatgagaaaaaaatcgccggtcagcttgatgacctggtgtctaaatttgcccggcgctcaggtgaaaagttcattaataactttatggaaacgtactgctatccggcatggctcaagtatcacgaaagccagggcattgacgtaaaggataaagagacgtttaacgaacagctaaatgcctgcagcaccgttttaaacaggcgtctggatgtgatgagcgagccgggtaagccatgggaattgctgactcagaacatgagcatgctgatagacgaatgcgcggccgtctcaaaggcgctgatcaggcatgacttcgatgcaccgcccgctgatgctcattccgaaaagcctgcgacaacgccggaagcggtaaaagccacgccggatggccggagatacgatattcacggtggagcagataagggcggcgtaacgcttcacattaataattctaactcgaaccgcaacggcgacatttcgaatgccccggtgtatccgggtggaaatcctgctgtcgtcgatccccacaccagaaggctcgaaatcgtcgagaagctaaacattagcccgaaggaaaagtatgagttagccaggcgcatcatcgacggttgttatggttcacgcgtaatagatcatatcgaaagcgtaagggtagggaatcaagaaaacgtaaccgaacagcctcaggtcattccgcctttcgctcagcagagcgaggatcggcccgtcgatgatagcgtgaacacgcgcgctgacgacgttgattcccggaggacaggagcacgcgcgcaggatccggatgagcggagcccggattcaacccggaacgtctctaccactgcgccggaaacagcgccgccagtggaagggacccgtactcgcccacaggatgagcagcggtcggcagctgccacgcgcagcgtagcaaatcaaacggcagtaaccattcctgccggtgaaaataaaacgtcccagatctacaccactgagcgaacgctgaaccagtggagcagacgtgaccctgtgaaggtaaatcactttgtgccgatgaataagccagtggaggcgttccccaccctgaagccggtgaatggtcttcgtccgacagcatcgccgacgcccggacaaactgcggcgcagccgcccgtggacgaatcaatgagatcgaccagtgacgtattgcgctccggaacgacggttcgccagacgctacaggtcacgtcttcatacttgcctgagcccagcgttgccgaacttgtcaccctgaacgatttgggtcaagaggagccgccagtctcctcgtccgtggacgaagcggatggtcgcatacagaatgccgctcgccgtggtgcacgcgaggctggagatgtgcgtgaagcaaggccggaagagccgggcagcgggcatcagactgccgcagcggatgcgtcaggcattccgtcgccgcaggtgagtgccgcaaatccatttagcatcgctgatcggatcaggtatttcgaagaggcccagaagatcggggcacagccagcgtctgccagagtatcccgaccgaccagcagcaccgccccgggccatgtgtactccacgattagaacgcgcagccagtggaattttgacgttcctgaaccaaaatccttcgttccaaggaataccgaggcgtcgacatccggcaccgtgcgccgtggcgacgcgacaaaaggcagcgtgacggacacgaacccgactggagagtacggcgatgagtaa

SEQ ID NO: 169412 - DNA, 441 bp, Enterobacter cloacae
atgccagttaataatgtctattctaatgctactttttcatgcctgccggggcagggtgtttgtgaaaccgcatctgcatattatgcccgcattggcggtcttaaatttagcgctgcaatcagcaccgaaacgctcgcatggtctgataatgaagacacgatgaggaatgaggtacgcgttcttagctattgcatcggtgcgaaactgccgccagcagagcgtgagtcccataacgtggtgatgtttccgcagcagcgtttccccgcgcagttattttcggcacatgcccagccggaacaaacgtggcgcgaatctatcgcgccccctgaagttcatcattataaagtccaggaatgtggctcaaaacctaaatcatcctttcagcgtttctggcaagggttactgcaaagtattttaccctgcgtcaaatttcaaaaataa

SEQ ID NO: 169413 - DNA, 1122 bp, Enterobacter cloacae
atgcttccagttagcggcagcgcgactgcgcccgttcgccctttagtagttgaaacacccatgatttctgcttcacaggtcgcggaagtcggcatgggatcaacgtctgaactgaatacggtgttattaaaacagctcatttccgccttaacgtcgacggaaagtgataaccagctagaggatattcgaaaagttttgcagcagcacggtctcgagaccagtgatgaggctttcctcaaaagcaagctgcgcgcagcgctggcagagataaaggcggcaaatgacaaggctggcacgacagccaccgtggaggagatgatctccgtcaggtaccagcaggttgataaaacggcagccgcactgggtacgattaaagatgaaatagcgcagaaccgaatcaaggccaacttttctgagaaccagctcaaagcgaccatgcaaacctcacttcaggaaattgccgaagctgaagaggccgcaaaagccagaactggtgacaacgagatttccgttcataccagctacagcaagctctgggcggtgatggccgaggccattaaaaatatcagaacgaactacgtcgatttctatgctggcctgatgcagaaatatacggagatgtatgaggcctacaacgagtatgtacagaaagccagcgctgatgctgtaaaggccggtgaggatggtaataacgttgatttcaataacaatacgatgaaggggggatacgataaatttaataatgccgttaacggtatggatctcggcagcgtcgccaactgggataaaatgaccgatgagcaaaaggccagcatgacggccacgcttgagcctgcctttaaggttgaccagggcagcggcaaaataagcttcaatctcgatcaatataacggccgtccttattatccaagcgatggcggcggaaaagtatcgacctccagctaccaggcatggctggcttcctttaatgccatcggcaccgggctgcaaagtaatatgcagtcgttcgcccagcgatatacgcaggccaacagcacattcgataacctaaataaagtgctgagtggtgcgataagttcaatggccgacagtgcaaaagacgtgcttaaagcactggggtga

SEQ ID NO: 169414 - DNA, 1233 bp, Enterobacter cloacae
atgaccacatctatttctaatgtatccgcacgtcccgttcaaattaacttcaccgaaagtcaaaagacggaaaatgcgaagccggaaactcgcagcccgcagaacgtgtccgagtgggccagcgaaaagggcatgctgtcatccgtcatggatatgcaaagcgcccgacgcgatgaggctcaggccgccgccgtggcgcagcgaaacggtggcaatgatgttaacagccaaagcgcgatgtcaaccgtaacgctttctgccgcaggggaaggtgatgcgaataagtctgaacgtatggcgtccgctatgccgagcattatggcggcgcagaccaatattacccagcccaataataaagcggcagaaagcaaaagcgctgttgacacctccggtaataccaccaccaacgcggtggggcagactcgctcccagccaacggttgccggcggaacggatattaccggtgccgattcggtcaagccgaccttcatcaacgtcgtcggcccgatgagtcagatcgtcctgagcaataagctgaccgttgcgctgctggaaagtgaaaatacgcagaatatgtcggcggcgaaagcctcgaaccgctttatcgaatcgacggcgcgcagcgcgcagaaagggattgaagccgccgaggagcgtcgtgatggcgccatcgtgggcggcgtaaccgctgcggttgcacagggcggcatggcggtggcgtccactaatgcgctgcgtaaagaaaatgcatcgctgaaaaacaacgttgccgtggcgaaaaatcaggaatttggtgttacccagcagaaaaatgccattggtagcgctggcgacaacatggtcatgaaaggacagcgcatggacggcaaggtcaaagaaaccatgagcaaaacccagggcgaagagcagctttctgcgtcgcagaagcatctcaaacacaatgaaattcagaacaacacgcagaaagttcgcgtggtcaccgagctgggcaaccagctggcgaataccacccgcaatattaccgaaggggcatataacgttaacgccgccgaaatgcagggtgaagcagatttagcccgcgccgacggcaaccagaacagcgaactggccaatacgcataaagaagtggcgaaaaaagcggcggatactcgcgcggcgcttagccaggctgctgaaaatgtgctcaatgcgaacaacagcgcggcgtcaaccatcgccgagcgcatgcgttaa

SEQ ID NO: 169415 - DNA, 2019 bp, Enterobacter cloacae
atgaatatgcgtgtcgatagccaggatgccgggagttatcaccaggttagtctggaaataggaaaagacgaacttaaaaagcagtctgaacaggccaggcgtctgggcaatgacggttacaaaaaccacgcgcaggcgggaagcgtcaaaagcgccgtgcaatctttacagccggagcagctgctggccgtgctgaaaaatacccagcaggcactggtgggaaatggcggcaagtcggccattaacgctcaggagatgcccgtgctccagttgccgcagggcggtaatgcaaaggccgcggcaagcggaggcggccagcgctccagcgcggctgagctgaccgaactgctggggaaaattacgcagctcacggccaatacgtcgcttgagaaaatgctatctcagctgaacagcttcaacgcgatgatgtcgggagcaaccagcgcatggtctgaaatggccgcgatgctggagcagcagggaacccagtgggccgccgattccgatgccctgaaagcggcgcagcagcaggccgacgggctttccagcggcgttgacgtcgcgcaaaaggcgctcgacagcgcgcaggcagaactggacgcgcttaagaatcaggccgctgggcaggatccggtgtcggacgatctgcaaaagcaaatcgatcgggcccagacggcagtcaccagcgcgcagctcgcgcttacgacggctaccggactgtataacggatttgtcgaaaagacgctgaaccctgccaaaaccgctgaatcgaactcgcgcatggcgctggaagcgacgcaaaccaaatcccaggcgctcattaacacgctcacgccgcagcagcaaagcgccgtagagtttcagcgcaaaaacaacgatgaccagtcaaagagccttaatttcctgatggcgcttatgtcgcagctgattgccaaaagctccagtgacgatctgcaggccaccgctgagctgaagcagaagcttgcggaagcgtcggccaaggacgctgaaaaaaaggccaaagagtacgaagaagaggtgcgtaaggccgaggaaatgcaaaaaacgatgggctgcatcggaaaggtactcggatggcttattaccgccgtgagctttgttgccgccgcgttcactggcggggcttcgctggcgctggccgccgtcggtctggcactggcgatcggtgacgagattaatcaggcgatcacgggcaactcttttatggccgacgcgatgaagccgctgatggatgcgatcgtcaagccgctgatggagctgatgggcaagatgtttgccgggatcctcgaggcgatgggcgtcgataaagagacggccgaaatggtcggcaagatcctgggcgcaatcgccgccgccgcggtgctggtcgctggggtgatcgtcgcgggcagcgcgctgagcaaggtgtttggtgtcgtcatgaagaagatcggcctcgaagtgggtgaagaagccagcaagaccatgggcaaaagcgtggccgccgaagtgcagaaagaggtaactcaggatctggcgaaaaccaccctgcgcaccgccgcgaaagaagtgtctgaggaggtggcgaaagaggtgaccgaacaggcgacgaaaaccaccatgcagcggctgatggacagcgcctttgcacaggcgttcaagcgcgtgttccagggctttggccgggcggctggcatggacgaagtcaaaatgggaacaatttacaaccgtacgcagatggcggttaccggcgcagcggtggtgaacacctctattcaggttgctggcagcatcgtggtggccgacatgatggtcgaagcctcaaagacgaaggctcagatgatgaaagacgccgcgctgcaggagctgctcaacgagatgatgaatcgtggcatcgataccttcacgcaccgcatggagacggttaaccaaattgtgaaaaacatttccgccgtggccgacacccagctgaaggccggtagatatatcactaaacagatgagttccgttgctggataa

SEQ ID NO: 169416 - DNA, 555 bp, Enterobacter cloacae
atggttgataaaaatatgcttgaatttctcaccgaggatgagggttataaaacggatgaagagttagatgtttattctgaccgtttgctggatgcccttcagaatggcgcgatgatgaaggatatccacgatgtatcgagcgatactatgcaggatgtttataaactcgcatatgatttttatcaccagggcaagctgaatgacgcagagtcattgttccgttttctctgtatttatgacttttacaaccctgaatacgcgatggggctggcagcggtttatcagctgaaaaaaaattatgcgaaagccattgatttctacgctctcgcctattccttgtcgaaggaagattatcgaccgatgttttacgccgggcagtgtaatttaatgcagcgtcaggcggcgcaggctcgaaaatgttttgaaatagtaatggaacgctgtcgcgatccgttattagttgagaaagctgcagcttatgtttccgcgataaataaattaaagcgcgatcagcctaatgagatggagcagaaaaatgagtatgaggaatcgtaa

SEQ ID NO: 169417 - DNA, 1098 bp, Enterobacter cloacae
atggctgaaaaaacagaacaaccgaccagtaaaaaacgcaaagattcggcaaaaaaagggcagacgttcaaaagtaaagacgtcattaccaccgttattttgctggtggggatttattttctggcgcatgccgtgagcttcggccccttcatctcattttatacgcatttattgcagtatccgacccggcccggcatgggcgtgttcctcctggagctcgccaggatttttttcacgctggcattgccctttattacggtatgtacccttgtcggttttgccgccaccttgctgcaaacaggagttacgctggcgaccgaagccatcaagctgaattttaaagcgctgaaccccgtggaggggattaagaaaatattcagcatgcgcaccgttaaggagctggtgaagtcgctgtgctatctggtggtgttcgccgccacctgtaatagcctgattcagcaggatctccgccaggcgttgacgctgtatcgcgccgacatgccggggatggttgccgtgtgggtggccctggcggtgaaggcggtgatggtatttatcgcctggtccatatttgtgctgctggccgatctcttagtggagtacttcctccattttaaagatatgaaaatggataaacacgaggtgaagcaggagcacaaggagagcgacggcaacccgcaaatcaaaagcgcgcggcgccgtgcgcatcaggatctgctttccggggaggagatggcggcggtacgcaattcagaagtggtgctggcgaacccgacccacattgccatggcggtctattttaagcccgaagtcgcgtcgctgccctttattgccctgcgctgcaccaacctgaaggcgaaggccgcgatcgcctatgcggagaaaattggcgtgccggtggtacgtaatattccgctgacgcgtcggctgtatcatacctacagccagtacagcttcatttcgctggaagatgaggtactgatggacgtgatggacgtgctcatctggctacgccaggtcgaagcagcaggcatagtacctctcgatgcggatcccgccccaccagagcccgactctgagaacagcccccgtcagtag

SEQ ID NO: 169418 - DNA, 765 bp, Enterobacter cloacae
atgctgtttgttgcgttgtatcttaattttcagcacagcgtgctgacgtttgttatggtgtacgcgcggctggctatcgttttttatatgctgccagcgctaggcgaacgggtcttatccaatctggttattaagaatacgattattgcgctgacgattatcgggctgtggccaagtttcacaacggtagtcacgccggagcagggctggtttattattctgataaaagagattgtcgttggattaattctggcggtcacgctgtgtattcctttttggattgtcactggtctgggtgaaatccttgataaccagcgcggggccaccatcagcgacagtatcgaccccgtgaacggcgtacaaagttcaatattgtccggctttctcagctttgcttttggtgcgattttcttcgtcagcggcggcatgctgaaattaatggaggtgatggtccagagctacgagatgctgccgagaggcagctcgctggacggcatacgctgggagtatacgggagtgctgcttcaggtgttaatgcaaaacagcatcatgctggcagcaccgatcatgctggtgatgatgacggcggaaatactgctgggcgtatttgctcgctattgcccgcagcttaaccccttttcgctgtcgctaacggtgaaaagcacgattgcctttgtcgtttttctgttttacggtttccaggcattaaccgagaaaccgctgcagctgttttccattgccgacttccgtcagtttatttcctga

SEQ ID NO: 169419 - DNA, 255 bp, Enterobacter cloacae
atgaataacgttttatttatcggaaatacggcgctaatcgtggtgctgaagctgaccgcggtaccgattgcctttgcaaccgtggtcggcattattgttggcttattccagaccattatgcaaattcaggagcagacgctgccgtttggtctgaaaatgctggcggtcttcgccagtatttttatgctgattgaatggttctcggcagaaatgatgaactttgctaaccaggctttttatatggcttttcgctaa

SEQ ID NO: 169420 - DNA, 672 bp, Enterobacter cloacae
atgttgagtaacgatatttccctcattgctttactgtcgttctttaccctgctgccttttattattgcggggggcacctgttttattaagttttccatagtcctgatcatggtgcgtaatgcgctggggatccagcaggttccctcaaccctgacgttaaacggcgtggcgctgattttaagcgcctttgtgatgatgccggtatgccagcgcatctccgactatatcgaatcgaatcatattgactttaacaacagcggatcggttacgcagctgatggagcaggggctgggaagctaccgtgactatctggtgcgctactccgaccacgacctgatccgtttcttcaataaggtccagcagcagcgcagcggcgagccggcgcccgaagtggaggatcatgagctgagcacgctttcgctaatgacgctgatgcccgcgtatgcattaagcgaaattcagagcgcgttcaaaattgcattttatctgtacgtgccgtttgtcgtgattgacatggtggtctccagcatactgctggcgctcggaatgatgatgatgagcccggtgacgatctcaattccgataaaactcatcctgtttgtgtcgatgaatggctgggccttattaacgaaaggactgatcgctcaatatgccgatctgatgacatcatga

SEQ ID NO: 169421 - DNA, 927 bp, Enterobacter cloacae
atgagtttacgccaccatttacgcaagcgttgtgaagaacagcagaagctgctgaatctgcataaccggcttcccggcagtgaaatttcgcacccggcaccggatgcgcgctatctgccgctgaggctgcgtaatgagaacgacgaccaggcgcaggcctggtttgacgtcgacgcctggcttaggcaaatgaacctccatctccccgccattccttggaaggaggtgccggtggactatctggcgagctggttggccaggctcgggctgaatttttatttcgccgaaacggtctggtccgttgagtcgattacgccagcggtggcagagctacctcacgctgcgttgctgctgcacgcggatccctgtccactgtggtgcctggactggccggaagatccacttgagcgataccgcaccccgggtattccggcctggcttgttccgtacccgcttcagttcagcctgggatgcagccggctcagcctgtcgcagctgatggacgtagccccaggcgacctgttgttaatcaagcgccccgaggcgtatctgaccgttggcgcgcgccgcatttatcgagtgagctttaccctgaatcaggaggttattgtggaagaacagtatgttgaatatgaagaagagtaccgcgatgaggatgaaacgctgtacgagtgggccagcctgccgatagagattgagtttgttctggacggcagcagagtgacgctggccgaacttgaggatatccgacccggtgccgcgctggctctcccgcaggatgcggaaaaaaacatgaagatttacctgaataagaagctttttgcgcgcggtgagctggtggcgctggaaaatggcgcgcttgccgttgaagtgaaccatgtaaacgctgggcttatcggtaatatgggcgcatccgatgttgagtaa

SEQ ID NO: 169422 - DNA, 1005 bp, Enterobacter cloacae
atggtcgaaaaagtttctaaggttaatgttaataccgcgctcgctagcggctccgtttcggatgacagcgttttgcttgaatgggtggataagaagaaaaagcaaaatcggctcgatgaacagccgtcttccgcggcgcttaccgcgcagatgctggtacaggtgctcaacggggcgctcaccggcggcgggtggcagcaaaaggagaataaagcggccaaccccgcggcagtgcccgagcctgtacggcaggtgagccgcagcgatgagggtcagcgccataaggtcatgctggcggcttccgcccggactgaagcgacgctgattaagccgctagccaccggcgacaggcccctatccaccgctgacaggccggtagccgcagctgactcgatgaaagagagcgtatctccacctcgcgcatcgatcgctccggtcaggcaggcggatgccagggcaatctcacagccggttgctgtcgaggcagcggggggagagacgaccgtcatttctcagccgctaaccgcacgcgtgacaaagagtgaggacgcgagccgtcactctgagagcagcctccagtgcaaggatgagctgaacgaggagagacctattttggcgccgggcaaagcggtagatttcagaacaaacgtacagagtgaacggcaggggcaaaccaaggccgtgccggcgaccctgcagcagctaaagagccaggtgaacgccgcgacggcagcgccgtcagctaaagaggcgcaaacgctcgaagtggattattcgttccagcgctggtcgggagaccactcggtaaaggtgaccattcccgctcaggccctgcgggagggcaacatgacgctactgccgtcggatgcgcgcgcggcggatgcgctgtcgcgcaatctcggcgcgctggcagggcattcgccggagcttttgcagccgaggcaggagcggcacgaacagcaaaagcgcgagcagcagccccagcaggatgaggagcaagaatga

SEQ ID NO: 169423 - DNA, 462 bp, Enterobacter cloacae
atggaagcgtggcgtaaagggcgcgaatttgtcggcatgctcgagcgcaagaagcaggtgttacagcaggatatcgttaaaaccgacaataacttagcccaggtaattttgcagatacagcaatatcagcaggagttttcggatatcaatcaacaaataaaaatgcttacccccgcggggattatgagcagggcggatatttataaaggtataaggcagcagggcgcgttactcacgcaccagcagtatgtcttccataagataaatcagctggaaagtgaacagcataagcttgagcaaaataaagaacagctgcgcgcctcaatgacccggctggataagaagcattacaaactgaattattatttgcagccactgcgccgcgattatattcgccgccgtgataacgctgctgaaaatgaaatccaggagatggcgggatatggtcgaaaaagtttctaa

SEQ ID NO: 169424 - DNA, 1296 bp, Enterobacter cloacae
atggttgcgcaatgtctggttcatctcgcacacccgctgcgtattcaggggaatgttattgaagcacatttaccgggaacgcgtattggggaggtctgtgagattcagaaatccctgctcgaaccgcaggttatgggctttgcccaggttattgggtttaacaaagaacatacgttattaagcctgcttaatgacaatcaaggattttcccgcagcaatgtgctcttacctaccggtaagccgtttcgtatcgaggttcatgaaaacattgccggggccatcattgacgcaaccggaaccatccgtgggcggctggatgagattgtccagccgcccttaacgggcggcgtaagccttgatgcctgcggcgcgccgcgagacttcacacagcgtaaaccgatcgccgacgcgctggcgaccggcgtccgcgcgattgacggtttgctgacctgcggccagggccagcgtatggggattttcgccgccgcgggctgcggcaaaacctcgctgatgagcatgatcatcgaacattcagaagcggatatttacgttatcggcctgatcggcgagcgtggccgcgaggtgacggagtttgttgaggagcttaagcgctcctcccggcgttcgcaggttatcctggtttatgccacgtccgatcgatcctgcgtggagcgctgcaacgcggcgcagatcgccactacgatagctgaatttttcagtgaacagggcaaaaacgttctgctgttcgtggattcaattacccgctacgcgcgcgccttgcgcgacgtcgcgctgagtatgggcgagctgccggcgcgaagagggtacccggcctcggtgtttgaggcgctgccaaagcttctggagcgtccaggccgttttctgagaggctcgataaccgcgttttataccgttctgattgaaaatgaggaagagtcagacgtcatcggcgatgaggttaggtcaattcttgatggccatatttacctcagcaaaaagctggcggccaaggggcattatccggccatcgacgtcatgcaaagcgtcagccgcgtctttacccaggtgaccagtgaggatcatcagattctggcgacgcgttttcgcgagtacctcgtgcgtcagaaggatatgcagctctatctcgaccttggggaatatcgccgcggtgagaatacggagaatgatgccgccttcgatcgcaaagaccagatggaggcttttctgcaacaacggatgactgaaaaaacggacatgcaggcttgtctggagacgttatatggaagcgtggcgtaa

SEQ ID NO: 169425 - DNA, 408 bp, Enterobacter cloacae
atgaaatacgatatcgtcgaattactgtccagattgctaaacgatgcaggcattagcgatattctggacagtgatttaaataaccattcgacaatttcgctgaccatgaaagacgacatcccaactattcatatccgcgaggaaaatgatgaagtttgggtatgggcgaaagtaatggaaaatgcgcccaccagtctggcttactgcagtgccagtctgctgccgctgatgatgaatcatcaggaagatttcttccatattggccagccttgcctgtatccggtcgacggccacctggagcttcgtgcgcaggtaaaagagaagcatatgtccagtcctgacgcgtttctgccgatgctcgaccacttcctgaccatcctgcaggactaccggtccgtgctcgtttaa

SEQ ID NO: 169426 - DNA, 2052 bp, Enterobacter cloacae
atgattgaaaaatttattctgcagcttcgcagccgaccagagctcattattctgtcgataatggtcatggtggtggtgatgttgattattccattgccaacgtacctggtggactttcttatcggtcttaacctgaccatggcattattgattttcattggctcgttctatattacgcgggtgctggagttttcaacattcccgtccatactgctgattacgaccattttccgactggccatatcgatcagtaccagccgtctggtgctgaccgatgccgatgccggtgagattattgccagctttggtgagttcgttattgccgataacctggtggttggcttcgtgatcttcttcatcgtgacgatcgtgcagtttatcgtgatcaccaaggggtcggagcgtattgccgaggtagcggcgcgattctcgcttgacgcgatgccgggcaagcagatgagcattgatgccgatctgaaggccggtgttatcgatgagaaagaggtgaagcgacgccggagcgaccttgaggcagaaagccaactgtacggtgcgctcgacggggcaatgaagttcattaaaggtgacgccattgccgggatcattattatcttcgttaaccttatcggcggtatttccgtcggggtgctgcagcacgggatggatctctcccacgccatgtcggtctttacgctgttgaccatcggcgatgcgctggtggcgcagatcccggcgctgttaatctcgataagcggcgggctgatcgtgacccgcgtgaataacagtgaaaacagcaacctgggggcaaggatcctccaggatatgttctccaataaatttattctgctggttaccgccgtactggccattgcgcttggtctgctgccgggattcccgctacccgtatttttgctgcttgcggcgattttgttaggcatttatatcaaggataaaattgacgagaaaagaggcaaaaaaccggctgcaccggcagaagaagaggatgaacagccggtattgaaaagcaagccggtgatgattgatggtgaatatattcctgaaaccattccactgattatttccgcgtggaaaggctatgaagagtattttaaagaacacaatctttgctctttgctgaagcgtaatttctttattgagtacggtgtccgcctgcctgaagtagtcatgaactatgacgagcacatcgagcgcggcaagctgaccgtggcaattaacgaaattcgagttgccgcctacgatattctgccgggaatgtgcaaggtgctgctgcgcggagaagagttgcaggttatggacgacagcgtgcaggccgtggaaaccgcccagggcgtcgcctactggatccctgaatcacatagccagactgcgctggagcttggattctattcccgctcggcggtggatgaatgttatgcctgcatatctaccctgctggtgcacaatatttcggagttcttcggtattcaggaagccaaaacgctgctggacgacctggaaaagaaatatcctgaacttttaaaggagtgctatcgcaacaataccgttcagcgcatcaccgaagtattccagcggctgctgcaggagcgcatttcaattcgcaatatgcgactgatccttgaagcgctggtgcaatgggcaccgaaggaaaaagaccccattatgctggttgagcatgttcgcggcgttttatcgcgctatatttccaaccgtttttccgctaatggacagattcgcacgctggtaatgtcgcatgatatggaagggctggttcgcggcggtattcgtcagacttccggcggtacctttattaatctggctccgccagaaacagaaagtattattcagagtcttgaaaactgtattcgcagtaatggcgtaaacgcgcgcgacataattttaatggtgtcattagatatacgtcgttttgtgaagaaaataattgaaggcagttatccagaaatggaagtgctttcttatggagacgtcgcttccggtgtggatgttgatgtaattggtacattagataaataa

SEQ ID NO: 169427 - DNA, 1119 bp, Enterobacter cloacae
gtgattaatattcgttctgtccccggcatagattttaaacgcatcgataccccgatgccgcagagtcactctgggacgctgatggcggatgggggagaggaagtacagcccctgaacctgcagcaggagctgagcaatgccgctgaggagatggcggacatcctcagcgcgtttggacgttttagcaagatggggcgaaaaaacgacagcacggataatgattttgtctccgctatgcttgaggaccaggctgatgagaagctggatacgctcattcgtcaggtggcaaaactgcgcgacatcaatacgctgattaattttgcccgccagcttttccctaacgacagtgatttgatgctggcactgcgggaaatgctgctgagccgtcagctgtcagagcttcagaaaaagaaaatcaaagaggcgattgccgatctggagaagttcggcgacagcaaaaagatgcagtccgggataaacgttggccgtctggccaggcgttttagtcaggaaagcgaaggcaggccgctgtcggctaaagatctgcgcaacagctacctcaactttctggagctggatatgccggcgggctttatctacaaagactgggttgatgtatatggctatgaaaaccgcacccggctgctcgcctttaccctggcggcgctggtcgcggatatgaaggcgaatgagccgggggtgcactcttcggagttcggcccgctgagcgctaagctatcagacgcgcgcgtattaaacacgctcgataagctactgaatgaaaactttgcgaagtttgcgtttcgcgagcaaatgcgaaatcagcatatcctggcgggagaggccgatattgtcgcgctgtatattacgggcctggtagatacagatgaatttaagagtgtacttaagcgattcagtaaagagtttatgtccatgctgttgctcaaacagcgggcgacggtgatgcaggcattacgcaatgtttttaacctgacgcctgaatttctctttgcagacttaatgtatcgcgaaattgtaatggaccatttgtccatgatattgcgcaaaatggctgaaaaagagaaaaatacgggtatctggaacgaacactataaataa

SEQ ID NO: 169428 - DNA, 1764 bp, Enterobacter cloacae
atgaataagtttgttcgcaaaacgctgaatagcagagtgccctatctcctgctgacggtaatatcctgtgtgccagcaggcgcaaatatgctgaatactacctcagcgcccgcgacgtccattcattcgacggctgaaaatacctatgtggcgagcaacaacagcgttcagcagctcttttttgtcgttgggggcgcgctccataagccttttatcgttagcgtcgaggcggcgaaaaaacgggtatccggcaattttgacctcaatgaccctaaatcggtgcttgataccgtggccgcccgtaccggtcttatctggtatgacgacggcagctcggtctgcatttacgacaccagcgaaatacaaagcagtgtcgtgcgcctggcctacgcaccttatgacaggctggtcgcctacctgcagtcgtcgggcctgtacgatccgcgattcccgctgcgttcagacggacgctcgggctcgttttatgtttcgggcccgccagtttacgtcgagcttgtctccgccgcggcaaaatacattgatgccacctatgcgcggccgggaaccggagagaccacaatccgcgtaatcaagctgaaaaataccttcgtgaacgaccgtaactatacccagcgggatgttcctattaccgtgccaggtgtagcgacggtgctgaatcagctgttaaacaataccagcagccgcgagggagggcgttcagcgccggcgggcgcgaatattaccgttgataacgatacgcgtagcgcgctggaagccgcgtctgcgacgcaaaaaggcaactttccgccgctgccgtcatttaacgcgccacctgcggcaaggagcggggcggttgacagggatatccccagccagcagacgatcaatatcgtggggtattccgacacgaatagcctgctgattcagggctccgagcggcaggtaagcttcgttgaggatttggtgaacgctatcgacattcctaaacagcagatccagctctctctgtggattattgatatctcaaaagacgatatcaacgagctgggcattcgctggcagggcgcggcgaagctgggcaataccggggtgacgttcaataccagctccctgacgccggaaaacagccttcatttcctggcggacgtctctgcgctggcgaaaaaaggaagcgcgcaggtggtgtctcgcccagagatcctcacccaggaaaacgttccggcactatttgataacaacagcagcttttacgcgaagctgattggcgaacgcacttcgtcgctggagaagatcacctacggcacgatgataagcgtgctgccgcgtctggctcaacgtcagcaggaaattgagatgatcctcaatattcaggacggcggactaccgctgaacgccgatggctccacggaaaacatcgacagcctgccgatggttaacaatacccagatcagtaccgaggcgcgcgttccggtcggctatagcctgctggtcggcggctatagccgcgatcaggatgagtatcatagcctcgggatcccgctgctgcgcgatatcccgtttgtgggcaagttgtttgactacagctataccagccacaaaaagatggtgcgcctgttcctgatccagccgggcctcctgaccagcggcgaaacctggcagggacgcacggaaaataacccggttctgggacgtacctggacgggcaacgaagtgactctgaaatcgacggtctccatgttgcgcgaaacgatgaaagataattaa

SEQ ID NO: 169429 - DNA, 861 bp, Enterobacter cloacae
atgatgaataatcataaacaacgccatctggagcagaaatctcagcagctcctgtctgatgatattctcagagggaaaacgcacaaaattgattgtaaagatatcaagtgtcactcagcgattttatatgcgcggccggttaatcagcattctattatgtcactgggcatcgaccaaacggaggaagagagcgcagtggcattcgatactatccgtcatgctgtaatgatcgccaccctgagtgaaatacacttacgtttttctggggaatggattgtcgaggttaagtctatgtctcaggcgacgacgttattttctttcctcgactatcagacgaaatgcccggaagccagcggtgagggtatcgaggggcaggaaaacgttatgctgcttaccgcatctcatctggtattaagagttgaacatgaaaataaatcgctgatggcgttgcttatttcatcgttattagatccgcaagaccgacgcctggaaagcctttttgcctttgtgcgtaacgtggagagttactggattgcgcattttttgctgtcgcaggtcatgaatgaagataaagagagcgagacgcacaaaatttataatgccagtcgaatttatggtgtttcagagtcctatttcagaaagctttgccaccacgcctttacacgaggccccaaaaaacagctgcgcttatggcgtgcggcgaatagcgcattgcagctgattgagaatgaccagtccattgccaccattgcgggtgacaatggctacgcatcgtcttcgcatttttccagcgaaataaagtcgctatttggcatcacccccagggagtttaaaaaattggaaggtttgcttcatgaataa

SEQ ID NO: 169430 - DNA, 525 bp, Enterobacter cloacae
atgaacagcgacatgaatgaaataactgaagcgatgcctgttgtgccagagacaaagaaaagctacacattgaaggtgctgtttggccctatgtttggctgtgaacttaatctgccagcagatgactattttattattattaatcagagcattgctatcgatgacgctggcagcgcagcgatatcaagcggcgagcatgccgcagcgtatacccataatacgctctatataccttgcgaccgcccgtcgccgaacctcattttacgcctctcggccccagcagaagacggagaaggcccgggcagctttcgggtagaggttcaggatgagaataacagtttcccgaccatcgttaatgaaaacgaaatatttacccgtgaacatattcgtttcgccctaaagcgcactgaagatgagtggccggaaagtatccgtaattttgcgctcccccccccaatgttgatgcagaattcaacggacaggagaccattgctgagtttaatgctaaaaagcaccatacgctga

SEQ ID NO: 169431 - DNA, 267 bp, Enterobacter cloacae
atggctgatacaaatcctagcacgacccccacgagcaacggttattttcttgatgacgtctcggtcgcattcgagaacggtgcggcagacatgatgaagcagcttcaggatgcccaaacggctcttgaagccgacccatccgatcccgccgtgctggctaactatcaggcgaagctgcaggaatatacgctgttccgtaacgcccaaaccagtacggttaaagcctataaggatattggcgcagccattattcagaacttccgttaa

SEQ ID NO: 169432 - DNA, 324 bp, Enterobacter cloacae
atgagtcagccaatcgaagcattatccgcattaactcgcctgagcccacacggtatcaatccggaggacaatacctcagtcacggtacatgaccagtattttaacaatctggttgccagtacgtttaataagatcagcgacaccgacatgcagttcaagaatgtgattaatacgctcagccagtcgccccagttcaccagcgacccgcaaaaattattgatgctgcagagctatattggcgagtacagcaactatgtctctctggtgagtacgctggctcgtaagggggttagcacaattgaaaccctgggaaaatcgcaataa

SEQ ID NO: 169433 - DNA, 768 bp, Enterobacter cloacae
atgagcactacatttttccgcaccctggcggttgtcttttttgcttttatgttgagcgcctgtaatgacgaaaagctgctattcaatctgacccaggaacaggccaatcaggtgctggccgtcctgcaacagcacaatatctctgccagtaaggaaggcacgctcaaggcgggctataccgttgcggtaaacaagtccgaaagtaccgccgcgctgtcaatcatcaaccagtaccagctaccgtggtccgctgatgtgcagatagcccaggcctttcccgaaggcgcgctggtctcctcccctaatgccgagcaggcgcgcgttctctctcttcaggagcagaggcttgagcaatctttgcgcatgatagcgcaggtcgttaacgcgcgcgttcacgtgagctatccggcgttcaacaatgacagcagcagaacgccaacaggccacgttggggtgataatcacctataaaggtgaaattgacgataacctcttcatctcgcagattaaatcgctaattaaaaacagttttgatgacgtgcgttatgaaaatatctcggttgtgctgttcccggcaccgctgatccagtacgtcacgccaaccaaagtccctgacgctctgcctgccacctggatactcattctcgttgcgctagcgctgtgcggagcggtcacttctggctacatgctttaccgcgtcagccgccgtcctccggttgaaaaagagcatagcgcagagccgctcgcaccggagaacgcagaaccatga

SEQ ID NO: 169434 - DNA, 558 bp, Enterobacter cloacae
atgagagccgacgatcagcacatgatgtctatcctgtatgcgccggccgggtatgcccacatgagccatcttccgcaagcgctagcctatggcgatatcgactgcccgacgctgcgtaacctgtggcttctccgtcagggtaaactcagccatcttccgccagcgtggcggtctgataataaaacgctgtcgcagatgctgtcgtgctggcatctgattcccgaaacggcgcacctgatcggcggctatctcatgcgaaatcatctgcttaagcgcggcgcgctgataatgtccgatccgcggcttctggcctttatttcattgccaatgccccacggcattgcgctcgatcccggcggccggacctcaatggcaactacctcctgcgggctggcgtttattctgagccagttcccagaattacctcaggcgctacgacagcgcctgctgctgcacttccccgcggggatgtctattgaaccgctgccggcgggaaaaacgcttaaccatatcaatctactccgaatggccctgacctatgcgaaccattactactga

SEQ ID NO: 169435 - DNA, 693 bp, Enterobacter cloacae
atgcgaaccattactactgataccttacctgaagatatcgataatcaggttgtggttaagtccggtgaacggactcgccatcagcgaatgaccgtagcgctggaacgaaccctcagccgctgcagtgaaattcacgcggaatatgaactacagaccatcaggctacgagagagctgtgaaaaacagggctttgaagccggttttcgcctgttcttcgaccagcttgtggcactgattgatgattatcagcgcctgcaacgccagcaccagatgcagttccgcgagcaggtcggtgatgcgcttaaaggcgcgctgcacgacacgatgatcgtgaatcgaattattcatcatttacaggaaaagtgcggtcatcagaaggcgctgcggatcatcatccccactgccgtgaagctgccggaaggcgccgacgcctcaaactatcagttcaccgatgacaaccatatcaccgtgcaaaatgatatggatgccatccgctttcccagtgaatcactctgtcgccaatggctacatcatgccgatgaaaaggttgctcccaccgaagcggtgatgtcccatctggcccctgacgtgctgcgagatatcgccagtcaacttattggcctcagtaaccaaatccccctcacctccacttattcagaacatcaacaggaagagcacgatgagtcagattaa

SEQ ID NO: 169436 - DNA, 375 bp, Enterobacter cloacae
atgagtcagattaacccggtctccgctgcggcgcttgccgcatactccagcgcatcagatgaagaaaacgctacgggcagcaattttaacactaaggtgctggatttttttaaacaaaaccagcctgaaggttcactcaatgaggtgctcgcacagcttaaaaatctggccgccccgggtgaaaagatttcaatgcagcagctaaactcggcgatcctcattgctgatggcaccctgcgcaaagacccggaatataagacatataccgacagcaccctcgacaggatgacgacccagatgcttggcgtgaatatgttttacaacaacatgctgtacaaaagcttcaccaaaaccgacgacgatacttccctctaa

SEQ ID NO: 169437 - DNA, 498 bp, Enterobacter cloacae
atgcagattaaaaccgttattgctctcgccagccctttcttcctctcttttcatgctttcgctcaaaacggcgactgtattactcaggcagcacaatgtttccaggtcaacccactgcttatcaaagcgataatctggcacgaatccaggaatcagccgcaggcgctgaatttcaataaaaataaaaccgtggacgtcggcatcatgcagattaacacggtgcattttagcagtctcaaaagccgggggattgatgagcagcgcctgcgcaaggacagctgcgccaatgtgttctcgggaacctggatactaaagcagaaaattgagcgttatggttatacctgggacggcattggcagctaccattcacgaacggcagctcagcgtgaaaagtatgtgcgaaacatcgtctcacttattgcccatcagacggccaccctcgacaaaattgccgttcccccctcgcacagcgtcccaacgcttttctcatgccggtaa

SEQ ID NO: 169438 - DNA, 786 bp, Enterobacter cloacae
ttgaaaaatagctcaacgaagcaaggcaagattttctttcttgattacacttttaatccggcattaagaaccttacaacgcgaagatacaatcctgcagttgagaaaaaaacagtcagacgttctggccctgctttgcgccaaatatccatccccggtttctcaggacgagtttctttcggaagtttgggatggcagctatgttacctcccagagtattgcgcaaatgatacgttcattacgcattagccttaaagatgaatctaagaacattatcgtcactattccaaagttaggctatcagcttaccgccgaacccacctgggaggcgtcgctatcagagcccgaactggagcctgacacgctaaacgaacgttccccggcggcaggaacgattgaactggacaacatctcttattcagctaaacccattaccagctatcagcccgctccccccacaacgtcaatgacggttgtatcctatgtgccacagcacaagccggtggggcgaaagctgacgtcaaggaagtggtttattttcgccgtcgcaacgttaagcatctttttggcgggggtggccatgggggcaaggggatatgcacaggatctttttgaagaaaagaaggtcttcttttctggcggactgctggcgcagtacagtaagaccaggcttatggataattatttatactgttgcaaaacggatcacggactggtttgtagccccagggcgtccatgcttatgggaaaatgcacgctgcataccgaagctatcaaagcagactaa

SEQ ID NO: 169439 - DNA, 924 bp, Enterobacter cloacae
atgaagataaaattgccgttgctggcaattctgctgctgcaaagcgtggcggcgtcggcctatgagtgtgacaagattggctggcacggcggcgacgccgatatccatattaacgtcagctcagatgttaataccggtaaaaacagtatcgtcgatctggcgccccaaattacctgcaagaatacggcgggacagggcggctggatcgacaccatgtggctgggggccgatggggtaaagcttgaaagcggtatatttaaaaaccttaaatatggcgtcacgatttcggggaccgaacatcctgcgccggtatcagaaacgaaaatcttcgatctaaacaatggtgaatccagacaattaccggtggtgctttattttgaactgacgtcgctcggggaggagattcacatcaagaccggcgataagctggggagtctgcgattcgtgcagaccaataataaaggcgagcgtcataactatacctggaccctctacgcgtcgaacgatgtggatattaatacctcgacctgtagcgttatgtctggatcgacctttaacgtggatttagggcagattgaacgcggtgatattgtctcaggcgggacgtcatcgcaaactgtaagaaaagatttcaatatagtttgtgacgcggcgcacactgtggattttgatgttaaaatgagcctgttatctccggcctggaataataaggcgattaaaaccaataatgataatctggctgtggaaatgcgatggaatgggaatgcgatcgccaacggagatagccagaaactcagcgtcacgaatggcagtttcaccgtgccgttgagctttactccggtgaaaccggcttcggtcagctatgagaatattgcaacaggggcattttccgcatcggcgacgatgattctgacgcagtactga

SEQ ID NO: 169440 - DNA, 555 bp, Enterobacter cloacae
atggacatattctacacgcggcgcggggcgctgggattactgttgctcatcaccacccacgccgcgtgtgcggcggagggcggcgtaaaagaagtaagtaataatctgcggtttgacggccagctggtggccgatccctgtgagctcgatcccgcctccgcggccataaccctcgattttggcacggtaatcgatacgtatctctatctacatacacgcacccacgcgcagccgttcgtcatcaagctcagggagtgcgacctgacgcttggcaatcaggttgaagtgacctttaagggcgctgagagcgcggagctctccggcatgttggccgtgacgtctcctgtcgatagcggtctggccatcggcatgtcgctgccggacggcacgcctttacctttcaacaagacggtaaaggcgttttcacttcagaacggcaccagcgagctggcgctggaaggttacgtaataggtgaaccaggcgcgctcgccaaccgcacactgcgccgcggcgaatttagcgcgctggcgacgtttgagcttaattacccctag

SEQ ID NO: 169441 - DNA, 522 bp, Enterobacter cloacae
atgattcacaccctccttaatcgcagccgggcgcgtctgcgcggcgctatttttaccctggtgctttctgcctccgggcatgctttcgccgtcgcgaccggcgacagtagcgacatcgcgtttcacgggacgctgaaaattcatccctgccacatcaataacgaccgtgacctgagcattcatttcgacaatgttggtatccacaaggtcgacgggcagcgctacaggcagaccatcagctaccagctggtttgcgatgatatcgatccaacctggcgtttgaccatgattgttaagggtagcgccgcctcctttgacgccagcgcgctgagcaccaatgcggctgggctggggatccagatccttcagaacgggcagccgtttgagatcaacaaggcgctggatattacctatcaaaatccgccaacccttgaagcggtaccggtaaaagatccgagcgtcagcgagctgagtgaaggggcgtttagcgcaaccgcgacgctgctggcggaatacctgtaa

SEQ ID NO: 169442 - DNA, 498 bp, Enterobacter cloacae
atgaaatgtctgagccgcggcgctagcgcgctgatgatggtggccgccgccggcgcgaccgccggaccgggatccagcaacgttgacatcgccatttccggcgaggtgattgctacagcgtcctgtaccttttccagcaacgagccgataaaggtcgaatttggcgatgtgtacatcaatgagatcgtggggacggcgtatcgtcaggcgatcccgtatcaggtgagctgccagggcgacccggatggcaaaacggtgcagctgcaggtatccggcacgcccgcgggtggcgataccagcaggctgcaaaccgatgccaatgggctgacgataaagctgcaaaacggcagcgcgaccctgccgcttaatcactggatcgattttgatagcagcagtccgccttcgctgtatgcggtgcttgaaaaggagagcggcgcccggtttcaggacggccaggcatttaacgccacggcaaccctgaaagtggcctataactga

SEQ ID NO: 169443 - DNA, 594 bp, Enterobacter cloacae
atgaatgaaacgacaaaacgcgccgcggtgctgcttatcgcaagcgcgctcgggccggcaatgccggccttcgccgacgcggatagctggggtgtggaaggcgagcacggcgaactgcacgtttacggagagtttgtagagggtgcttgtcgcctcgatatggtctcgcaaaatcaggagatcgatctggggcgcatcacgacgtcgcttctgcaaaagacggggtcacgcggggaagcgcaggcgtttatcctgcggctgcgcgactgcgtccatgtcggcggcaatatgcttgatttgcgcacgggcaatcgctactgggatagcgcacagccaatggttagcgtgacgttcaccgcccccgccgatccggacacgcccgagctggttaaggtcaacggcgtaagcgggatgggcctgcgtatcaccgacagcgcgggccgggacattagtcttggtcagcgcggcgtgccgcattttatcgtgccgggaaacggtgcgatgctgtaccgcgtgcagccggaacgcacggcccaggacctgttgtccggcgagtggcgcgcgacggtaggatttgaactggactatgactaa

SEQ ID NO: 169444 - DNA, 753 bp, Enterobacter cloacae
atgaaacatcatttatcgttcacggggatcggagcagtgctgatctccgggctgctttgccagagcgtgcaggctgccgttacgcttgaccgcacgcgggcagtgtttaacggcgcgaacaggtcgatgagcttgaacatctccaaccagaacaaggcgttgccctacctggcgcaggcgtggattgaggatgaaaaggggaacaaaatcagcgggccgctggcggcgctgccgccgcttcagcgggtagagcccgtggctaaagggcaggtaaagctgcagcttaccgatgatgcccagtcgctgccgcaggacagagaatcaattttctactttaacctgcgtgaaattccgcccaaaagcagcaaggcgaacaccctgcagattgcgttgcaaacgcgcatcaagcttttctaccgtccggcctcgctgcagcttgaccgcaatcaggccccggatctctggcagaaaaagctggtcttaacccgccacggcgaaggctaccgcgtcagtaaccccagcccttattacgtgacgctggctgctgcgtacaatcagccgggcggcgcgcccattgccgggtttgacccggtgatgattgcccctttctctgaatcgccgctcaccgtgaaggcgggggcgctcggcaataagcccattatgacctggattaatgactatggcggccggccaaagctgatgttcagctgcgcgcacgatgtttgccgggttgttgacagcagggctggataa

SEQ ID NO: 169445 - DNA, 519 bp, Enterobacter cloacae
atgcatcgggtgagcagcatgggtggaacgcgaatgatggttgatacggcgggcattgccggggtacccgtccgcggatacggcacgggaacccagacgaaccgctttggcaaggccgtggttgcggatatcagcaatggctatcgcagcagcgtcagcgtggacgtgaacaacctggccgacaacgtcgaggcaacgcggtcggtggttcagggaacgctgacggaaggggccatcggctaccgccgttttggaatgattgccggggaaaaggcgatggtgcagctgcgtcttaccaacggcagcgttccaccgttcggagcgacggtgttcagccatcgtgagagccaggccgggatcgtcgacgatgacggcatggtatggctaacggggatggtcagcggggagtcgatgcgggtgatgtgggatgggcaaacgcagtgcgtagtaacgctgcctaaccccctgccgaccggcgtccgcgttctgccgttaacctgccggccacagcagatatag

SEQ ID NO: 169446 - DNA, 2028 bp, Enterobacter cloacae
atgaggcacgtttttaatttttcgggcattgccgtgctggtcaccctggtcttacagggagggatggccagtgggtatgcagcacaaaccattcaatttaataccgacgtgctggacgtcagcgatcgggcgcatatcgacctgagtcagttctctcgcgccggttttattatgccggggaattaccagatggtggttcgcctgaacaagaccgagttgcccgaacagccgctcagttttctggcgccggatgatgatccaaagggcagtgaggtatgtctgacgcacgaccttgtggcgctgcttggacttaaatcagcgctgcaaagcacgctgacgtggtggcatcacggtacctgcctgcagctggcgagcctgccgggcgccagccagcgtgccgaccttggttctaatacgctgtacctgagcatccctcaggcctatctcgaatataccgctgagaattgggatccccccggcagctgggatgaggggattggcggggccatttttgactataaccttaacggtcagtcttcgcggtatgcaacggggagccgccgcgaaatgaaatcactgacgggtaacggcactaccggttttaacgtcggcggctggcgggtgcgtgcggactggcaggcgcgctacagccacagcgctgggtcgtatcaggacaatcagcgcgagtgggcgtggagtcgttactacgcgtggcgggcgctgccgtccttgaagtcgaagctgatgatgggggaaaactatctcaactcggggctgtttgacagtttccgctacacgggaagcagcctcgaatcggacgacaatatgctgccgcccaacctgcgcggctatgcgccggaggtggtcggcgtcgcgaggaccaacgcgaaggttactattagccagcagggacgcgtgctgcacgaaaccaccgtggcggcgggcccgtttcgtattcaggatttgaacacggcggtttctggaacgctggacgtggagatacaggaacaggacggcaccgttcgccatttccggatggatactgccaatattccctatctgacgcggcctggcatggtgcgttacaagctggcgctgggcaagccgtcggattaccgccacaacagcgtgggaccgggatttgccacgggggaattttcgtgggggatcaataacggctggtcgctttacggcggcagcctgctggcgggtgactataacgcggtggcgacgggcgtcggtcgtgacctgctggccttgggggcggtctcgtttgacttcaccgagtcgcgtgccgtgttgccgcagacgggcagccggtccggtggctcctggcgccttagctactccaaacgctttgacgaatacgacagccaggtcaccttcgcaggctatcgcttctcgcagcgtaactttatgaatatgtcggagtttttaagcgcgcgctatcacggtatagcgggaaataacaataaagagctctacaccattgctttcaataaacagtttcggcagctggggcttagtgcgtatgtgaactatagccaccagacctactgggaccgcccggataacgatacctacaacctctcgctatcccgctttttcgatgccggacagcttaaaaatcttggtctgaccctgtcggcctatcgctctctttttaaccatacacgcgacgatggcgcttacctgagcctctcggtgccgtggggtaatgggggcacgctcaatgtcgatggccaggcgggaagttcaggcaacggggcgatgatcggctatttcgacaacattgacgcaaacaatacctaccggattaaagccggggttgcccggcagggccgggcagccagcagcgggtactttacgcacaagggcgacgttgccgagctgaccgctaataccacctatgaagaggggcgctatcgctcctggggcggagcgattcagggggggccttactgcgacgccagagggcgtggcgatgcatcgggtgagcagcatgggtggaacgcgaatgatggttga

SEQ ID NO: 169447 - DNA, 558 bp, Enterobacter cloacae
atgaaacatagtgcttcatttgtcacgcctgtgcggctgctgtggctgacattgcccttcgtctgtgcgggcgtaccggcggctaacattaccggccaggggcatggcaaggtcagcatgcagggggcgattatcgatacgccctgcgcgatcaaggtcgatagccgcgatcaggcgatcgacctcatcacgctgccgttggatcagatcatcaatgccggcgtcgggccatcaaagccgttcagcattcacctcgagaactgcgcgctggaaccgatgctgccaaaccatcctgactggtcacattttcgcgtcaccttcgacggggccatcaccgatggctcgctcttcgcgcttcgcggcgaggcccgcggggtcggtctggaaattatggatgccgcaggcaaccgcatgcggccgggaatcgcctcctcttcggggcagctacagcctggcgccatgcgccttgattacagcctgcggctggtgggtaaccaccagaagctgcgcgcgggggcgtaccagactacggtgcgtttcaaactggattatttttga

SEQ ID NO: 169448 - DNA, 534 bp, Enterobacter cloacae
atgcaattaaccaaatgggcctgggcgcttggcatgacgactaccgtactcgtcggtcaggtacaggcggccgatcaggggcacggcaaggtcacatttaccggcgcaattatcgacgccccttgttcaattacccccgataccattgaacaaaccgttgacctgggtgaaatttccaacaaagcgctggcgaacggcgggaaatcgcgtccgcgaccgtttgatatcaagctggaaagctgcgatctcgctggcctgacggataaaacggtcaccatcaccttcacgggatcggaatcaagcgcccagccaggctatctggcgctggttggcacggccagcggcgcggctattggcattaccaatgacaatggcaccaacatcccgcttggtacgccgagctcggtcaccaaaacccagcagggtgataacacccttacctatgccgcttatctgcaggggaacggcgccacgtcctccgttgtgccgggtgagtttacctcggttgccaacttcaccctggcttaccagtaa

SEQ ID NO: 169449 - DNA, 1293 bp, Enterobacter cloacae
atgtcgttaactgtacgtgaacaaaatcgatttattgctgcccttgataacctaagaacctccgagcgggtgcacaaaagcgatctcaaaaccgttaataaaacgctggataaaatgggcagcgtggctaatagtaaagaattactcgcaagtctcagcgatcgaatgcgtcaaaactttgacattaaagattccaaaaaagtggagtcgtttattgaaaatgtcaaggacaagcttgaaaagcaggaatcaaagatccacgataagaaactcacgcagctgaacaatattggcaaccgtatctttcaggcaagccaaaaaattgaggttgatcatctcagcaaagagatcgcgctcaagacgagtgcggcaaatcgtcaactggaatgcgccaggtctgataaaaacctggttcacgaaatgattgacaaacgaaatgaagcaaaagagtttgtctctatcgagaagcataaattagaacagatcactccgcagaaaattagcgaagatcaagaaaaacgcattaatagattgacccagaaaacaaatagtgagattgacaaactgaaggttgacattcgtagaattaataaacgtgagcctgagctctttaaattccttaataacctggggaagaccgacgttattaatgatttggccaaagcgcaaaataataaattcctcaagagaacaatggctacgcctgagtatgctgaaaagatgtttggtaccaagaccattgtggttgagggtcgacgctcctattctgctacgacaacaaaagaagtgctgagcgacaacggagcagcgttcctcactcgcattaagaaatatcaaaacgctaaaaatgaggttgcagccattaaacatgaaattagccgtatggaatctgccagagacgcgcggatcgcggccattaagtctgaagaacgttcgccgctgcagtcaaaatatgactctagaattgcgcaatatcaggacggtgtcaaagagatgtgtgaaaccgaaaaccgcgccctgaatacgttagcgaagagaattaacttcatcgatagcacaattgagcatacaaccgcgcttaagaaaggtattgaagaaaaagccgggcttatggctgaccctgaagttaaacagtcagcggctcgtcatgaagatagcattaacaggctcgtcgtcaggaaagagaagctggaaaacagttaccagcgacttgttgaggcgtcaaacaccggtaaaaactacgtcagcgacgttgaatccgacatcggaagcgatttcgaaagtcacgtgtaa

SEQ ID NO: 169450 - DNA, 459 bp, Enterobacter cloacae
atgatctcaaaagaaaaggttttctatttttggggcgtgatggatatcatcgggattgtgttttattcgatggggcctttacgtttgcttgagtcctggtgggacgccaccggaggaaatctggggatgatcgtctttatggtcattgctggaggggtaaatggcattctgacaggaatcttctatctcgcatattttttgttgcccatttcgatgtttttctccgcctggttttttttcacaaaccaccgatatgctgtccgttttgccctctcgcaggaagcattgcgcgttctcactgtaagttgttcagtgacgttattccctgttgttattgtcggtactgggttaagcattcttcccctaaatattgtgctgtttgtattttctgaattactaaaaaccggaacgctcatctttatcataaaaaaacagcccgccgaccctgcagagcattga

SEQ ID NO: 169451 - DNA, 234 bp, Enterobacter cloacae
atgaatttacctgtgaaaccgataataagaacattcatcagctatttaaccatttatacgttgctcattatttcattcacgctgttcctgacggtatctggctactatctgtttatctttgactggccggaagatgtcccgcgaatcgcaatgcatggattcttgtgtgctggacttaatgcattagcgataggtgtgtacgctgtcgcagagaaatggagagagaaacgttag

SEQ ID NO: 169452 - DNA, 288 bp, Enterobacter cloacae
atgggtgagttactgaatgcggggctgctgagcattgcatccctggtgatggctttggttgtgctggttgttgggctggtattgtggttctacgttaaccgtgccagttcccgtacaaacgagcagattgagctgctggaagcgttactcgatcagcagaagcgccagaatgcgctgctgcgtcgtttgtgtgaagccaacgaaccggaggcgaaagacgtgccgaaggaagccgcggttcagcaaaaagaagatgaagacttcattcgtctggtggccgaacgatag

SEQ ID NO: 169453 - DNA, 645 bp, Enterobacter cloacae
atgtatcggaaaattagcggggatcgctggcgtcatgtctgggttgtcagcgacattcatggctgctatcaggggcttatggaggagctgaagcagcggcgttttaatcctgacgcggatctgctgatctcggtgggggatattatcgaccgcgggcctgacagcgtaaaatgtttacagctggtgcaggaaaaatggttttgcgctgttcgcggcaaccacgagcaaatggcgctggatgcgcttgaaaataataatattactctctggtcgataaatggcggtatttggtttaccgctcttaagggtgacgagcaaaaacaggcgatggctttactcgacgcgtgtcgggccttaccgcacgtcattgaaataacctgcgcaaacgggctgaacgttgtcgcccatgcggattatccatcagccgaatatgtctggaacaggccggtggatgcgcagcgcgtgctgtgggatcgcgatcgcttaacggggctgatggcgggtaaagggcagggcatcagcggcgcggatcacttctggttcgggcatacgcctttagacaaacgatatgactttaacaatctgcactatatcgatacgggggcggtttttggaggcttcctgacgctggtgcagcttcagtaa

SEQ ID NO: 169454 - DNA, 372 bp, Enterobacter cloacae
atgcatcttaccccttcccgcgtcgcgtgcgcgctggttttccttgtctcttcggcaatcacgccctcggctctggcccacgcccatcttaaacagcaatccccgcaggaaaataccgtcgcggcggcgccggaggtcatcaccctgagcttctcggaaggcattgagccggccttcagcggcgtagcggtgaccgacgcgcagcagcagaagatcaaaaccggcgcggtgaagcgtgacgagaaggataacgcgcggctgatcgttcctcttgagcagccgctggcgaaaggcacctacacggtggactggcacgtggtttcagtggacggccacaaaaccaggggcagctatcgctttagcgtgaaatag

SEQ ID NO: 169455 - DNA, 339 bp, Enterobacter cloacae
atgaaaagagtaatcctggccgcaacgatcctgatgctcgcggggtgcagcattaaccgtcaggcggagataagcagtgtagacgccccgaacgggattgtgcgcctcgactacggtcaggcgctgcttcagaacgcctggtctgacgactatgtgaataacggtacggcagccaaagcctgtcaaaacatggggtatgccaccgcgtccgcctacggacagccgataaaaacctgtaccctcatcagcggctcgctctgtctgaacgaaagcgtgatcattcagtacaaatgcatgggatatgccgttacctccgtaaaccagaacccatggtattaa

SEQ ID NO: 169456 - DNA, 471 bp, Enterobacter cloacae
atgacacttgatgcgttatttcagttaatgaagttcgacttaccgcctgacgcccgttcagccggtgatttacaggattttatggccaagcttatggcgacgaaacctcactctgaggccctgtcaccgttttcgcagcgcgtgtatatgctttgtgccgcccatcgcgatcctaaacaggcggctgcgctgctttcggcctctctgcctgaagcgggaaagcctcttcccctgctcgacttctctggctggccacaggtgcgttacgccgcttcaggcgaactacagacgcccgagtccgaagactattttcacagggtttcgtctgccgccacgattttacgcgcggcaatcctcgacgccgggcagcaggaaaacacccctgcttttgatattctggataaggtgctcagcctgaacggcgctttgccggaacgttataaaaagatggcgaacattacttactcataa

SEQ ID NO: 169457 - DNA, 4158 bp, Enterobacter cloacae
atgagcctgaaaaaatgtgcagcctggttgcaaatagcactgcagctgcttccgccgtcgttattttcgctgggagcgacgcccgtcgccgctcaggataaggtatctgagccgcaaagcaccgagcgggtggtagcgcaaaccgccgtgcaggcggggtcgctgctggagagcggcagcggccgttctgtcgcaagcgcaattacgtcccaggcaacaaataccgccacgcaggaaattgagtcctggttaaatcaatttggtaccacgcgtctgaatattggtaccgatgagcatttttccattcaggacgcggatctggatctgcttatccctttatatgagcaacagtcctcgctggtgtttacccaactgagcgggcgtcgtcacgatgacagaaatatcgttaatgccggattgggctaccgcgaatttaattccagctggatgtggggcgtgaacgccttttacgatcgtcaggtgtcggcgaaccagcatcagcggctgggcgtgggggctgaggcaggctgggactatctgcggctttctgcgaatggctattatcgcctgagcgactggatgtcgtcttcacgctatcaggattatgacgagcgcgtggcgaacggttttgacctgcgtgcaaccggctatcttccagcctatccgcagcttggggcgaacctcatctacgaacaatactatggcgagcacgtcgggcttttcggagacgatgaagacgatcgtcagaaagatccttacgcggtgacggttggtctgaactacacgcccgttccgctgattaccctgggcgtaaaccaaaaaatgggcaaaggcgaggcgtcggacacgcaaataagctttgccctgaactgggcgcctggcgtgccgttggctgcccagcttgacgcagatcgggtaggggctcaacgcaggctgatggggtcacgcaaggcgctggtggagcgtaataacaatatcgttcttgattatcgcaagcaggagctgatttcgctctcgctgcccgaaaacattgccggtgaggagaacgcccggcagaccgtcacggcaaaagtgacgtcaaaatacgggctcgagcgcatcgagtggagcggcgacagtctgatccgccacggggggaaaattaccgtgggtgccgatccggcccaggcggtaattacgcttccagcctggcagagcagcggctcaaacgtctatccgctaaccgctaccgccaccgacaaacacggcaatacctctaataccgcgcgaatggaggtgagcgttaacggcatggacgttaacgccttacagtccagcctgacggcatcacccgccaggcttccggcggatggtaccagccagtctgcgctaacgctgacgctgaaaaccgcctcaggagaagttgccaccggcctggcggagcgcatcagtacagcgcttacgctaaaaaatagcgtggcgtctgctgccgtggcggtagcgccagaggtaagccagttccgcgaatcggcgcgcggcgtttacacggcgacgctcaccagcggcaccacgccggcgaccatcacggtgcaggcgctgatcgacggaacggttaaactcgctaccgcgtctgttactgaggaggcgatttccgttaatcctgagatcgctacccttgagccgtcgacgctgagtgcgccagcagatggggtaacgtcggtctcgattgtcgcaagcgtagtcgaccagtatggcgctccgctgtcagggcaggtcgtgatgtggtctgcggataatgcagcggctctgctgtcagataagcagtccaccaccaacgaacgcggggaggccagcatccggctgaacagccgcgatgtgatttcaaccgtggtaagcgcgcagctggaggggggaaacacgctctcgacaccagctctgaaatttattgcggatgttgccagcgcccgggtggaaacggtaactgccgataagcagaaggtcgtggcgaataatagcgacagcgtaacctataccgcactggttgctgacggcagcgatcatccccttggcaacgttacggtcaactggaccgttaagcgtgaggatgggactcaggttgcgagcaaaacctcagtgacggacagcgcgggtaacgccacattatctttatcgtcggcaaagacgggcgttgtcttggtttatgcaaacgtgaaccagcaaaatgctgtgaaagccgaggccgtgacgttcgtggccgataccagcacccagcgcattaccgcggtaacagcagataaacaagaggctatagcaaacggcagcgacggtattacctggacggcacaggtgcgcgatctgcagggaaacgcgatttcgggtgtggcggttaactggtcggcagataacgatgacgttaagctcgccgacaacaccacgctgacggacgcgcggggaaatgcttcgctggtggttacctcgctgaaatcaggcagcgtggttataacggcccggaccgcggaaagcgcacccgttcgtgctgacagcgcaacctttacagccgatctcacgaccgcgaaactgacggagatggccgccgacagcgtgacggcggttgccaacggcaccgacggtattacggtgagcacgaccgttgtggatgccaataataacccggtagtcggggcgcaggttgactggaaggtgagcccttccggcgcgacgttatccgatacggccagcgtttcggatgcatccggtaaggcgagcgtgacgttacgctctgacacggccgggaactatgctcttcaggcaacgctaggcagcagcagatcaagcgtgttgaatctgaccttcacgggtgacaacacgacggcaaagatagctaccgtaactgcggataaaacgaccggcatcgtggccgacagcgataccgtagtattaaccgcaaccgtggtggatagccatcagaaccctgtaccaggcgccgccgttagctggagcagcactcatgccgccgacgtgatcctgacgccagcttcagcgatgaccaatgcgcaagggcaggctgaaacgcgcttctcatcgcgcaaggcgggaaacatcaccgtaaccgcgatggttaacggtaacggccagacccttgctctctctgtgatcggtaatccggctaccgcgcaatttacgagcctcagtgcggataaaaaagaggcggtggctgacgggaacgcgaccatacgctggaccgccaccgtcgaggacgtcaaccataacccgcttagcggtgtggatgttgcgtggcgtgtagataacagcagcgtgaagcttgccagcgccagcacaaaaaccaatgaagcgggtcaggcggctgtaacggcgtcaacgacaacggccggaacggcaacggttagcgcaacagttgtcggttcaacggcggcgataaacgcggagccagtaacattcactggcgatgcgaccaccgccagggttgagagcctcaaggccagttctgaccacgcggtggtcaacaccgaccgcattacctacaccgcggtggtgaaagacgtaaacggtaatgccgttaaaaatgcgacggtcagctggagcaccacgcttaatacgctttcagcgcaaaccagcgtgactaacggcagcggcgcagcgaccgtgaagctgagcggcccggataccggtacggcaaaggtgagcgctgcaatcaataacgccgctaaaaccgatcaaacggtggtgtttattgccagctattcagccatgtggagcatcaccggttcgacaggggcattcagtacgggcgcaatatttggcttcccttcgctggggttcgtggcaacgggcagcacaaaggggtcgacgtctctggtgtggaccgcagaaggttacagcacgcttgtcgtgccgatgaaggacgaacagggcaatacccgtgacgtgaaaattcgcgcgcagcgcggctctgactgttccactcgtccgttcaacgtggcggttttgtgtagcacctgggaaaccacgggctattgcgcaagcctgaagtatgtgcaggccgataacccggatctcccgagcggggtataccggggggatatcaagtttgccggtaaggactggcactcgtcgtggtcacttgattacaccgtgtccaccacgctcacccaaaaatga

SEQ ID NO: 169458 - DNA, 192 bp, Enterobacter cloacae
atgctgaacagtaagttatgtctgaacgtctcccttattatcctgagcctgctactcagcggctgcgtaatcggggaacatcactcaaccgagcaccatcgttcggatcatcatccctggcaccatgaatcctcccgcgcgcacggctggcatgattttcatggccatcatggccatcacggacgccattaa

SEQ ID NO: 169459 - DNA, 1353 bp, Enterobacter cloacae
atgactcccgtacgtggctcgtcctgtaatgagaatgaagacaaccgcatgacaacttttcgcgtcagggacatttttatcctgggttttcttaacttcgcgctgtttgtcggggcgggtaacatcattttcccccccttaatcggcttacaggcgggaacctcaatctggtatgccgcaacgggatttttgattacgggtgtcggattgccggttcttaccgcgattgccatggcgaaagcaggcggatcgctttcggccatcaccagcccaacggggcgcctctgcagtctggcactgaccgttacctgttatctctgtatcgggccgatcttcgctattccacgtaccgccaccgtttcatacgaactggcattgcagcattatcatttgagtaaaagcgggttggccctgtggagcgttctcttcttcagcctggtgattctggtatcgctttatccaggacgccttctcgataccgtagggaagtttttatcccccctgaaaatcatcgccctgctggtactgacgttcacggccatactcgtcccggcaggcgttccgatgccgccacaggggctatacgctacttcgcccttttctcaggggatcaccaatggctatctgacgatggatacgctggcagctttggtctttggtttggtaattgtcagagccatccagtccagaggcgtgacctctcccggccttatcacccgatacgccttgtattccgggctgattgcaggcgtggggctggtggtggtctatgcaggcttgttccgccttgggctgagcagcagcgggctgactgaaggcgcaacaaatggagcccaggtgctcagcgcctatgtgcattacagctatggacctgccggagatctgtttctgggcgtgctgatgacccttgcctgcctggtcacggctatcgggctgacgtctgcctgtggagcctggttcagcgatcgcacccgcttcagctatcgaacctgtatctggtttttttccatcgcctccatgctgatatccaatatcgggctgactcagctaatcgccttatctgtaccgattttgacggcgatttatccggtatttatcgtgcttattctgacctttttcttacggtcatcattccgctctgcgacgctggtgattgtgcctgcggcatttgtcacctttctttttggtctggcagacgcgcttaacgccgtggggggaccattgtggctgaacgcgctgagcagcaggatgccgcttcacggtcaggggctagcctggctgctgcctgccgcaggcacactttcgttaacgttcgttattgaccatatacggtataaacaacaagcctgttaa

SEQ ID NO: 169460 - DNA, 345 bp, Enterobacter cloacae
atgcgtctggcatcatgcgctgttgcgttagttattatcgcttcattagcgggctgtaaatctgaagagggaaaagcctttattggcaactggattgaggattcaaattcaaaaactcccgccaaaataaccatatctgaggataagtctggagacaatcatctctttgcagtgaaaataactgacctgatatgggataaagaaacgggaattcattacaatacgaagaaaataaaagccatggcaaacaaagaacattttttgtcagcttacaacggcgataacttcatcatctttgacgatcgcctaatctataacggcgatcgttataaaagagttgaatag

SEQ ID NO: 169461 - DNA, 1137 bp, Enterobacter cloacae
atgaagacatttggttggattagaatgactgtttttttgtgtctggtgactatttcaaaaacagtcctggcggtaacgtgtacgctcgacagcgcttctgtatttaaaacagccagtagcgtgacgatgccgcttaatttatcaaccatttcggtgagcaatgatatacctgacgggaccatcatttatcaacagaaatatttgccaagctatgcaagtgctacggtgaattgtgataataatgctacctggttatatgttatgtctttgctaaacgttccgatgccactctcttcctggaccggtagcattatttcccctgaagactggagagggccagattcctgggacgggcatatatacgaaacaggcgtagctggtattggcgtgacaataacaatgatgagttctcgtatacccgctccgggcattgttggtaccaactgtgctgcaagtaataaaagttgtactgaccccggtgaatatgcccgagcatatatagcactggtaaaaacgggtccgattagtgcaggggttatcaacgccggtaacctgcctacgtttacggcagcgctgggaagacaagaaagcaatattctgctctataccctgaatttttcgggggcgattaacgtaaccctgccaacctgcacgacccctgatttcagcgtttcattagggcaatggtccacaaagcgctttaatgtcaaagggagttcctcgccatggattgcggcaaacattacgttgactaactgtggagtatttagtgggagtaatttaagtagttattggtcagatgataatagttcggattcctctaccatgcagtggaatacatgggcagtttcattgtctcccgtcagttcagtgctggactcagccaacggcattatgtctgttgataccagcgatcccactgccgccacggggatcggcattcaactcagttccggtgatacaacatcggctgattcacacgttattgatttcagcagcagtttatccggaactttcaccgctgatggtgccagcagtgtaactatccctctctcggcaaggtatattcagacggaagatcgtgtgacggcgggcaaggcgaacgggaaattagtctatacggtaacttatttttaa

SEQ ID NO: 169462 - DNA, 537 bp, Enterobacter cloacae
atgaaagttttagtctgtgtatttaccgataatgaatttttcttttcagcaatggtggagataatcgcctcgcatccctttttaacagagaaatatatgctgtgcaaaatccgttccgatgagatagttaaatggatgcatacggctgatgagcaaaatatgattatggccgggccggatatggagtcgttggtcaggattttttgccttgaaaaaaggtgggattatttaacgaccaggttaaatgccagtgagatgcaagattttctggtcctggggataaatcggcattatgaaagaaagaccaatcttgttcaaaccaggaaaagtatgaagctttcaaaacaggagctgaacgtgctgtcgtggtttttgcttggtttaactccttataatatgtcaagatattatggtttgtcagtgaaaacaatcagcacctataaaagacgcctgatggataagcttaatataaagtcggatgctgaactttttaaagtgggttcgacctataaaatgtatcgaaaaacatttggctaa

SEQ ID NO: 169463 - DNA, 2484 bp, Enterobacter cloacae
atgaagaggagattatcggtatggcctgcgctttcaaccgtggcttacggggttatttctgctctgtttttctcttccggagctcaggctgatgatgacatacagtttgacagtaattttttgcgcatcgcacatccggaaaacgtcgatctgtcggcctatatgaacaacggcctgccggctggccggtaccgggctgatatttatctgaacgataagctcatcatgatcgatgacattcgtattagcggaaaaggcgccgcctctcagcgtattcttttgtcgcccgctaccgtggcagggttgcagttaaaagaaagcaaactgtgtgcaaatagctcagggcaatggtgcgatttgcatgcggttatgcctgaaagtcatctggaatttaacggcggcagacagcggcttgatatcagtattcctcaggccatgctgagccatgccgcgcgcgacgccgtaaacccggcactctgggatgccgggatccccgcgctgttactgggctataacgtgaatggctaccgcagtgaaaatagcagtggagaatataacaacctgtatgcggcgctgaatggcgggctgaatatcggatcctggtattttcgccataacgggacgttaagctggcagcagcaaaatggcatgcagcagaaaaaatatatggtgctcaacagctacgttcagcatccgctggcgggtattgaggggaacctgacgttaggtgaatcgaacacctccgggcagctatttgattctgtggcgttcacgggggcttcggtagcgagcgatgacaggatgctgcccgcctcccggcggggctacgcgccggaaatccgcggcgtggcgcaaaccagtgcgaaggtaatggttcatcagaacggaaaactgatttatgaagcgtcagtctcgcccggagcatttgttatcaacgatctgtatccgagcggatatggcggcgatctgaacgtcacggtacgtgaggcggatggctcgctacatttttttgacgtcccctatgcatcggttgcacagcttctgcgcccgggaaccaaccgttacagcgcgacggcgggcaggctgaggggggactatcttcgcgaacgaccggcatttggtgaagtgacgtatcagcgggggctgacaaacagccttaccggctcgggagggatccaggctaccgcgttttataaggccatgcaggcaggtcttgccgtggggacgcctgtcggggcgatgtcaatcgacaccacctggtcacaaacccggttaagcgataagacgctgcggggtgaaagtatcagggtgagctacagcaaatttataccggcaagcagaacgcagctctcactggctacctggcgatactcgacgggaaattatctttcgctgaccgacgcctcactcctgcgtcagcggcatccgggggagacggcaagctggcggacaggtaaaacacgcaacagggtgacgctaaccctcaaccaggggctccccgataactgggggcagctgtatgtgaccggtattctacaggattactggggacgaaaaggccacgaccagcagtatcaggctggctattccctggcaacaggcaaaatgaactggagccttggcgttaaccgtagccgcacggcgggaggcgtgtttcaaaacacctggacgctgagcttcaacatgccgctgggaggaacttccgcgccgctgcttaccggacagatttcacgagacggccagggacatttcagcgagcagattgcgctttccggcagcgcaggtgagcgacagcagtttagctggaatgccggggcatcacatcagcatcaggcaggggattcgggacaaattggtggagcctggaccgggccggtttccacgcttacggcaaactatgcccagggcaacgcgtggaaaagcggctcggttgggatgagcggtaccgcggtggcgcattctggcggaatcactttctctccatggacaggcaataccttcgcgctggttgaggcgaagggggcggaaggcgctgatataccgggctatgccggtacgcgcgttaacggttcgggttatgcgctggtgccaaacctgatgccctatcagaaaaacagcgtgtcgatagataccgcctcggtagaggatgacctggatctcgacagcaccagccaacaggtgatcccgtacgcgggagccgtggtgaaggtcaaatatcgcgccgctgagggcgtgccggtgctggtgacggtacgccggaacaacggtgaaggtgtgcctttttctgcccgtgccatcaatgccagtaatcagactgtgggatacgtcgggcaggggagccgcctgtatgcccgccttacgcagcaaagtggcgtgctggagcttcgctgggcggacagcgcagcgtcccgctgcaaaatgaattattcactcccgtccacggcgggaaaaaaattgctgaccttcgacgcaatctgtaattaa

SEQ ID NO: 169464 - DNA, 699 bp, Enterobacter cloacae
atgaaatttaaattactcggtacgtttattttactgtggttttttagctatattgcagcggcagcggtctcgctttccggaacgcgcgttatctatccgcagggcaaaaaagagatagcgctggaagttaaaaatcatggtgcgcagccggtgctgacgcaaaactggatcgatgacggcgatattcattcatcgcccgatatactcaatataccttttattataacgccgcctatagccagaattaattcgcaacaggggcaatcattacgcatctctgctctggagaatacgctacctcaggatcgggaatcggttttctggataaacgttctggaaatcccggcggttaataaagcggcagtaaataaactgcaaatggcattccggacacgcattaaattgttttatcgccctgaagggcttgtcggaaaacccgaggccgcagctcagcagcttagctggcgaaaaatatcctccactcagctggaggcaaaaaataacaccccatggaacgtttccctggcaggcgtggcctccggcaggtggaaggctaccggagatgtagtgcccgcctggggcaaaaaaatcttcaccataaaaagcggacagcttctctccagtagcggggacgtcagctggacctacatcaatgattatggcgctgaacgttccgcaagcggcttcctgaaaaattaa

SEQ ID NO: 169465 - DNA, 357 bp, Enterobacter cloacae
atgaaatttttaactgtgattgttgccgtaacgctcctcacggcatgccagctggtgcgtccttttggcgatgcgaccacctataaaccttttaccgtttcatcgcatcccggtctggacggacgatatcactgtatgcgaagcgcgctcggcgccgaaggctatgaggtggagtacatcttccccgagcgggacacgcctaacttttttgatatctctgaggggaaccggctgattgcccaggttgatatgacgcataccacaggggccagctttctggatattacgcttatctcggggtcaaagcagactaatgaagagcttggccgggtaattgcaccctgcgtaagcagatga

SEQ ID NO: 169466 - DNA, 339 bp, Enterobacter cloacae
atgacgttaacgaaaagcgctgctgccctgctggctgcagtatccattgaagttatcgccacaaccttattatcgttatcaaacagttttcagcgccccgtagtggggttatctgcggtaataagctacggcgtaagttattattttttatcgattgcattacgccggattcatatcggcgtggcctatgccatctggtcagcggtcggtttattcagcattaccgctatacaataccgctgttttgactatacggtgtcccagagggcatgggtgggcctggggatggtcatcgcgggaaccattattctgaacctggcgatcaagcaaaacaaataa

SEQ ID NO: 169467 - DNA, 324 bp, Enterobacter cloacae
atgtatattattctgaactgccttttctggctgattatttccgtcacaatggaagtcaccggcacgctattactcccggagaccagacattttaaaaatattccattaaccattcactgcatggcttgctacgctatttctttttattctctgtcaatgcttatgggatatatttcacctgtcgtcgcctattccgtctgggcggggctggggattgtgatgataaccgtgatgagcggcattttttatcatttaaaaagcagcattctggaaaagatcgggattggctgcatcgtgaccgggctggcgatcgtcgccttttaa

SEQ ID NO: 169468 - DNA, 960 bp, Enterobacter cloacae
atgagatcatcagcagaaccacgcagcggcacttctgaacagacgtacggctggatctcaaacattcagcggttttcgctacatgacgggccgggcatccgcagcattatcttcttaaaaggctgccggatgcgctgtgcctggtgcgctaacccggaagggcaaaccaccggccgggatgttttctaccatgccgaccgctgcctgcattgtggcaaatgtgctgacctgtgcccgacgaggctgcacggcatggaccacagcgtgcatgttcttgaacgcgaccgcagatgcgcgggctgtcggttatgcgaagcgcgctgtcctgccgccgcgctcaatattgtcggagagcatgttagcgcggataccgcctttgaaagggtcatggctgatgaagtctggttccgccagtccggaggcggcgtcacgctcagcggcggcgaggtggcgatgcagcctgaatttgcgcgcgttttagttgagcggctcaaagcggaggacattcataccgcaattgaaaccgcgggctacgcttcctggcacgctattcatcaggcaacgtcaggctgcgatctgatcctgtacgatttaaaaagcgcggaggatgcgctgcacgtccgttataccggcgtcagcaataagacgattgtgcgcaatcttgcgcggctattacagggcgggcaacagattattatccgtattcccgtgatcccctattttaacgatgccccggatcgggccgataaattactgtcgctgatctccgcgctaactaagggaagagaaaactttcagggggtggaattactcccctatcaccgtttcggtacgggaaaatataaattactcaacagggagtacggctggaacacaggtacagctaatgtcgataacttcttatcgattgcacatcactatcgcctgccggtaaaggtgtcgggtacgctcgcaggttaa

SEQ ID NO: 169469 - DNA, 126 bp, Enterobacter cloacae
atgtctacgaaaccagatgaagtctctgaagcgggcgttacgcccctcgaacgtcgcgttgttatcgtgacgctcctgtttatgtttttgatatatgcagcgttactgatatctccctggttgtga

SEQ ID NO: 169470 - DNA, 585 bp, Enterobacter cloacae
atggatgcgtatgagacaatggtgaatgagattgaaaaagcattaaaaaaactcattgctatatgtaataaatactcgctgcccgggagtttcaatgcagtcaatgacttggataaaaccttcccgtccaacttacctcgttcgacagagttgggatttttatataaaaattataatcctgaaaagttaaagattgaaacaggcttcacgccaattaaacttcactcagtcagtgaactcttgaaggctcaaagtggttacgaatacttaccagataattatcttgttattggtaatgatttaggcggaggtaaacctataattgcggttatcgttgaagggagttcctatgtttatgcaagttatgatgttattgagccatttaagatagctgatagtctctctgaattcatattttctttagcggagcttattgatttggtatatggtcactacgatatctttgacatagcagatgataatgacgaagtaaaaggtaatttcattgatgagctgcgggaaaggattgtaccacttatcggtaatgaaaatttcaatgcgttttataattatttttatgggtaa

SEQ ID NO: 169471 - DNA, 453 bp, Enterobacter cloacae
atgatggatgtactactttctaccatcgtcagaatggcgacgttgagcgttcctggagtcgaagaaccggcacttaaaaatccggatattaaaggaacctctggcgctctggagggagacgagataaccgctgagtctcttcatgcttatgcaaagattgaacaagaattagcgatcgccagaagaaccctgatttctgaaactgtagaaattgaagagtattacggaaactccctcaagggcggattgggtgcaaaggttagtgccgctgatttcggcttggatgccagtgccgaaaaaggaaaagtaacaaaacgcgtgattaaattcactgggttcaatgcacaaaccgagtccatgttaaatgcaattgaagcgtcattgctttctaagttgaaagcagagctatctgcaaagcagttggataaagttgctccaaagagcaactcataa

SEQ ID NO: 169472 - DNA, 918 bp, Enterobacter cloacae
atggctcagcattctgcaaccgtgttacactcagtatgttgcaggtttcgattaaggagtttagatttgacacctctcgaccgtataatttgtgatttggcaaatccagaacgcaccgtttcagaagttgcttctctggccagctgtgatcgcagccatgtttatcgttgcatatctcgctacgggttgacactgaagcaacgtcagaaaccagcccctcgggaaagcgcgaaagataaaatcctcgctcttgctgatggacaccgcacgtcggcagagattgcggaggaagttggttgcacagaaaagcacgttcaaaacattctccggattcacaacgccaaccggctacctcgtggtgccagaaatggtgagttgaaccccagctttcgtggtggtcgaatagttgatctggatggatatgccattgttccagcgcctgctgatcatccgcatatgcgcagaacgggcatgatttttgagcatcgcctgatcgctgaaaagaagcttggacgttatctgctgccaccagaagttgttgaccatattgacgggcttcatctgcataacaacccaagtaatctgcgagtttttgattcaaacgcggatcacctgcgtgcaacgatttcgggacagcggccaaactggtcagaagaaggttttgcgaagatgcaaataccttcaccgattcgtccaaactatccacagatcgatagctaccgtcagcgcagagaacgcggtgatgtccgcttgctacaaattctcctcgctgcgtcacgactcggtatagattcgccacaccttttgggtacgcaccaccacttagagaaagctcaaatcgattattctcatccgaccaagataaaacgcgcattggccgagttatttcctgaatgggtagaatcccattctctgtaa

SEQ ID NO: 169473 - DNA, 294 bp, Enterobacter cloacae
atgcttgaaatttataagaagtacgagcaagacctggttatggatactgatctactattacacgggatgattaccggagatttatatgtaaccaatggccattttgcaaagatccatgggatggttactggtcatatttacgttgagccaggtggtaaaatcgttatttatggtatgtctacaggtggcttaacaaaccgtggaggcataattgaaatttatggttcagttaccggagggttacatgaggagagcggagacactctaatccatccgggtgcgaaaatcggttag

SEQ ID NO: 169474 - DNA, 660 bp, Enterobacter cloacae
gtgggaaataaatttaaatattgtcacaatctcaaaaaaatagctgtttttctacctcttacaattggtggcttcctttttgttaatagcttattcagttgttctatgaatttatgggccgggagtggttatctatttacaggtctcggtctgaccattttttttgtaagatggctgttatggggggacttggattttacttctggcggagtgatgttaacagttgggtttgctttagggataataagtgtgtttacaggttcaaaagcactcgacccggcatacaacaagctgagagtagacatatacagcgtgtttgtggaagcctcgctaacttgtaaggggggcagccaaccctacattaatgccgcacgttcttgtggtgttgcccccatattagatattatggatttgaattaccagctagccaaagctcgttatttgaatcccacaacttcgattgttgatggtgtttaccattcaacagatggtgtaaaggtagatccttgtttagttaattattataaattatcttcacagtgtcccgatgcatttgttcaattgaagattgaccatcccgaattaacctcacctgaatacttcaaacagtgctcatctctttggggaatgatacgtggttggataggaagacttttttaa

SEQ ID NO: 169475 - DNA, 1158 bp, Enterobacter cloacae
atgctttataacactggcaccatctctattaacggaaataccgccaccgggacgggtacaaattggacggcacccgccagccaggtccgcgctggccagacgattatcgtcatgtctaacccggtccagatgttccagatttcagccgtgaacagcaccacgtcgatgacggtaacgcctgctgcatccccggcgctcagcggccagaagtacggcattctggtatcagacaatatctcggtcgacgggcttgcgcaggccatatctcagctcatcaaagagtatgacgagaacatcggcgcgtgggagtcgttcgccaccacctcagcaaaccagagcatcaccgttaccatcaacggcaccgccgtaactatcccgggcattggtaaactggcgaagaaaggtagcaatggagctatcccgatcgcgcagggtgggaccggggcaacaacggcagaaggcagtcgcacaaacctcggtttgggaagtagcgcgacaaaggacgtcggaactgcttccggtaacgtcatgcaggtaggcgcgttcggattaccttctggcgatgcaagagcctttaaaacagatatggcggttgcacctgacgggacgaacttcaacagtctcactgagccaggtacttaccgtttgcttttagatatggcgaaatcaacctcagggcctctcaccagttggtatgggtatgttcaaaattatgttcgaattgctgatgcagccttaacgcagttctgcttgccgtatgccagtaaaaccgatgcaggtaggttttttttcagggggtacaatactgatgcatggtgcccatggaaggagatcatgacttcagccgtgtctgatgggaccatgaaaaacatcggtgatgatcttgatccagaggtagccctgctgaatatctgccggatggagttcaagcacttcacttttaaggatgatgaaacgcagaccccacggcgcggggtaatatcgcagcagatggaaacgattgatcccgagtacgttaaagaaataggcggcctgctgcacctcgatcagactccaatgttgctcgatgcgctggctgcaattaaagccctggctatccgcgtcagcgaattagaggaagaggttaaagttgcgggtctttgctcatccgctggttga

SEQ ID NO: 169476 - DNA, 384 bp, Enterobacter cloacae
gtggttaagcttttcggaaccggtgaaattgaatgtaacgatgaagcggaaggggttactgcgtcgagagaggcggttggggtgtatcgagtcactggcagctgtggcctgaattctgaaggatggacagtcgagatcccccaggatatcaacggcaacttcctgtgtttcgttgatatctcgaccgaggatgatggcgtgctgactgtttcagtttttcgtcgacgctttgatgtggaaaaagcaatgattattgccggtgatccgatggatatcccggatgaccgatggatagacctacgcctgcaaatgtctgccgattctatatacaaccagaagctcagaacagcagagctggccatgactgccgatgcaagcgaataa

SEQ ID NO: 169477 - DNA, 897 bp, Enterobacter cloacae
atggttaataccttaaggaatcttgatttaaacctgctggttacgcttaacgcgcttctgaccgaacataatgtcacccgtgctgccgagcgtttgcatctttctcaacccaccgtgagcgtgcaactcgcccgacttcggaaggtattcgaggatccgttactcataccgggtccacgggggatgcgcccaacccttcgggctgatgagcttcgtgaaccactgcgacatgcattagcagcactcgaagaggtcatctccccaacgggtgtcttcaacccagcgcaggcaactcaccactggcacgtcgccgcctttgattacggtgtcttaactatcctgcgtccagccctgaaagcattacgcgctgctgcgccagctacacgtattgaagtagtacatatgcttccctcgcaagcgtccaggaaagccgatcggggagaaattgacctggcctttatgaccagggacgaagctccgcataatttatatagtcgaacactgttcactgagcgctatgtacttgttggtcgtgcgggaaaccccgacctgcaaaaacccctgtcgcttgagaaattctgtcagcttgaacacgtcattgtctcaccagaaggtggaggctttcatggtgcgacagataccgtattggccgaacgaggtatgacgcgtcgtgtctcaatgtctgtgccaggttttctgcttctctgtgcggtgctggagagttcagatatggtcgccatggccccatggcggctggtgtgtgaaaacaatgcgctgcaaactgttgaaccaccagttgaggtgcccggatttgaaatggttatgctctggcctgagcgggtccatcgcgatcgcgcccatatgtggtttcgtgagaaaatcgcctcatcggtataa

SEQ ID NO: 169478 - DNA, 771 bp, Enterobacter cloacae
atgaatgtacttcttgtctacgcccagcccgaaaccacctctttaacacgtcatcttgtccacatagcgacgcaggtattaaccgcgcagggccactgtgtcgtgcattcggatctccacaagatggggtggaaagctgtatttgattcccaggacttccctgaacgaattaatcctgaacgtttttcctatattcaggagtctgcgcatgcttttgctcatggacgccagacgtcagatgttgaacaagagcagcgtaaagttttggcctcagatgcggttatcttccttttcccattatggtggttcagtatgcctgccattatgaaaggctggatagagcgggtgtgggcctacggtcttgcatatggctatcagaataagggcaacgcgtatcgttatggtgaaggcggttttaaaggcaaacgggcattgcttgctgtttcgattggcgggccagaacgtgattattcacccagaggcatcaatggtgatttagagcaattattatttccgatcacccatggcacgctcttttataccggaatggaggtattacccacgtttgctgtttacggtagtggccagcttaacgctgacgctatacgtgaactggagaccagctggcgaagtcgtctggaaaatctctttaatgatgcgccgatcccttttcgttcacaaaattcaggggtgtacccggaccggcatgtactggcggaacatattgcaccgggtatgtctggacttgccgttcatcttgaggatgactga

SEQ ID NO: 169479 - DNA, 759 bp, Enterobacter cloacae
atgaacagtttttattcgcagcatgccggttgtactgtgcgctggctcgatcttcccggttcaggtgagcctgttgtatttatccacggattaggctgcgcctcttcgtatgagtatccacgcattgtctgtgacacccggtttggagatcgcagagccattctgatcgatcttcccggcagcggttacagtgagaaacctgaaaagtaccgttatcgcacaagcgagcaggcgcaggtggtagttgaactgttaaaccatctcggcctggaccatttctggctctatggccatagcatgggaggaagcattgctattgaaacggcagtgctattacagccgcgcgttaagggattaatcgtttctgaacccaattttcatgcgggcggtggaatattcagccgatctattgcggcccaagcagaacaacggtttctggagcagggatataatgaaatgcttcgcgcagaaacgtcgccatgggctggaagccttcaaagcaatgccccctgggccgtttggcgcggcgcaacgagcctggtagagggggtaaaacctgactgggaagacaagttcttgtcgttaacctgcccgataacgttagttttcggtgaatggtcacttcccgatgaagattttaatcgcctgcaacaaaaaggcgtggcgacaaagattatacccaatgcgggccattcaatgtcctgggaaaatccttctgcgttagctcaggctttagccaacttctttgatggtaagtga

SEQ ID NO: 169480 - DNA, 2175 bp, Enterobacter cloacae
atgactgcgacgactgccaccactcaggccttaatcgggtggatcaacgagacgcgacagcacgccccgatgctggataacgaagccgatgccctgcttgcgcgtctcaacgcagcgcgcgcgcgtgaggaggcgctcgatcgcgcgcttatcagccagagcaccgtgggcttatacggtcactctcaggcggcgaaagcgcacctgctcgcgtccctgtgcggcaacggcaacgaacggctgaacgttatgccgggtcaacgcacgtttgactacttctcgcatatcaatcccggaaacgcgccgaccaatatggccgttcgtttcagcagaacggccagtgagatcgtcgatgatgcgtttccgctgcggatcgcactggtgacggaagccgagctggtacagcttttcattgcgcgaaccaccctgcacccgcagatccgcccggttgaaaaatccgttatcgaagcccgccttgaacagtggcgtgccctgcgccagccgcagagcgtgccgggaatgacggcgcaggacgtcgcggccgtcgcccgtttctggcagagcatggtaccgggtgcaaaacagcacgttgacgatgccctgtggtatcagtttgcgctgctcgtgccgtcgctcgatctcagcacccgcgccagcgtctggtctctgctgtggggtgagcagcaggagctaacccagcagtggcttaagctcgcccatgtgcttcatcaaaccagccatgccggcacgcttgctgcgccgttgagtctgctgatggacagcttcggtctgccgtgtgaaggattcctgacccctggggcgttaagcgcaccggaagcgcaggaaacgctccttcaccctctggaaaatggcgagatgctcaatgccatcagccttcctgtcgacgtgctggcgtttctcacccgcgaactggtgctgcccgttgagggtgccgtactggacagcgtggatattattgatattccagccatttctgacgacaacacgccgctgatgcaccaggctaaatccctgtggctgctggagcattatcgccagcagctccagccggacgtgctggttatctgcaacgcgacggcgcgccaccagcagacggcgaagacggccaggatcctgcaaaactgggtaaaagagacgcagcctggcgaggagtccgcgctgccgggcctggtgtgggccattacccctcacgatgcgcgattcaccacaaagcagaatcttgacgaagccgttcagcagctgctgggtcagccgggactgcgctgggggacgctgcaggcgctggataaccacagcatgcaaagagtgattgaatggctatcgcaggctaccctgccggcgcagcggcagaagcgactccacgcgctgaaatcgctgctgcgacaggagctgtctgcgctgatgcagccgtacctcgcgccgcttacgcagacgccggatcaaagacgctctcaggccgaaaaaatggtgcgaacgctgcaaggcagcgctacccgccacggtgagctgcttgacggtcttcttccgccgttaaaggcatttgaaacgctgctgacggttcaccagcctcgcgaggagcaggtcaacggcctgtttaatgatgttatcgacctgttcgcagaagagacgcacgaaagcacaggtgcgactcagaccaaagacagggcgcggctggcgcatagcgtctgggttaaccatctgcgtcagtggagccgcaacgacgcggcagcggcccgtctgggcctggatcctgcgattttacagcatattgccgatgtgcttatcgtcaccagctaccgcctgaacctgccgctgcagctgcaacgtattgtggaaacggataaaagcagcgctgcgcagctgcacgccgccacaggcaatttcatcggctggctgggatacgatctgaccgcggtctctgagcgtccggcaagccggatccgtaaaggacagccaatttttgtgaccccggtggtcagcagcgcctctccacgcctcacccgactgggcgagcagcccgttcatgcggcgacagcctatgtatatgactggctggttgcgctctacacccgcgccattgagaacgtggattaccagtgtcctcacgacgtgcagcctgctgcgcgcaggaaattattaaccctgctgccttaa

SEQ ID NO: 169481 - DNA, 234 bp, Enterobacter cloacae
atgtcacatttaagcgacgtgatggcccgcgttgatgctgccatcgaagagagcgttatcgcgcacatgaatgaactgctgattgaactcagcgacgataccgcgcttagccgtgaagaacgttacacccagcagcagcgcctgcgcaccgcaattgcgcatcatggcaggcagcataaagaagaggcggaagcgcgccttgcccatctcacgcagggcggtaccattctgtag

SEQ ID NO: 169482 - DNA, 135 bp, Enterobacter cloacae
atgttttgccttatccatacacagaatgactggaaaggcagcatgtgtctgcgcagaagcaatcgtttgttcgggctgctggcaggcaggactatcacgttaatggttcagacaggcaaacaggtaactcaatga

SEQ ID NO: 169483 - DNA, 690 bp, Enterobacter cloacae
atgtactacagcaatgaagtaatacgttatttgcaggcgaataacatccttgcattaaaactcgaccatgcatttacaggcgtaggaaaagccttaacaaatcagattgaaacgatcggcgccggtgcaacgcgcgcactctattatacgtcatgctttacagatgaatatcaggacgtatgccagaaacaaaagtccgaagacatccgatttaccaaaggggtttatcatattatatggcatacagatgttgtgtatgaaatgctcaaaatctattttgaagaagtattccggcacaaaacttccgatcagctagagcatatcaaacatttgctaatggcagtaaatattcatattgccgcaagttcacttacaaacgcaggatttgctttagcaacagcttcatttgttgccgcgggcatgagtttaagtcttgaacttagtgtactgacaggacgaagtgcaggcggatttgttgggattattggcataaatggcgttgtgcagaaagcggcagatagcgccagtcgccttcatataacctacccagactactactcggcgttatatgcacaagaattggaaatgatgtacttcctgatagaaccattgtttgaacgagctggggcgtttaaagcacaatgggggtcggaagatgaaattgcagatatcatcagaaggctgatttga

SEQ ID NO: 169484 - DNA, 1473 bp, Enterobacter cloacae
atggcgaatttgccctggcgggtcagcgtgcgcctgatggctctcgcaaaaaaactggcgatcgtcgtcgggatcgttctgatcgtgctgctttcggtgcgcgtatatctttcacagcaggggccggcgctgcattcgtggcacacctggcgggcagacgagatgtctatgcgcgagatggacaacgcgagctttgcgcagtacctcacgcgtgaaaatgccatcttcagcgatctcgatagcgaggtgacggcgaaagcaacggcggaggagcgcacgccgcttaaccgctactaccgccagagcctggtgtggcccggccagttttccccggatgccaaccgatcctttgtcctgaagcctgacggaaaaccgcgcggggcggtggtgctgctgcacgggctgacggattcgccctacagcgtcaggcatctggccctgcattatcaaacgcgcggcttcgtggccgtggtccctcgcttgcccggtcacggcaccgcgcccggcgcgctgacggacgttgactgggaggcgtggctggcggcaacgcgtctggcggtgcgcgaggcgacgcgcctggcgggtaacgatgttcccctgcacctggtgggctactccaacggcggggcgctggcgatgaaatatgccctcgactcgcttgatgcgcctgaactgcgcaagcctcagcagatcgttttgctgtcgccaatgattggcgtcacggcatttgcccgctttgccgggttcgccgggctgccggccatgctgccggcgtttgccaaagccgcgtggctcaacgtttcgcccgaatacaatccttacaaatacaactcgttcccggtgaacgcggcgcgccagtcgtggctgttgacccaggcgctgcatgagcagatcggccgcgccgcccgggaacaccggctggcgcagctgccaccggttctcgcgttccagtcgatcatggattcaacggtcagtacccgcgcggtggtcaccgggctgtttgaccagctcccggctaacggcagcgagctggtggttattgacatcaaccaggccgggagctttcgcccgctgtttaagcccgcttcctgggccgcgctggccgacctgctgcccgaggctcaaaggcgttacagtgtcacgattattaccaacgccagcgccgacagttaccagacggtcgcgaaaacgacgcccgcgggaagcacgcgggagacggcaatcccgctgccggttacctatccgcgcgaggtctactctctgtcgcacgttgccattccgttccctcccgatgacgatctttatggccgccagcctgcgataaaaaatcactatggtattagcctcgggaccattgccctgcggggggagacctcggtgctgagcgtcggcaaagatgcgctgatgcgcgtgacgtcaaacccgttctacgactatatgcaggcgcgtatcgacagccgtatcggggattag

SEQ ID NO: 169485 - DNA, 897 bp, Enterobacter cloacae
atggatacaatctgggtacttggcgatgcggtagtggatcttctgccggacggcgagggtaaactgctgcagtgtccgggcggggcaccggccaacgtcgcggtgggcgtcgcccgtctgggcgggaggagcgcatttatcggccgggtgggcgacgatcccttcggacgctttatgcagaagacgctggcggacgagaaggttaatacgcattggatgcgtctcgatccgcagcatcgcacctccacggtggtggttgacctcgacgaccgcggcgagcgctcctttacctttatggttcgcccgagcgctgatttattccttgaacccgccgatctcccggcctttcgcgccggggagtggctacacgtctgctccatcgcgctcagcgcggaacccagccgttctgccgcgtttcaggcgatggcggccatcagacaggccggcgggtttgtcagcttcgatcccaatattcgcgccgatctgtggcacgatgaagtagacctgcgcgcgtgtcttgagcgggcactggcctgtgccgacgtggtgaagctctcggttgaagaactggcgtttttaaccggaaacgcgcaggtggacgaggggctggcggcgctgatgcgcggctgtcgggcccggctggtgctggtgacgcagggaaaagagggggttaccgcctggcagaaaggcgcgttgaggcactatcccgccacctccgttgaatgcgttgatgccaccggcgcgggggatgccttcgtggccgggctgctgttcgggctggcgcgcgagggagacgccgacctcccggccgttatcgcgatcgcgcagcgctgcggcgcgctggcgaccaccgcaaagggggcaatgaccgcgctgccgtaccgtcacgagctgtaa

SEQ ID NO: 169486 - DNA, 1380 bp, Enterobacter cloacae
atgacgctcttttccagccaacccggcgatgacggcctgccgggaccggcgcgcgcccgggtgttggccgcggtaatgaccaccacgctaatgggcgtgtttgacggcaccatgattaacgtcgccctgccgtccatggcgcaggcgatgcaggtccccgccagtaccgccgtctggtttgccaacgggtatctgctggcggcggccatgacgctggcgctattcgcggcgctggcggcacgtctgggttaccgccccgtatttctggcaggccttatgacctttaccctgacatcgctgggctgcgcgctggcaacggggcccggaatgcttatcgtgatgcgcatcctgcaggggatcggcggcgcggcgacgctgagcatcgcgcccgcgatattgcggtccgtgtttcccggccgattgcttggccgcgttctgggtttacacgccctgctcatcgcctccagctcggcgcttgggccggtattgggcggcgtccttctacacaccctgagctggcaatggctgtttgccgtaaacgttattcccggtgcggtggccctgctgctggcaaccggagcgctgccgcgccaggctgtaagcgttcgggtgcccttcgattcgctcggggccattttatcggcgctgatgttgggctcaacgatcgtggcgacgaacagtttccagagcgcagcacatcacacaatcagcctttgctgggcggcgatcgctgcgacgagcggcatcgcctttatctggcagatccgccgtacggaaaacccgctgctgccgccagcaatgtttaaaaatgcgcgttttaccctcgcggcccttacgtcgatgactgcgttcgtcagccaggggatcgccttcattgccctgccgttcctgtttcagagcgtctatggctatagcccgctcgtctctgccctgctgtttacgccgtggccgttggggatcgtgctcattgctccccatgccggccggtgggcggacacgatttcggctccgccgatctcaactctcgggctgatgattttcgctctggggctggggctgctggcgacgctgcctgccagcccagccatgtgggatatctgcctgcggtgcctggtgtgcggtattgggtttggctgcttccagagccccaataaccgggagatgctctcaaacgttgcccgtgaccatgcgagcttcgcttcaggcgttttgtccatcatgcggacgttcgggcagtgtctcggtgcagcggttgtgggggttatgctgacggcagatggaagaccggttcatgctgcgctgtggatcgccacggcagcctcagcgggatccgtattcgttagcgtaagccggttacggtcgctgaggctgataaaataa

SEQ ID NO: 169487 - DNA, 207 bp, Enterobacter cloacae
atgttctacgcatggttatcatccagacacagcttttgcagaatgatggtattgtccagcttcatgtgtttcgtgaccaccagaatacctgtcacggccttaaccccgaaggataatgacttgaacggtgaaggatggccgtacacgcaagttaaaaaaagccctgttaaacagggcgatgtttcaatgagcgaaaacaaagggtaa

SEQ ID NO: 169488 - DNA, 147 bp, Enterobacter cloacae
gtgaaaaattatttcgtagtaatgggctttataaaccagtcagttcgcctagatatttacgtgctgacttatttgctgattttagtcgcctatatgtggcaaacaagaggcttagtcaatatggttggcgccatcattcttggttag

SEQ ID NO: 169489 - DNA, 528 bp, Enterobacter cloacae
atgtttatggctctgcacaccatggtgttctatacgctcattgactggtatccatcaatggcagttgagcatggggtcagcgcgtcgacagcaggctatcacctgtttctgtatcaggccattgccgtcattgctaatttgacaactgccgcgtttatttcacgccttaaggatcaacgcctccttggcctcatttgttcactgttcattacaatcggagtggcagggattcttttcaaaccggctttttctgctgtgtggctgctgttcgcaggtgtaggtgcgggaatgtctatggtcacctgcctcacgctctttgggctgcggactcgtgaacacagccaggcaggtcagctatccggcaaagcgcaatgtatcggctatttgattggtgctctcggcccctaccttgcgggcattattcgcggccactcacttaactggaactctgtgttgctctgcatacttgtcgttacgctggtacaagcctattttgcatggcacgccggtaaggacagattcatttga

SEQ ID NO: 169490 - DNA, 1260 bp, Enterobacter cloacae
atgaacatatcactgcagccgaataacccgtttaatcatccaacaaaaaaaataaaaattgacattaattattacaataatgaacagaaaaaattatttaacagaagacgaggtaacccttatccgaagattgtaagaaataacattagattatctgtgatgagtggaattgaaatcgatatcgaggagttttttatttactatctttttcatttaaaaacatctagacctcttgatttccctgacagaaacatgatttctcagcatataagcagagctgtttatgaaattgatggatacattgaatatatttccgatagtttacatgtttgtaatagtgtcgattctttaactacttctataacggaaaggataggcgaatcaattggaatgctcgttattgcacatgtgaataacatgacttcggccgattggataccgatccccgtattacaggtcaaagcttttgactatttcgtggcgatttcccctcatggtgcattgcaaattgagacgaaaggatcttatgttgaaaacaacagcacgatacagaagttaagaactcataagaaaagtattgttgataaaaaagaacaaactaaaaataatccaatttcagattacccaggtgattatctttttggaacaattacagccattgacaaagagttctcaagaaaaataaaatgttggttggttgacccaaacattgaagatatagaatttgattatagaagagagagaatcctttctagactatatgacatttattttttaatgaaagtcatatctccatcttctagattaactaaagcattagataaaaggatcgctgttcttatagagaatgaaaatatcacgcaatttgatggtattccactaattgaatgggttagggatgatgatgacgcagaaaaagtaataagacaatttttttataataaaacatacataaatgactccagtgatgcagggatttgggggagtgttaatgaccaaacaatttactatgttggtatgaaagcggaccttttaaaactcgcgttatggcaaaatttcgacgatataattgattatagatttgtagctgagcattccgagacacgcttagaatgtcgtctagtaaccgaagcggataaaattgaattcagtaaaatgtttaaaagtagtggtttggtgaagcatttcgaatcattcggcagtgtttacacaagctcgagtgggatgctttttggaatgttaactatgtcgtttacctaa

SEQ ID NO: 169491 - DNA, 195 bp, Enterobacter cloacae
atgccggaggaagatttgcttttgaaatactcaataaggaggatattttctaaacgtgatgctattcacgaaattaaaagcctccccaaaggggggaggctcagccttagcctgaattacatcgcctgcgtaaacgtccttgaaatcacgtcctgctgctgctcccgcgtcagggcattaaagcgcacggcgtag

SEQ ID NO: 169492 - DNA, 366 bp, Enterobacter cloacae
atggactggtatttaaaagtactgcgcaattattttggttttggtggccgcgcccgccgcaaagagtactggatgttcattctggtgaacgctgtacttatgatggtgctgggcattatggataagattctcggctgggaggattctgacggaaaagggatccttactgcaatttatagcgtgctggttttgataccgtcatgggccgtgatgttccgacgcctgcacgacacggatcgttctgcctggtggctgctgctgctgctgattccgattatcggctggctcgtgattttggttttccactgtcagagcgggacgccgggcgaaaaccgctttggtccggatcctaaggtcggcgcgtaa

SEQ ID NO: 169493 - DNA, 1620 bp, Enterobacter cloacae
atggctcattttgcgcagtccccctcttttattttgcatcaggtcacctgtcagtttgcgacgggcgatatcctttttggtccactgaatctttctctggattcgtcggtttgcgcgctggttggccgcaacggcagtggaaaaacgcgcctgctgcgcctgctggctggcatagacgaacccgccagcgggcacgttgagcgctttggctcgcacgcctacgtggcccagcagcaggatatttcccctcacgccacgcttgccgggctgcttggccatgaggcgatcttcgccgcccgtaaacgcgtcgacagcggtgattatgaacccgaggatctcgacacgctcgagggacgctgggatctggctgaacgtctgagccatgctttcatcgctgcaaaccttcccccgttcgatccaaataaacccgcagcggcgctgagcggcggcgagcgtattcgtgccttgctgtgtggcgcattcaccgaagatgcggattacctgcttctggatgaaccgaccaaccacctcgacgggcagggccgggaatggttctacgagcagctttcccggtatcagggcggcgtgctggtggcctctcacgaccgtgagttactggcgcaggtaacgcgcatccttgaactgagcgcttttggcttgcgcagcttcggcggaaattatgctgactataaaagccagcgtgacgctgagcagcaggccgcccgcgctgcgctggaacatgccgccaccgagcgtaaacgtacccgcgcccgtatgcataaagagcatgatgacagccagcggcgttcagcaaaaacgcttcgcaaggtcgatagcctcaacattgcctcgtttgaacgggtcaagtacaaagcggcggcgaaagagcgcatcggttcctggaaaaaacagcatagcgatcaaaatgatgcgcttaacgctgcggttaaccaggcacgcgagcgggtagaagcggataacgcggtgatgtttaccctgccgggcagtcaaattgcgcaagggaagcaggtgctggtgctccaggatctggtgcttccgcatgtgtctctcccgccgataaactggcgaatggacggccccatgcgcgtggcgcttcgcgggcctaacggctgtgggaaatctacgcttttaaaagtgatgctgggcgaaactgcccccgtttccggtacctgtaacgtctccgtcacgcgcgcctgtctcgatcagcaactttcccggctggatctgtcgcagtcggtgatgacacacctcaacctgggcaatacgccgctcgaggagggcacgctgcgtacccggctggcgcagcttcagctgggcgcggaaaaagtaacgcttcctctgggtgaactgagcggcggcgagcgcctgaaggccgcgctggcctgcgcgttgtggcgtgaagcttcagcgcagctgttgcttctggatgagccgaccaatcatctcgatctggcctccgttcaggccattgaagcggccctggccgattttcccggcgcgctgctggtggtatcgcacgatgaagcctttctgaaagggctgaagctgacgcatgagctggtgtgggaagagtcaggatggcgatgcggaagtctgtaa

SEQ ID NO: 169494 - DNA, 801 bp, Enterobacter cloacae
atgttcaagctaaccgtatgccttttgacgtacaactctgctcgtttgttacatcaggttttacctcctttgatacgtattgcggatgagattgttgtggttgattccgggagccatgatgaaacgttatctgttctcgaagaatatggaatctcaccaatttatcatccctatgcaatgcatggtgaacagatgaatatagccatttctcggtcaagtaacgattgggttttatgcatggacagtgatgaaatactggatgaagataccctggaatatatcatcgcgctaaaatccagagaggaacctccagcagactgggggtggagtctgtctcgttactggtatgtattaggcgagcgcacccgaacaatctacccggtttcttcccctgactatcccttgaggttattcaatcgtcgttatgtcacatttaacaatcgaccagtagatgataaagccgttggtgcagggcaggtgatgcgaataccgggtcatgtccgacacgataccttttattccctgcatgaagtgtttgataagttaaatacgtatacatcgcgagtggtaaagtatcaggcacccagaccttcaatcgtacgcggtatcgtcagtgctattggcgccttctttaaatggtatttatttagcggtgcatggagacagggaaaagttggggtggttacgggactctatgcaaccttgtacagttttttaaaatatttcaaagcctggtatcgccatcaggatgaaggggaacccgcagcccgaaagcatacggattcacatcttattagatag

SEQ ID NO: 169495 - DNA, 1098 bp, Enterobacter cloacae
atgaagaaaattattagttacctgaaggaaattaacaggcaacgaaaccataaaacgaaagaattaaaaagacggttaaagctactttcagtagcgcgccagctccatgataagcggcaggaaaaaattgatgtttcccgtgtgaagcgcatccttttcccttttgtagaccttggaattggtgatgctgtttgccacaccgggacctggcatagtttaaaagaagcagggtatacgctgcaggtcatcgtcgaggaacgaaatcgcgatttattcgaaaaaatgacggatattgatgaagtttatattgctgatatcaataacatcgatgcaatgaacaccatcgagacagatttagtcattagccattacgcatggatgaaaagaaaagaattgttcaatacgcttctcctgcgtaaagtgcattataaatatgccgttggatttggcggctggctggataagccttataacttaatgttgccaattgattccgagttccacattacccatcctcaaaaagaaatacttaacatattgaatgttaagcctgaattccttcgttattcgttacccgatttgccggagcacgatgactttattgacagttatctgcaatcgcattctggtaaaacgtgcgttgttctcaatccattcgcaagcgttgcagagcgcagcctctcgccttcacagttagaaaaattggcgaatgagattacacaaaacccagatgttcatgtgtttatcattggcgaaggtaagaaacttgctggcctccacattgaaaatagccaggtcaccatttgtcgtttcaactcgctctgggatgccataacacttatcaaaaaagccgatttgattgtctctgtagatacagccatcgtacatatcgcctgcgcctttgataaaaaacttattgctatctatttttccatgctgctggatcataataaaaaattcgaaggcaatatcattttcgcgcctgttggtaataactcagagcagctaatattcgataaacaccacaacaaacttgatatccagtctattgctgcaaaagtactcatcaagcttggttgcgaaagaactgctgcataa

SEQ ID NO: 169496 - DNA, 906 bp, Enterobacter cloacae
atgaactcgttgaccaagcaactgtatcggtatacgcataagcgcaatatgcgacataatgaaaaattatggcccttcgttaaaatatcgcgtgctgaaaccggtgaaatatcagaattaaagtataagggacgcagtatcgatctgatcccgctctcctcacttcatcatcggttcgatggcgatatacttattgcggcgactggcccttcaatcaaagctatcgatttcaagactctaccatcgacggtaatcacggcgggcgtgaacggtgcctggcaccttcaccacgcgctaagtttttctctctatttcgtcgttgatatgacgtttatcgatcgtcagactgcattgttgaagcgtattgtaagctgtaaagatgtcattctctttactacggttatgggcatcgttaaacttatagagcgtttttcatacgacaaaatccagtgtgaattatgcattattgaagatatttgttatgagacctataaaccctctattaagcaagctgatttacgcgaggctctagcgggtacgccaggtatcatattttcagagacacatcctaatacagcctttagttgtgatgttcgtcacggggtcgtagatgccggaaccgtgatgtattgggctctccaggtactctattttctgggctttaaaaaaatatatattgcggggcttgatatgaataatttcaatcaacctcgattttatgaaaccaatagtacaatgttaccaactttccttgataaaaaggtgaataatattgtcattccggcgttgatgctggcaagtactgttttcaaaaaaaataagatcactgtcatcaatctatctcctcaaagcgcaatacctgactctgttttccccagaaaggattttactgatgtcttcaactaa

SEQ ID NO: 169497 - DNA, 1164 bp, Enterobacter cloacae
atgtcttcaactaatcttcaacgttttatattctatccttttatgctctttatctttttgagcatgattttttgtggcgtttcaaaagtaaatattttcttccacattgcccttgcactgtttatcatcgctatgatgataaatcatgaggtaagaacgcgttttattagcgatcgtgactttctacccgcactgggctttactggtgcatttttattatatttctcattaactaatttttgggctgattcgtcccacctcaggtctgcgctaacccattcattttatttgtttatttttatctgcctgtatcgtcaatgtgaactacaggacagaaaaaaatatatcataggtgcagcatatttcggcattgtggctttaacgatattaactctaatttatgtcaataaagagcacatatttcaaaacaggctatcgcgagcttttcctttctctccggataacgtaattgatcttggaggatacatggcgctgggtattttattgagcgccatactggttcgtgaaacgcgtaacttctggttttatattccagttcctctgcttttggtctgcttgattctgacccaaagtcgagggccactcctttcacttgttgtcgccgcggttgtcgctttcctctgtaaaccgaaatgggatattaagctgctgacaggttcacttattctactggcgatcatcggtgcaagcctctattttagtggctcgctcgatatgttcttcaaacgcgtagaagattcttcacgagcaggatccgtccgtttcggtatttggcagcatgcttttgaagtggcaaaacagaaagcactcttcggatggggtttcaataaagaacttcagttcattaatggttttggtcagcatgttaccacgacgcatagcctctatttagcaacctttctaaagggaggtgcggtaggactgctgctgcttttaggcatgattttatttgccgccagacaaagccttcgccaccttgcagctaatcataaagctgaaatcgcggttatcgtatttgcgctaatgttctacgtgacgcagggcatgtttgttatcagcaacccacgagaatattgggtgttgttctggcttccttttgccattatttttagtgcgccgataaaaacggcgctgcaaaaataa

SEQ ID NO: 169498 - DNA, 639 bp, Enterobacter cloacae
atgagtaacaggcgcattcgccgcgttgatctatcgctgcatttgtcgccagagcaatcgcgcgcggacctgcgcgcgatgctacagctgaaaaagtggcatcaggcgcttagccaggcgggcagtaacccgggtgatatcagcatggaaatgcgtcgtttccatcgcaacgtttaccttgccggtctacagctacagctgctgagcccgccgctgtgcagccatattgccgagtcgctggggcgcgaagcgttaactctggaggcgctgtgcagcgagctggcaagcggcgaactcctgccagccgctacggcgtccgcgccagaagcgcccgcgtcgagcggtgagtttagcaagcagcagttgcggcagatgcgcgcgctgatgtcggacgcactacagcgacagagcgcgccggatgaagcctcacgccaggcgctggagcagttacatagcgaagtggcgcagctcaaggccctgctcgaccagcaaaacgtgctgctacaacagctacggatgtccggccgtgccgccgaggccgaaacggctaaaaaagggcttacggaaacgctggacgtgaatgccctgaatgcgccaacggaaaaaatgaagcaaatccgcaagaaaggcattttttag

SEQ ID NO: 169499 - DNA, 789 bp, Enterobacter cloacae
gtgaaccttttcctccttaccactgcatttgtacctgggcggactgcctcccaccaggtacgttttttttactttattttgctgctgctgttgttgccggggcacgccagcgcagcccctttacaggcaaaaatcccggagtccagcgctcacagtgacgcgcaaaagcgcaagcaaaatcgtctgcggctgatggcaaaagcgaaaaagcgtgtcgccgtggtgccgccgacgccagagcagaagcgtcttgagattgcgcggcagcaggccgagcgcgcccgaaatcgggagatgctggcgatgcacgcccgctgggctcctggcaacctgggcggctccgaagcgctctgggatgaggtgcaggatggcgtagtgacgacgcgctccccgcaaaagacgctcatcaagctgcgaacggtgatacatcgcctggagagccagcttggtaaaccctatctgtggggcggcgatagcccgagcgacggcttcgactgtagcgggctggtcttctacgcctttaatcatgtactggatcgcaagctgccgcgcaccgccaacggcatgtttcaggacaacgccctgaagcccgtcaagcagcaaaagctgcggcgtggcgatctcgtctttttcaacattaaccagcgacccggcgcggatcacgttggtgtgtatctcggtgatggccgttttattgaagcgccacgtaccggactgaagatccgtatcagccagctttctgacaatttctggcaatcccgttatttgggtgcccggcgcgttctgtag

SEQ ID NO: 169500 - DNA, 1077 bp, Enterobacter cloacae
atggatatcctcaacctggcgcagggcctggttaacggttctggcctgccgatgcaggccgaacccattgcaggcccgaaagcggtagcgcataccacacaaaccccggcggcgtttaacgacgcgctgctgaacgtgattgattcactcatgatcgggcaggggaaggcgacacgcgatattgccgtaagcgcggtgccgctcccgcaaggcagtgacgatgacgaggaaaccgctaacgagccggtgccgggagattcactgctcagggctgatgcgccgcagcagctgctggaagcgctgctgatgaccagccaaattccggtgcacgcttctgctggctttcccggtaaagcgcagcccgtcgatgatgtcatgctgaaaaacctgcagccgcagggggtgatgcagggagcggcgaagggagtgccgatgggcatctctgcctcgcttttgcatcagtatccggtgccgtcaccggtgagtcccaccgattccgcggcgagcccgcagcccgttattcatagcgtcgctccagcgctgataacggcgatggttccggcggcgcagacgaacacctttgcgccgctgccgacaagcgatattaccgccacgccggcggccgcaccggcaacgaccaccaccaccctgaaaatggatccggagccttcgcgctggggtgaacagctacagcgtgcgctgggcgagcgtttgcaggtgcaggtaaagcagcaggtccagcatgccaccatccgcctcgatccgccggatatgggcaaaattgatatttccatgcaggtcgaaagcggacgcgtgcaggtgcagatcaacgccagccatgctgaggtctatcgcgccctgcagcaaacgagcaacgaccttcgtcagagcctgacggagcaacattttgtccaggtcaacgtgcaggtgtcatcccagtccggggggcagcagcagggcagagggcaatccttcaccgggcagcataacgccattctggcgggagcggaaatcgcgacccatacgacggcgtcgcaggatctccgcagcgatgactcggtactactgacggtttaa

SEQ ID NO: 169501 - DNA, 306 bp, Enterobacter cloacae
atgaggatgctgcacgtcattcaggccctgacgcggggtttacgccaggcgacggaggatcataactggtccgccgtcatgaacgttgacgccaaaatcgccgagctactgaccgcgattcaggggaaaacgctggaggtggacgagcgacaggcgctggataacctgaaaaagatccaccttcaggcgcgtgattactgccaggtagagagcgacaggctggccgtcaagcttaacctgacgatgcgcaatcgtgaaggggcggccgcgtatgcccagtttgctgacgatgaaggaatgcgctga

SEQ ID NO: 169502 - DNA, 1335 bp, Enterobacter cloacae
atgtctgatttcgatccaaaacagatggcgacaacactggcgacctacgacgtccttgcactgcaaaacgcgatcgccacccagacaaaaacctatgaagcccagtcgtcagccctttcgtcgctgcgtaccgcgctaacgacgttccgcacgtcaattaatgccctgaattccaccagcgccagcgtcctgaaaaatatcgccaccatgaaccaggaggggattgcgacgatcaacgccagcgccagcgcgcgtaaagggacctacagcctgaacgtcacccagctggcgaccgctcagcagatcagtttcgacaagctggacgatgacgcgattaaaaatgcgagcggaaccctgaagatcaatctcaatggcgagagcatggagattgatatggatggtctggacagccttgctgattttgccgatgcgattaataaaactgacttcccgagcgcgtcggatcccacttccaccacggcggccagcgggcagaacggagttaccgcttcactgatgcgaattgacggcaaagtctcgctcatgctgagcagtgaccagagtggcgagaagtacaaaatcgagatggataccagcggcatgtctgccgggcaggatatttttgcagaccaacaaacgattactgacggaaaggacgcgctcttcacgctcggcgattccaccagacagtatgccagcagttccaacaccctggacgatctggtcgatggcgtctctattaagctgaccggcactaccgaaaagaacaaaccgctggtgatttcgatcgacaccgataacaccgaaacgaaaaaccagatccaggcgtttctcgatgcctataacaccctgcgcgataccctcaccggcatgacgaaaagcggcagcagctcggaaaagcgcggcgcgtttgccggtgatgccacgatgtcctcgctcggcaccgatattggcaatctgctgcgcggcacctttggtgaccagaacatgagtaagttcggcatctccgccgataaagacggcaagctcaccctcgatgctgacgtgctggagaagcagctcaaaaacgatccgcagaccgtcgcgcaattcttcaacggcaacgacggcatgctcaaggcgatggataaatcgctggataaatacctcagcaccagcagcggcatgctgaagggacgccaggaaatcctcgatcggcaaaaaactgacatcgataccaaaaccgaaaaaatgaacttgcgttatgacgcctcttacaaccgctactacaagcagtttacgcagctgcaaaaagtcatgacgcagatgaacaacaccatgagcatgtttgtttaa

SEQ ID NO: 169503 - DNA, 894 bp, Enterobacter cloacae
atgtcattctcaatttttaccagctcttcctccatggcatctaccaatgcgatgaataaagccaacaacatgctgtccaccgcaatggagcgcctgggtaccggtaaacgcattaactccgctgctgacgatgcggcaggtctgcagatcgcgacccgtctgcagggccagaccaacggtatggacgttgcaaagcgtaacatcgccgatgcgaccgcgctgctgcaaacctctgaaggggcgttcgatgaagtgagcaacatcatgtaccgcatgaaagacctcgcaacgcaggcagcgaacgacaccaacactcagaaagaccgtgacgcgatcaactccgagctgaacgacctgaacgctgagctgggcaacatcatgaacaacacctcttacgcgggtgacaaactgttcggcgcatccggtaagttctctaaagagctgaacttccagatcggttcttctactgatgaaaccatgaagattaacctgtctgctgaactcggcgctagcggcgcaggcgcgctgactacctctggtggtctgttctcaactattcagggcacggctagtgcagtaaacgccagcggtaagcttgaactgacggacgccgaaagtgcaaaagctctgatgagctcgctggaaacgactctggatcaagtcggtgccgttcgttccaaaatgggtgcgagcattaaccgtctgagccacacggcggcgaacctggcaaacatgaaagacaacaccgatctggcgctgagcaatatccgcgatgctgacatggcctccgaagcgtcaagcatgacccgtaaccagatgctggcacaaaccagtatgtccatgctgaagcagtccaacagcatgtccggcatggttatgtctctgctgggctaa

SEQ ID NO: 169504 - DNA, 933 bp, Enterobacter cloacae
atgaataaacgttattgctccgtaaataattggctggttgacgtcgcttcaggctctattctccatttaaccacaggggaacgaaagcgcctgggtgaatatcagctcaagctgctggatattctggttcaggatgcgggtaaaatatttacccgcgaagagttaacgaccctggtctgggaacgccgggtcatcggcaataatagcttgccgaatgccattcacgcattgcgcaccgcattagaggatgatggtaaaaaccagcgcatcatcaagactattccgcgcaagggctatctgattgagcccgagtattgtcgtctgatcgaaaccgatgagccttgcgatggggaagatgcggaggctgacgttccgcctgccgaggcgtcgcttaacgctgagcctctgactgaaccggagcagcctgaaggtaacgacgatcctgcaccggtaatggagcccgtcccggtgctgaagccgaaatggcgtcgtcatggcatcgttagctttttactggtgatggccgccacggccctctttacgacagccgcctgctggtacctgctgggcggctacagcgaacatctggtttcacgggagatccagccgggcgtttacagcaatatccacatttatgccgtcgaaacggcaggcgatccgccctatatctccgtgaacctgtacggcaagttaaaagactcgctgtatgccatcaaccagcagatccagatgcagtccgccacgatgcagatcttctttcacagcaccaattcgtcgctgaactacagcttcacgctgtccaataaatgcgacaataaacagctggcgatgtccatctaccactggcgtaccgatacggaccaactcaacaacctgatcctgcgagaaacccgaaggaagcttcatgaactggctacgtgcaaaacgccttaa

SEQ ID NO: 169505 - DNA, 1011 bp, Enterobacter cloacae
atgcaagtcggtttaaaaacatcctcaccgctctccagcgcaccggcacccgccgggcgcgggaatatcgatgcaccgcagaccgtcgggcgggtacatttgcccgacgctgaatttacccgtcattcatttcctgaatccgcactgctgtcgcgccggccgatgcgctataacgtacagctcaatcagcagctgaccgccgtgcagcaggcggacagctatctggcgaaaaccgaaacgcagctgctccagctgcgccagacttccggtcgcagcggggatgccagcgtgcagactgctgcgctgcaaaagcacctttcacgccgtatgcagctttccggcggtacgatcgatcgccatctcaacgcctcgctggagaagaagaacgcggttaatttcaccctgccgggcagcgaaaaattagtgcagttcccggccggggaaacgctgatcttcgcgcttgggggcacccgacgggagatggctgccgttgcgctgccggaagaggcgacgccgcgacagacgctgacaaagctgaatgttggtctggggcgcttagggatccatgccagccagacggacagcggccagctgctgttcagcgttgatgagagcaggtgggagcaggtgaagcagcacttttcggtgcgtggcgaaggtaaactttatccagccgatgccttcaccctgctggccccgcaggcggaaagcgcgaacagcgatgagatgatggcgctctccgcgcggcgggagcgagaggggcaaatgaagttgcaggatacccttaatcacatcaccagccagcgcagcaaactgcgccagcagcaggaccgcgtcagcgcccgtataaacgatatggcgacggtgtacagctcacagcaggcgctgcacacttcacgcagcctgggtgaggggctggctcgcagcgccgacagttttagccagctgtcgcaggcgctgggtgctcaggccaacgtccggctggcaacggttaaaaacctgctgggctaa

SEQ ID NO: 169506 - DNA, 390 bp, Enterobacter cloacae
atgctgaatgcgattaaccgacaaaccgctattctgccgggtgatattaccggccaggtaaagccgcaaacgcttgaacaggccgccgggcagtttgaggcgctgatgctgcgctcaatgctatcgcaaatgcgtaaggcctccgacgtgctgggggaagataaccccttcaacagcaaacagcagcgcatgatgcgcgatttctatgatgacaaaatggcgtcagagctggcctcccagcgcagcaccggcattgctcagatgattattaaccagctttccccgcaggtgacggccccgcttaagaatcaggtggaagcggccgctttacagggacaaccgcaggaacgccatttgcagtcgttccagataaccgaaggacaggagtaa

SEQ ID NO: 169507 - DNA, 786 bp, Enterobacter cloacae
atgatttacaatgtttttcctctttttttaagcctcagggtgaaacggtatttccgctttctgatggcgtttttcctgctgtcgttttcagttaccgcgctggccgatgtcgcccctcccatcagcgcccgcaagcaagtttttgccaccgtccagcacaacgcgtcggatctcattcgccaggaggcaaagcgccgtcgctggcctgactatcaggcgaaaatgaatctgtttattcctggtgaagtatcacagtacgcggcatgccctgaaaaactggccgtttctcttcccggcggcgaccgccttgacatcaatcgcctgcgctttgacgtgcgctgcgcgggccccggaggctgggatattccggttaccgtaaagccagatatttacctgccggcaatcgtcgccagcgccacgctggaacgcggtcacgtcatcactcccgacagcatcgccattaaaaagctcaacgtcagcaatatgcgcggtgaatatctgacccagccagacgacatcatcgggatgaccgtcaggcgccgcatacgggatcggcaggcaattacgcttcaacagctggaagcgccgctgctggtagagcgcggccagcgcgtgctgatgattgccggacaaaacggcgtagaagccagaacgatgggtgaagccatgaagaagggacgcaaaggcgagatcattaaggtcaaaaacgagaccagcggacggatcgtcagcgctattgttgccgacgttggcgtggtgaatatggtgtatgccagcggcaggtaa

SEQ ID NO: 169508 - DNA, 273 bp, Enterobacter cloacae
atgaaagtagcagcaccgcagtacaacctgaccactgcaattaataaagccagcagcgcggaacaaacgtgcaccgtggcgcaggagggtacccgcgtgatgcgcagcgccgccatcgatccggtcctgggcgatgcgcagacgcagttaagcacgctgccagaagtggacatggcgcgtgtcgccgaaatgaaggaagccattagcagcggcaaaatcagcatcaatattgattcgctggccgaggcgatgcagaagtatttccagaggtaa

SEQ ID NO: 169509 - DNA, 438 bp, Enterobacter cloacae
atgaccaacgccgcccagcgcgttaaaaccctgattcaggatatggcggaagaccgcaagcactacagcgccctgaccgccctgctcgacacacagcgccgccatattgtcgcccgcgatagcgcggcgctggaaacgctcaacgcgcagctgatggcgatttaccagcagctatcaaaaaatagccaacagcgctacaagcttttgaacgaactgggcatcactccgaatgccgaaggcataaaatcgctgatcgcccgcctgcccgccacccaccggccaaccgtttcagctctctggaaaggtctccagcagcaggccaccgcctgtcaacgcgccaacgactacaacggtgcgctgataaatatgcagcaggagatccttgggaatttgctgaacagcagcgcgccggagaactggttgtatcaggaggggtga

SEQ ID NO: 169510 - DNA, 1347 bp, Enterobacter cloacae
atgacattatctctcactaaactggatgaagtcatagatgcaataaaagaatgtgttattaaaaaccaatgtgttatacctgatgaaattcagtctgtgaattttattgagaaactcatttctgtatctgaaaaaaaagtaagcggtagagatgtcgatgattttttaattcatctttccgcattctggcagtggcttgtacagcgccgtcctttggatttcatttatattggcaagcgcaaaaactttcatttgagctgccatatccttggcaatgctcctctgtattttaagaatactatctttgtcgatgaaataagtccagagacacttaaaaatgaactgaactgtatcaatctccctcgccccgttattcttggagacaaagaaggattatcccatgtaaatgttcgaaacttgctgggttatataaatattgaaacagctggttctctcattggtaatcatgctgaatatataggcgtcattcgtaaacatattgatatggtcgctattctaaataataacttgcgaaaattagaaagtaataacaactatgataaggtaattcttgggtcttcgtttggctattatggtatgcatgatgctttgttaacgaatgctgtgaatttatctattgctagtggggatgcggcctacaataaagcactggttgaacactgtatccgacaccataacattaaggattttgttattgttatcggcttttttgaattattccatgaactagctaaatcatccaatggatactttcatttggcctctgagtttttttcaagtaacaatattgcatatgattatcgtggccgttataagtgtaattcttttttgtttaattttgaaagggagccaattgttgatatattaaacgtcgatattgcctcttgggtcgcgaggagagaaattacatcgttgcgttcatcctcgccgttaatacctgaaaaaccaatttctactgattttatttatagcagtgcatatactagaagagaaactgaatattttgccaggttttatgagcgcgagggggttgctgaatataataaacttatttttcagggtattgtagaacaggtgaggcaagtacaggggcatatttattttatcattcaaccctttacccggctatataatgcactattccatgaaaaaatgcgccgcgaaaccaaagaatttttaacttcagttactgacggcaaaaacgcattttgtatcgatctttctgaagataatgatttttctccagaagattttagtgacgcccaccacctcaatttcacaggtgctcaaaaactttgcgataaactaaagtggctaaagttataa

SEQ ID NO: 169511 - DNA, 804 bp, Enterobacter cloacae
atgcataagcattacataattaataatatcgtcgaatttcatcctgcggccagcacgttacgtgatatcaacaatcctgaccgtgtggttgtgttaaattcgccagcaggccggtgcctgctgttattaatcgacagagcggggtcgattgttactcaacaggaattccttgatattgtctggcaaagccgtggcatgctcgtctctcccaatacctattaccagaacatttcaattctgcgcaaagggttaaaaaagattggttttgaaaccgatcctatcgtcacgatcccccgtattgggttgacgctggcaagcgatacgcagatcgtcatcagagaacctttgcccggcgcggctccggcagcagatgaaaagtgtcctgaggtactcgagcccgaggaaccgtcagcgccttctctggaggcagcggagccagcagcccccgtctctgtgaagcctacccgctggccggctgtggttctgggaatgctgcttatcatactggccggtgcaggcgtgacgggctatatgagcgcaacggaaaaccgctttgttgaggattaccattttgcggcctccatcggagcctgtcgcgtctatctggcgaacgatattcagactcagaacgagcgcgcctctgcgctggcttacgtggaaccctttaaggctgactgcgcgcagtacccgtgggtttatatcagctggtacgcgctgcttccccgcgcttccgtaattcgctgcgatcggcctatgaaggaacccaaccgctgtatatctgattattttcttaaggacagctag

SEQ ID NO: 169512 - DNA, 519 bp, Enterobacter cloacae
atgtcagtaaccgtccggtttatttatctggccctgctgctgccgatcgccgttccggtgcgcggctatgacgtgctggtctccgttaccggcagcgtcatcggtaatacctgcatcgtcgcggaagcgtcgaaggagcaaaacgtgccgctgggcactcccggcatcaaacagttcagcgagacgggcgcggtcagcaacgtcaaaacgcccttcgcgctcaggcttgaggagtgcgggccgacctttgccggagtaaaaattcgcttcagcggcagcccggatagcgagaacccgcagctgttgaagattgccgacggcggcgcgaccggcgtggcggtgcagatcctcgaccgcgacggcgtaccgatcccgctggacgcgcaaacccgcacctacggcgcggcgggcgatgagaacgtgaacatgacgttttatgcacggctggtcgcgaccggcgcccccgtaacggtcggcgacgtttccgccgtggctacctggactacggagtatcaataa

SEQ ID NO: 169513 - DNA, 978 bp, Enterobacter cloacae
atgcgtatttttctgacgatcggctggctgctggcgtcgaccagcgcgctcgcaatggagtggaaatcagatatcgtgctgtcaccccagccgatgacctacagcggcccggcagactccatcacgccgggtaaaatcatcggctcaacgtggagcgccacggcgaatgtccaggaggtcttctggtgtggactggtgtttacctgcaataaaggcacgctggagccgggaagtagcgccatatcaagcggcatgacggttaccctggacggggtaaattacaccatttttgaaaccggcgtgcccggcgtggggtacatcatcgggctgaaggacttcaacggtaccacctgggtaccgctgcaaaccggcgtcacccagagctatcccgcagacggcaccaacggctatgccacctctttgggctggtcggcaaaagtgacctttatcaagaccggtaccgccctgaaatccggcgtttatcagaccggcaccctcaacgcggcgatcctgacggcttacaacaacgaagtgaaaaccgcgcaggtgatcatcaaccctaccaccatcacggtgacggcaagcggctgcacggtgggggcaaaaagcgccaacgttgagctgggcgccattgacgtccataccctgcccgtggttggcagcacctcgccgtcgggggagtttaccgtcagcctgagttgcgatgagaacgtggcggttaacgccgtcatgaccgatcagaccacgccgtcaaacacctcatcggtcgtgtcgttgaccggggactccacggcctccggcatcggggtgcagttttactataacggcaccgggccgctgacgatggggccggacagctcggccgcgggcacggggggggcagttttatatccagaccaccggtgcggcacaaacgctgtcgctgccgttccaggcgcagtatatccgaaccggagaactggtccccggctcggctaa

SEQ ID NO: 169514 - DNA, 144 bp, Enterobacter cloacae
atgtcctcaccactctcaacctctacgcgccaggattttatccttctcgtgactaaaattctgaacgagtacattaaatttatagaaaatattctattttattctgcaagcttctcatgcctgaatggccagacctgcaaataa

SEQ ID NO: 169515 - DNA, 681 bp, Enterobacter cloacae
atgtataccgttcttccctcccccgtattgcaacgtatctcagggctgcgattccagccgcttgtcgatctccggtcgggacaggttgttgcgcatgaagttctcgtggagatcccgaacgtcaatcttgaggtgttgtttgcctcgctgccttcgcgcagcgcgctgcaaatcttcttctggcaggccagtacccttttacagatacccggccgggacgcctactggcttaacctcccggcagaacatcttctcgacgaacgcgccatccggctattgctcgcgttacgtcatcagcagcggttaacgattgaaattcaggatccccttgcccccacgcggctgagtgaggcggagcaacgtcgcctctgtgccacgcttgttcggctaaaagaggcgggctggaaaatctggctggacgatctgacccgggacctggcagaggagtaccggcgcctcgcccttccgctggacggcgtgaagatcgaccgctcagcgctgagcggtgatgcaccgcttgccccgctggtgaaggacatcagggccggtatcgctcggtctgtacttattgaaggcattgagaactcgcgggatctggcgcgcgcccgcgcgtccggtgcgcagcttggacagggttttctgtggcccgaaggccgaacggacgccagcgtaacgcgatga

SEQ ID NO: 169516 - DNA, 420 bp, Enterobacter cloacae
atgcacctgagtattacagataacgttacttctgaagaaaaagaagaattattaacggggctgcgcgcctataacgcgcagtttttagatctctcgaacttcagcggcgatacaggcgtttatgtacgagacgataacggcgtcatgctgggtgggctgatcggcgtgcgtaaaggcgactggctgaatattgattatctgtgggtcagcgagagcgtgcgcggttccggcgttggcagccagcttatcaaagcggccgaagacgacgcccgccgcaaaggatgcaggcatgcgctggtggatacggtcagcttccaggcgcgtccgttctatgagaaacagggctaccggctacaaatgtctttgcaggactacccttatgaggggatgcaaagacactatctgacgaaaaacctttag

SEQ ID NO: 169517 - DNA, 348 bp, Enterobacter cloacae
atggcatcgtcgcaggtcgatcaggcccgcttcgatgtgctgcaaaaagcctccgttgcgcaggccgactggaccggcgcccgggggcgaatggaggccggaaaacggcagctggaaaatgcgctgcgcgcccgggatgtctataaaaatgaatataccctgagcaagcgcagcattaacgatttgctcagcgtggagcaggacgtgtggcaggccacctccgccaaaataatcgctgaatatgacggctggagcgcggcaattaattacgccgcagccgttgataacctgatgccgcttattggaatagagaagaacgctgccgcaaaattacccgatttgagttaa

SEQ ID NO: 169518 - DNA, 1458 bp, Enterobacter cloacae
atgcctcaacatttatcttcactgaacgacgcgtgttctgagcaacgatttgttatttcatcctgcgcctttaccttccaggggtacagccagctccttaaggcccgtggcgtaaacgtcacgcgcctccgttttgaagaggatgaggtgtgttcggctgatgtgagtaaaatggcatataatcaatcagttaccatttctgtttttcttggtcgcgacgttgccgcctttcttgaaagcctgaagcggctggtatccgttcttaatgcgctgcccgctgtttccggcgtcacgctgtatggcgcagtgcctgaaaggtggctctacgccacgctgaaaagcctcgtcagtaataaaaaaatgctctccaggatccgcatagcgaatatttcagaggtcatagataagttaacgaataattcgagcggccaggcacgttcgtcacgccttttgcgtgacgttcccgataatggagaaaaagaaaatgtgcatggcttaacgaagcgtgagctggacgtattgctgaacttttatcgcggggtttcaattaaggcgttatgcgtgaagctgggggtgtcggataaaaccgtctatagccatcgtaaggtgggtttaaccaagttgcatcttattcggctgtggtttaacgattcgcgcgtattcagggatgaagtctatattgcgcctgataatcagcaggccttttcagaagcggaagtggcggtattacaggcgctgcacaagcgggaaatctttgcggcatatcagattattaccgacggcgataaaaaaggggtagggtttgaaattttgctgcgctggaataaaaacggagaaattattaagccgggccagtttcttagcggtataaaaaacgctgaaatatggctaaagctgacggcgctggcgatccacgctgccgtatccggcattaataaatacaacggtaaatattatttttcagtgaatataccgccccagctggcgtccggaaacgcgctgccgggcatggcgaaaaaggccgttgagatgttacttaagacgcaatgggccgataagcttgtctttgaattagcggaaaccgttgacgtcacgaaggataaaaatatacccgaaacgcttcagcgcttacgcagcgctggctgtcgtttgtttctggatgactgtttttcacgagatcacgccatgtttcccgtcagacaggttcactttgatggtcttaagctcgaccgggatatcgtcgaggcgtttgtcgctaacgataatgaatataatattattaaggcaatacagatttatagcgatctgacgggcggggaatgcgttgcggaaggggtggacagcgaggaaaaatttgaaaagcttgtcgcattgggcgttaagcgcttccagggatactatttttcccgggcggtaaaagaagaagagttagatcgtatggtgcgattatttagctag

SEQ ID NO: 169519 - DNA, 606 bp, Enterobacter cloacae
atgattgtactaaaaagctttttattcttcgctggcgcagcggccgcctgcgcacttggcgtactttgcctttgggtggacatgcacttttttggtcatgacatccctgaattatcaatgaccgaaatcatgcaggaaacggtattagcggccatcgtatttctccattttcggctcgcaaggctgtatgttcccatgcgctactgcaatattctcgtgggaggttttttcctgagcatgttaattcgcgagctggatgcccttttcgatcttatttctcacggcagctgggtgtggttcgctcttattaccgcgctggcgtccctcattcgcccattaatgcattatcgtgaaacgctggaccagctggcaaaatatacacaatcgccgtggtacggcattctgctgagcggcctgctgtgcgtgctggtcttctcccgtctgttcggcatgcaggagctatggcacgccatcctggagcatggctatattcgcgtggtgaaaaacgccgttgaggaaggtagcgaaacgttcggctatatgctgtgcctgggcgcttcccttggctattacgctacctttcgccaacgcgagggtcggaaataa

SEQ ID NO: 169520 - DNA, 651 bp, Enterobacter cloacae
atgagtataatgggtgatgctagtgcttttttaaatagtataccagaatggttgtcgtcctttattaccgctttaattggagcggttattggtggcttttttacgcttcgaggtgttgatcgtgaagctaaaatcactcgagcagaagccgaaaaaaatgcccttgatttacagttatctgttttgaaaggtatcaaaggggaggtttcaactttaatcaatatttataataaaagaatgcagtatcacattgaaagaattgagcctggtgggatgttgctaataagttttcctgttggggaagataatttcatattttatgaacaaaatgcacgagaaattgcgaaattgaatgatactgcaagagattcaataattaacatttatacctacgcccgttcactcatacaatcttttaaaggtaataatcagcttatcgcagaatacgaaaagatattttttgacatggctgacaacaataaagacaaggaaatgtacgaaaggttgcatgaggctaaaatagcggttatggttgattatgctcaagggattaagcatattgatgctgaattgaggcaggttattactgaagggtttaatgttattgatcaagaaatagcagcgctgaaaataaagctaaaaaattcgtag

SEQ ID NO: 169521 - DNA, 810 bp, Enterobacter cloacae
atgaccaaaatcagtgaaagatggaaacataatgggattacaaaaggttattgtaatatttgtggtaaatatgacacactcactaaagatcacgtccctcccaaatgtgctataactttaggtccagttcttcagaaaactgtcagtgaatttttcaacactcgtgaacctgttaaaccattaaatgccaaaaatggttcttactttagaacaatatgtagccagtgtaataattatgttttaggcggttatgataaatcaatcgaacaagttacaaattccttcaaagaaaaattaaaccagcacatgactggattaattacatccccattcattaatatcccatttgatagtgtatcttttactaaggccatgattggccatattttatcagccacttccgttgaggattgtaaaaaagagcctgtagatagccccttttatactcctttgaaggattatgtcttaggaaaaagttcaagctttgaggatagccatgatatttattattggttttatccacatagaatgcatatctcagctcaaagcgtggcatttatgaatgatgggcacattgctttcatctgtgcgttacattttttcccaataggttttatcattactaaaaagaatgaaggtacttatcctgcacactcaacaaaacttaaccttaaagataaatcgctcacatttaatatgacaccgataaattatgaatttaccacttttccctttgttagtcttaaaggaaaccaaatgtatgccatgagtaatgggcacacttgtgtaagctacccaataataaaataa

SEQ ID NO: 169522 - DNA, 981 bp, Enterobacter cloacae
atgacaaaataccggctcagcgacgacacccggctctggcactggctggacggtgcgacgccgcgcaccaccaccctcaggcagatcgttgcgttgtgcgattttagcgatgttgtcagcgggacaaaaggcggatgggtcgaagacgagcgcgcgctcgcacaggacggcgcgtgctggatttacgatgaaaacagcgtggcgttcgccggcgcccgaataaccggtaacgcccgcctcacccggccctgcaccgtcagccaccgcgcgcaggttggcggcaacagctggctggatgccgcagaggtgagccacggcgcggtgataagtgacaacgtcacgattcagcagtctacggtccgcggcgagtgccatatcgctggcgacgcgcgggtactgcataacagcacgatcgtcgcagccaaagggctaaccccggaccatgatcagatcctcaaaatttacgacagggccacggtcagccagtcgcggattgtccatcaggcgcaaatttacggcgatgccatggtgacgcacgccttcgttgagcaccgtgcggaggtgttcgatcgcgccattcttgagggcaacgagataaataacgtctgggtctgcgactgcgccaaagtgtacggcaacgcccgcctgctggctggcctggacgacgatgctatccccaccgtgcgctacagttcacaaatagcggaaaacgccctcgtagaaggcaactgcgtcattaagcaccacgtgttaattggcggcgaggcgcggctacggggcggcccgatcctgattgacgacagggtcgtgatccaggggcgcgcgcgcatcgtcggcgatgtgctgattgagcatcaggtggagataacagacgatgcggttatcgaagcgtttgagggcgagagcattcacgttcggggagtaaaggcaatcaacggcagcgcgcggatcacccgaacgcccctgctgggggcgctatag

SEQ ID NO: 169523 - DNA, 234 bp, Enterobacter cloacae
atgttcaaaaaagggttggccatggcgatggtgatctgcgccctgttctcggggcagctgatggccgggcataaagggcatgaatttttgtacgtgaaaagcgccgaccatcagcttcgtcacgaagccgacagcgacgagttacgcagcgcggcagaagagtctgcggagggtttgcgcgaacgccattcctggctgaagtcgcgcaaaccggacacccactttccgggctag

SEQ ID NO: 169524 - DNA, 966 bp, Enterobacter cloacae
atgaaagcacctgcaatacctgttaatgaaaccgagcgtctgaacgctctgcgcgagtccggcctgcttgaactcgagggttatcccgcgttcgacaggctcacgcggctggcgaaacgctttttcaaggtgccgctggcgatgatcaccctggtggacgatcgttccgtggtcgtgaaatcggctgacggccaggtatccggcagccagccacgggagctctccttttgcggccatgccatcctgagcgaagcaccgctggtggttgaggatgcgcggcttgacgagcgctttgcggataacccgcaggtgacgggagagccaggcgtgcgcttttatgccggtttcccgctccgcctgcgtgacggttcgagcgtcggttcgctgtgcctgattgattacgcgccccgcgaatttacggcaggcgattccgccgcgctggccgatctcagcgcgctggcagaagacgagtttgcggcagtaagcgcgtccacaaccgatgagctgacggggctgtttaaccgtcgcgggtttaaccagtttgcgcgctttgcattatccgtggcgcggcgtcgggcggaacccttaacgctgggctggctggatctggaccagttcaaggcgatcaacgatcgcttcgggcaccaggagggcgacaaggcgctgaaagcgatggccgccctgatgcgttcctccttccgcgaggccgatctgctggtgcgctacggcggggacgagttcgcggtactgttcgcggataccgatgagcccggggcgtggattgccatgcagtatctcgttgagcaaacggaaagctataacgcgcgccagctgcatccgtggtcgctgcagttctcctgggggctgagcgagtttgatcatacccggaacgatatgcaggcgtggttaaaacaggccgatgaggcgatgtacgccatgaagaaacagcaccatggtgaaggatga

SEQ ID NO: 169525 - DNA, 528 bp, Enterobacter cloacae
atgaactctcccatgcttattaaacctctctcccggcaggacattctttcccacattgatgcgctaaccgatatcctcgtcaactgcgttaacggcggcgcatccgtcagctttatgctgccttttacctccgataaaggccacgttttctggcgtggaattgccgacagcgtggggcgcggtgaacgtaccgtgctgggctgtttcgatgaggcactgggcctgatcggaacggtacagctcatcaccgatcagcctgaaaatcagccgcaccgcgcagatgtggcaaaacttctggttcatgaaaaggcgcgtcgcagaggggctgcaatggcgcttatggaagcgctggaagccgctgcgcgcgagaaggtgctttcggtgctggtgcttgatacggcgaccggcagcggcgcagagacgttttatcagcgtgcaggctggcaaaaggttggggagatcccgcgctatgcgctgatgccgggcggggaaatggcttctacctcggtgttttataagtttttgtga

SEQ ID NO: 169526 - DNA, 606 bp, Enterobacter cloacae
atgaaaattttgcctttgctaaccggacgcatttcatacgatctgctgcaacatggaaaagagatagatgaagccattgcccatggcaacgttttgttaaaccattcgactcccgcactggagcgctatttttcacgcccgcttagcgagttgccggggcaaaatccttatcctgtagccatgttattaccgctattcctcacggtatttgcgtttaatatgctgccttttctcaaggcgatttccagtatgtcgcctgcgcttcatgcactgagtttttttgccccgtcgatagccatacttatctacctgatatccaccagtactctgctggcccgaggttacacatcagggctgtcaggattgttagcgctttacatcttcctgctggcggtgacggtgctgcagtggatttattacctgttcacttctgacggcagcagctggcaactgttaatcgccacgatcgctatggtaatcattcgatgggtgttaaacagtcaaggctttgcactctttaccctttactgccggacgaagcgtcttgctgctctggcccataaaatgcgcttaaaaagcagcaaggataatgcgaggatcccatga

SEQ ID NO: 169527 - DNA, 1293 bp, Enterobacter cloacae
atgacagagatctctgttctggcgtatggcgcggaccccgccgcgcaacgcccatcaacctccgccattcagcaggcgataaattcggctcaccgcggcgacgttatcatcatcccgcaaggccgctatctgagcggagcgctgtttcttagaagcggcgtttcgcttcgcctggacgccggtgcctgcctcgcgggaagccaggatctggctgactatccgcttataactacccgcgtggccggtatcgacatgcgctggccggcaggcatcattaatattatcgattgtgaaaacgtcagcattaccggcacgggcacgatagacgggcagggtgagatatggtggcgacgcttctggggcgatgacgagcgcggtggaatggtcggggactacggtgccagaggattgcgctgggtcgttgattatgactgccagcgtccgcgcaacgttctggtctttgagagccagaatgttacgcttcgcgagttcagcagccgggaatccggtttctggaatctgcatctgtgctattcgcgccatattgcggttgaggatgtgaaaattactaattccgcggggccaagcaccgacggaatagacatagactcctgcgaacaggttcgggttgagcgctgcatcgtctcctgtaatgacgacaatatctgcatcaaatctggacgaggacgcgaggcggcgcaaaacgcccgcgccgcaagggatatcgttattcgcggctgcacgctgaacaagggatccggcatcacactggggagcgaaacctcaggcggcatcgagcgcgtcctgatcgaaaagaatgcgtttaacgggacgggcgtcgggtttcgtgtaaagtctgcccgcaaccggggcgggtttatacgggacatcaccgttcagaatttgcagctaactgacgtgcgttttccggtgctgatccagctaaactggttcccgcagtacagctacggcagccaggataatctctctgataagccagaacactggcgcaaactggccgatggcgtcgagggagaagccggtcttaccgaagtcagcggcctgacgattaaaaacatcacggcgaggcgctcggacgacctatgcttctcgcgggcatttttcatcgaagggtatccggaacgtcccgtgagcgggttaacgctggacggtattacgattgatgccaccgagttcggcaagatttcgggcgttgacgggctgcgctttaatgatgtcctggtcacggcaagggcgttgacgcgggacagcaatgacgtctatgagcgttga

SEQ ID NO: 169528 - DNA, 408 bp, Enterobacter cloacae
gtggcatcgtcagacaccgttaagaaattcgttatgctggccgttgtggtcagcctggccgcgggatgcgcgccgttacatccttccggctgccataagaccacggccacgggcagttgcagttcaggacgctgggacgatgcggatgaatggggcgcccaagcgcgggcaatcagggcggccattaacgataagcttgatgagccacaaaaatggaaagggaagaaatgccggctgcacatggagttttcccgggacggcacggcgctaagcatatcaaccagcaacggcaataaaggctattgtgaagcgataaaatcagccgcacggaaagccacattcccggcctttaacaatccggaagtctaccgggattttcaaaaatccggcttcgacatgcagggttag

SEQ ID NO: 169529 - DNA, 462 bp, Enterobacter cloacae
atgtttactatcaaaacggacgatctctcgcatccagccgtgcaggcattagttgcctatcatatctccggcatgctggaacaatccccgccggaaagcagccatgcgctggatgtccaaaaactacgcgatccggcagtcatattttggtcagcatgggacggggagcggctcgcgggaattggcgcgctgaaagtgctcaatgaggaccatggcgagctgaaatcaatgcgtaccgcacctgattatttgcgccgcggtgtagcaaatctgtttctgctgcatatcttacaggttgcgcgagcaaaaggcctgaaacgtctgagcttagaaacggggacgcagccaggatttaccgcatgtcatcaactttatagcaaacacggttttgttgactgcgagccgttcgctgattatcagcctgatccaaacagtcggtttatgacgctggatttatgctga

SEQ ID NO: 169530 - DNA, 1161 bp, Enterobacter cloacae
ttgaaaatttacattgatgaatcggggatctttagcgcaaataataatttaacccggattgataaagcatggggtacagttggggcgatcacaataccgcataaaaatataaaaaaagctagtgctgcactatgtgttctaaaatcgaaactgaagatccctgtttcccttgaaataaaaaacgaattcagaccggaaccttcatctgagtattttgcagaattcctgactgaattgttgaagttggattgtacgttccatgctatgactgtaaaccgtacatcactaaatgatgatgctacgcgcatgcatatgaaagcgcagatcgacggcagagctaattacattaaaaaaattgaaagtgagttaaatcaagaagagtttgaggagtatgttaatgagtttgaggtgaccaaggaactcattaattcatcaagcatacaggaatacaaccaagttgtaattcagtcttacctgatatcgttcatgcttgataaaaccattacctattatttacgtaataaccctagggaattatctcgctttgaatgggtttttgacctaaaaaactccgcacctgctagatttgaatttctatattctaaatttatgcctgagaccgttgagtcacattattacagcgaaccaagaggtataccatatataccagaagcaataaaatatttttatagaaactacggagcagaggaagttggattaggaatgccactcgaggaaatagaacgtcgtaaaaggctatttaacgtagaccattccactgtagctggttgttctatgccaatcctatttgggaaaatacttaataattatagtgttttcctggactcaaataaatctgacgggctacaaatagctgacttagttgtatctgctgttaaccgctttttaaaggggaatgttgatgatgttgtcaagacatctaaactacttggtccgttgtttgttaactcgccgagaatagatgttcctgcaattccacatgttaattttggtgaatcaagcgaatcaatcaaaaatatcaattttgataatcttgaattgcttaactttgaagcaagagaattgtatacgaaggtttataggagcggtttcacaaagaacatccgtaagttattagagcgtcaaagtaacggtaattaa

SEQ ID NO: 169531 - DNA, 819 bp, Enterobacter cloacae
atggaaaaagtagcaaagaaaaccaagcagaaaaggtctaagagtctgcacccttccactatttttcatttcacaaacaatgaagaagcattttatagtatacttacagagcggcgcttcaaaccctttttagctcgagaacgtattacaggaattggttcaaggagacaatttgctgttcctatggtttctttttgtgatataagattatcgcaaattgatgatcatacattcaaatatggtgaatttggttttggtctcacaaaaacttgggcggtaaaaaagaaattgcatcctgttttgtatatggagcaaggaggggggttgttttccaattacaacaaaagggtcagaataataaaaaatgaattgttgccactttggaataaaagaaaaaaattaaaccctacagaatcaaagttatttaacgcacttaaagatgaatattcagacctttacaatttacttcgttacatgaaaaactacaaaggaaaactagtaaggccaggggaaaaggatgacgataactatatttttgctgatgaaaaagaatggagatatgtaccggaaccttttgtcggtgatatgtggccgagtttaaatctcgagagagtcatatcatacgaagataagaaaaagtttagtgaaggattttttgatttcagcatcaactttacactggatgatatcaaatatatacttgtgccagacgactcttacatgctcaaggtaataaattgtttatcaagttctgatagttttgataacgaattcattagtaaaatattgacaatggataaagtaattaacgacttctga

SEQ ID NO: 169532 - DNA, 558 bp, Enterobacter cloacae
atgtcaccatctgaaatggctgcttgtctggcctatgcgctctccgtctggctggcggccagaaacaatatcaatacgtggtggatcggcattctcggcagcgggctatacgcctgggtcttctattcggtgcagctttatgccgatgtcaccctacagctcttcttcatcatcacgagcataacggggtggatacactggcttaaagggcaccgtggagatgtattacctgtacggcgaaccaggcctgggcatattgctattttgctagcctgcgccacgattgtggcggcggggtatggactgatattgcatctctacaccaatgcctgggccccctggctggactcccttattttaacattcagcgtccttgctcagtttatgttgatgggacggcgcctggaaaactggtacgtgtggctggcagtaaacacgctggcagttccgctgtatgcgacgagagagctgtatctgacggccgttttatacctggcgttttggtgtaatgcctggcacggactgtatcaatggcgtaaggaactccgtacgcaatga

SEQ ID NO: 169533 - DNA, 1020 bp, Enterobacter cloacae
atgaagcgttacccaaccggcctggtcgtgggcaaatttgcacctttacatttaggccatgaagcgcttatccatgcagcgctcgcgcagtgcgatacggtcgttatcatcagctattcgtcgcctgaaataccgggctacgagccagaaaagcggcttcactggttacggacgcgtttccctcagtgccgccaccttgtgctgtctgagcgggtgatggcgacccacgatattgcgccaccgccaccgccaccgaatgacgctgacgacgatctccatcgtcattacgttgccacgctgtgtgaagacgttctgcactgtcagccgcaggcggtattcaccgcagaagactatggggacggttttgcgggtgtgttaagccagcgtttcggatccccggttacgcacgtgcggcttcagcgcccggagggccctgatgcgccctcaggcacgcttattcgctccgatgttcatcgctaccgtgagatgctcccggcggaggtttaccggagttttgtctttcgaatttgcttattaggcggcgaatcgacgggcaaaagcacgctttcccgggcgttggcagcagcgcttaacgcgccctgcgtcgctgagttcggtcgcgaatactgggaggaaaagaacggagtactggaatgcgacgatctcctgcatattgcgcgtgagcaggtgcggcgtgaggaagcagccagcacggcgccttatctgatctgcgatacgtcgcccttaaccacgctgttttatacgctcgaccagtatggctcggcgcctcaggcgctgcacgacttagcccggcgggactattcgctggttatactgtgcggcgatgaatttccatttgtacaggatggtacccggcaaggcgcggcgtttcgccacaggcagcaggcgtggtatgtcgctgaactggcgcgccgaaatatcccgtatttacacgtcacagggtcgacctgtgagcgtatcgaacaaattcgtcggcatatacagaaacggttttcataa

SEQ ID NO: 169534 - DNA, 876 bp, Enterobacter cloacae
atgggcggattaacgcttatcccggcgatggacgtgacgcacgcgtgcgttcgtcgccgctttcgccacgcctcctgccgcgcctgtgcggacgcttgtcccgcgcaggcgttcttcgttacggacgcgggcgtcctgattgatgacagccgctgtattgaatgcggcgactgcctgtttgtctgtcctgccggggccattaccggcatcatgccgcgaaagcgctttttgcgtggagatatgcttgtcgggccgtttactgagcgcgcgcccggcgtgaatgagctgctgctctggcacgcgcaataccgcgttcgttttatcagtattgaagcagagcgttaccctgcatggctgctggcgcttgcccggcttaatcttgcgcttcgccgacgcggtgaggcggcgtggacgttcaggcttatcccgcacaacgaggttaatctcgcccgtcgtgcgctgatgcacgttccccgtgaggccgttcaatcctgtagcgtaatgcccggcctgcgcgagctgcgaagggcttttcccgcgtttagcgaggcagagataacgctcgatgccggaaagtgcgtgctgtgtggggcatgctggcgaagctgccaggaaaaggcgattcgctttgagaacgccgtgctgaaggtggagtccgggcattgcaccggttgcgggggatgtgaagcggtttgccagcatgaggcgataaatgtgacgcaagcagagggatccgcaaataccgttgccaggcccgcatatgaggtggtttgccagtcgtgccaccgccagttctggtcatttacgcctgatgaaaagcagtgcccgctctgttttcatcatcattacgggatgcgaaatcaggcctgttgctaa

SEQ ID NO: 169535 - DNA, 1206 bp, Enterobacter cloacae
atgatcacactgcaacaactgctgatgaccgacagtgacctgtccggcggcacgctggccggaaaaggcgctgagggcgcgcaggattttctctctctgctggcgggcgcgctgacggagaccaccggtaaaggcaaagatgcgccgctgacgctggccgacctgaaggcggcgggcagcaagctgtcgaaagcggcgcaggaaaagagcggtgataccgcgctacaggccaaaatcgccgagctgatttcccgccaggagacgctatccggggatgacactaccctgcaaagcctcgtctccgggcttaagcctgcgacgggcaccgatgcgctgaaggtgctggcccatgcggatgcgaaagcagaccccgacgccgccaccgacgaagacgagctggccgggttaagcgcgctgatggcgatgctaccgcaccagcagatcgccgcgccggtagcgccgcagcctgcgggtaccgggggagccgcgccgcgtgccaccctcacctctgccctggcccagacgggtaacggcccgcaatcgacgcttagccgcacgttaaccggtcaggaaaacgtatcggttcaggatagcgataagacgctgcccgccgcggcaacccttacgcctgttgtcgccgccgctgagaaacaggacgtgctgagcaccccgtcgtccaccgcgggcccaaccgcaacgctggcaccgatactcagcggcctgacgccgtctcagccagccgcgaccgttgccactgcgccggtgctaagccagccgctgggcacgccagaatggcagcagaacctgagccagcacatcacgctgttcactaagcagggacagcagaccgcggagctgcgtctgcacccggaggatctgggtcaggtgcacatttcgcttaagctcgatgacaaccaggcacagctgcagatggtttccccgcacggccacgtccgcgcggcgctggaagcggccctgcctgtcctgcgcacgcagcttgcggaaaacggcattcagctttcacaaagcagcgtcagcggtgagagctttgccggacagcagcagtcctcatccggacaacagcagcacgcgtcgcgttccggccagcacggcggctttaacgatgagggcgaggagctattgccggcccctgccgccctgcaatccgccgctcgcggcaccagtgccgtagacatctttgcctaa

SEQ ID NO: 169536 - DNA, 801 bp, Enterobacter cloacae
atgccttcgcttcaggagacgctgctcgtctttaccgacctcgacggcacgctgttggattttcataccttcgactggcagcccgccgccgcgtggctggagaggctgcaggatgagcaggttccggtcatactgtgcagcagcaaaacggcgtcggagatgaatgatatccagcaggagctggggcttgtcggtctgccgtacgttgcggaaaacggtgcggtgatccagcctgacgtccggtgggaaaacgccgcgcgtttcatttcagaaaagcagcacggcggtattcgggaattcatcgagcgggttcgcctggagctgcacctcaagttcaccaccttcgatgatgtggatgagcgggtcgtggccgaatggacgggactgagccgccctcgctccgtgctggcacgccagcacgaggcttccgtgacgcttatctggcgcgacagcgatgggcaaatgcagcgctttgcacggctgctggccggacaggggctgaagatcgtgcagggcgcacgcttctggcacattctggacgcgcgctgcggaaaagacgtggcggttaactggctggttgagtgctatcgccagcgcgacggctcagaattcacgacgctgggtctgggagacggccccaacgatgcgccgctgctggacagcgtagactatgcggtggtcgtcaaaggcttcaaccgggcaggcatcagcctgaagaacgacagccccgcacgggtttatcatacccggctcagcggaccggctggctggcgcgaagggcttgattactttttatcctga

SEQ ID NO: 169537 - DNA, 789 bp, Enterobacter cloacae
atgcatacattcagaacggtggctgccgccctgacgctcgtcggcttcagcgcgggcgcgcttgcgcaggacgtgacggtgatgatctctggcggcttcagggcggcgctggagaagctgacgccgcagtacgaagcgaaaagcggcgacaggctgattttaatttccggcccgtcgatgggcaaaacgccgcaggccattccggcccggctcgcgcggggagaaaaggcggacgtggtgattatggtgggcgatgcgctggagaagcttgaacaggatcgccgcacggcgccgggctcccgcgtggagctggcggattcgcccgtcgggatggtggtgaaggcgggtgcgccagtgccggatatcagcacggtgcccgccctgcggcaaacgctgctgaaggcccactccgttgcctggtccgacagcgccagcggccggtacgttgagagcgccctgttgcataagctgggcattgcggatcggataacaacgaagggacatcgggttgagcgcattccggtggcgtctgaagtggcgaaagggaaatacgcgctcggcttccagcaggtcagcgagcttctgcccgttccgggggtgacgtttgtcggtaagctgccggaagatgtgcaatacattacccgttttgccggagccgtcacccggggcgccgaccatccgcagcagggcggcgcgctgctggcgttcctctcttccgcagaggccgccagcatcattaccgccaccggcttacagcccgttagcgcagctcgcgatactgctcggtga

SEQ ID NO: 169538 - DNA, 933 bp, Enterobacter cloacae
atgctgatctgttcgataaaaatgtcctcaaaggtaaaaaaaattggtgtctatgaacattctagtgcagggcgtgatttatattcgaaattgtttaatattttaggggctgaagttgtatcacttggccgtagtaatgactttattccaattgatacagaagcggtaggcgacgaggatagagttcttgcgctgaaatggtccgaagaacatcaattagatgccattttttcaaccgacggagatggtgatcgtccgctggtggccgatgagaaaggtacttggttgcgtggagatattttaggactattgacatctattcaattgaatatagatgccctttctattcctgtaagttgtaataccgcagttgagttaactcatcggtttaagaatgttgaacgaactaaaattggttctccttacgtcatttcagcattcgaagcgttgacgaagaaatatgataatgttgctggttttgaagcgaacgggggatatttactcgcaaccgatatgattattaacggtcaggttttatcaaaattaccaactcgcgacgcgcttttaccagcgttaatgctactcatcgcctctggtaatggtaatatttcatctctagtcgagaatctccctcaacgttttacctggtctgaccgagttaagaattttgattcggaaaagagtaagcaaatcttagtttccgctgttgcatcgccagaaaaatttctaaatcaacttggtttagcgccgcgatattgcacaaatatcgatcaaacggatggtgttcgttttattcttgacaacggcgatattgttcaccttagaccgtcaggtaatgcaccagagttgcgttgttacactgaagcggctgatgagggacaagctaaggtatatgtagaaactatcttggatcaaatcactaaatttctctaa

SEQ ID NO: 169539 - DNA, 546 bp, Enterobacter cloacae
atgctatcatgtaaaaaaatcattgcaaatagtaatattgtttttggaacaagcggcgcgcgtggtttggtaactgattttaaccataatgtctgctctgctttcgtacatgccttcctaagtgatttgagaaataattattactttaataccgttgcattagctattgataatcggcctagcagttatgaaattgctcagtcatgtgcagatgcgattgtaaagcagggattcaatgttgagtttcatggtgtgattcccacacctgccttagcctattattcaatgcaaaaaaaaatcccctgcgttatggtaaccggtagccacattccttttgatcgcaatggacttaaattttataggccagatggtgaaatatccaaagccgatgaacaagctattataaatagtgattatcatttttcgtcgtgtgtaaaccttcctgaactatttgccataccagatgctgcaaatgcttatattgcacgttatgctgatctgttcgataaaaatgtcctcaaaggtaaaaaaaattggtgtctatga

SEQ ID NO: 169540 - DNA, 957 bp, Enterobacter cloacae
atgtcttccatcgtcgatacaccttattcaacgctgtctcagccaaaatcgggctggcaactgttcaaaagcctggcatcgggaaccctcacgccggggctggcgtggcaaaatccggcctatcgacgaaagtttatgctgcgctcgctggcgacgccgctcaccacgtcgcgcctgctggcaaacctcgcaaagcagccccgcctgatgcagatcctggaggtgcagcccggcctgccgtgccgtctgcatcgaccgtggctgaccgtcaacatgggccgtcagcatacgctggaagccctgaactatcactatcagatgatgagccgccatcttcccgcgccgcttctgaacggctatctctctggtgagggcatcacgctggtgacgttaaccggcaaagacgaacagcagtttagcgtttgcctgcgggcagacgcgtttctggataaagaaggcgaagccaccctgacctttgtcgattgtcagaacacggtgctggccgagctgacctttacgctctgcaactatgaagggaaaccatcgctgtttatcggcggaatgcagggagcgaaagcgcatgtcccgcacgagcagatccagctcgccacgaaagcctgccacggcctgttcccgaaacgtctgctggttgaagcggtaatgatcctcgccgacgccttcccggtagaacagatcctcgccgtgagtaacgccacccatatctaccgcagctggcgttaccgcaggaaaaaagagggaaaactgctggcggattacgacagcttctggcgctctcttggcggagaacgtctggataacggcaactttgccctgccgctggccatgccgcgcaagccgatggaagagatcgcgagtaaaaagcgatccgaataccgccgtcgctatgcgctgcttgatagccttatccagcaggtttcacggacgaccggccgttaa

SEQ ID NO: 169541 - DNA, 798 bp, Enterobacter cloacae
atgaacccgctgatgctgcttcagactggcaatctgcccgcgctgtgcctgatgagcggcgcgctggggagcattatcggcagctttttaggggtagtggcagagcgtattcctccgcttgtaaaagaagaggagggggcgggtaacctgctttttccggcgtctcactgcccggcgtgttcgcatcgcctctcgtggtgggagaatattcctgttctgagctggtgcgccctgcgcggccggtgccgctgctgtaaagcggcgataccggtgcggctgttgtttcttgagctgtcgagcgcgctcttttttgccctgacggcggcgtttgcgccgtcgctggcgggcctgctagcgctgtgggtgctgtggtgcggcctgctgccgctcgccaccatcgatgcaaaacatctgcttctgccggactgtctgacccagccgctgctctgggctggcctgctgtatcacgcgttttgccatacgctgcccctgacggatgccgtgtctggcgcggtggcgggttacctgtccctgtggctgctctactggggatttcgcctgacgacgggccgcgaaggattaggctatggcgacttcaagctgctggctgcgctgggcgcatggtgcggctggcaggcattgccctcactgttacttgccgcggcgttaagcggtattgcgctgtattgtcttttttataaatccgttaataaacagaatatcctcccattcggcccgatgctgtcactggcgggattggttatttttattctacagacgctgcaattcacattctga

SEQ ID NO: 169542 - DNA, 1080 bp, Enterobacter cloacae
atgtggtgcgagtccggtagcgagcacgtggaacagctgcgggggctggcgtccctggcggatctcgcggaaaacgcgctggccgccagggtgtgcctgctgctgcccgccagcgagatgatctttcgtcacttcacgctgcccaaaaaaggcggcgccgaattttcctggctggcggaagagacgctgatcggcgacgtggacaaccttcactggacggtgctgaacaggaaaggacgggaagtggacgccgtcgcgattgatgccgaccgcctccgttactggcttaaccgctgcgctgacgccgggctgacggtggtgcaggtactgccggatgcgttcctgctcccggtaaaggacggtggcactacgctggtctcaaccgatgacggttactggatgcgttactcgccgtctggcgcctgtgaaaccgacgccgggctgctgccgctgctgttaagccagcagggcgtgggtgtgcgcgtctgctacggcgatgcgcctgcgggcgtgcaggtggatgaaaagctggcctggcagcacccgctggtgctgatccagccgcagtggaaaagctgcagggcgaacctgctgcacggtgaattcttagccggcggaacgcatggcggtttccgttatccgaaatcggctgtcgccgccgtggcggtactgagcctggggctgctgcttggcccccgcatcggcatggcctggatgctggcccatcaggaaaacctggcccgccagcagatggttgaactggcgcagcactattttccaaccctccggcagaagaccaaccttaagtaccacttcggacagaacattaagaaagagaaaaaaggcgtctttcttcagctggacgcgctggagcagatcaaagcctctctcccttcggttgaactgagtgaagtcggctatgacgacacgcagaatcagctgacgctgaacattagcgccacggatcccgctgcgttacaggcgttcgtcaataaggccagtgataccttcgactttacgctgcagccggtttccagtgaggcgccctatactgccatcatcacagggaaatataaatga

SEQ ID NO: 169543 - DNA, 675 bp, Enterobacter cloacae
atgagtaagcacgttcagcgtcagcagggctttacgctgctggagatcatgattgcgctgaccatcttcgcggtcatcagcaccctggcgtggcagatcctcgacggggccatgcgcacgtcgaacgcaaccgacgtagcggccacccggttaaaccagcttcagcgcgcctataacctgctggagcgtgatttctttcagcttcaggcgcgtgccccgcgcaacgagcctgaggttttcgtgcagcatgacgacgcgctggagctgaccacgctgaacggcgtgagcggccaggtccagcttgagcgcgtgcgctggcggcttaaggacaaaaagctgtggcgggacatctggccggtcatcgatgctcctgaggaggcgaagccggaagaggtgccgatcctcagcgacgtcaaagaggcgtcgtggcgcttctggaaggcgagctggctggacaaatggaccgatacggcgcatcagccggacggcgtggagctgctgctgaccatggagaatggcgatacctggcgctgggtctttaccacgccgggtgacgtgccggacgcgccagccgcgccggatgcgccaaaagaaccagcgcctgcgacgcctgccgatgcggcgacgccagcacagccgcagccggtaaccgccccgtcaggagagaaaaaatga

SEQ ID NO: 169544 - DNA, 774 bp, Enterobacter cloacae
atgaggaacgcattcctttccaggctaatgacgccctgcatcatgctcgttatgctgattttttgcagccagcagggttacgtcgtttataaagaatataagaaggtcacgaataagttagcgaaagctgaacagtctccgctccaaaaacgtgacgttcagaaacctttcgggcttttcaccgcagcggtgcgtcaaagcgagatgcccgccgccgcaaaagccccgctttccgccgaaatcgagggcatcatcagcagcgatgagtcctggctgtcctttgccgttatcaagacgcccgcaggccagcagagctatcgggaaggggagccgctggttggctatgataacgcctatgtcgatgaaataaataaagataacgtggtggtgaagtatgagggggtagagcagaagctggcccttaagcaaccgccatattttaagggtggcgcagagagcggaccggtaacgaaatcgaaaaaagacgcgggcgcggacagcctgcatctcgatgattatctggtgttaaagccgttagtcgataagggccagctggagggctttaatattaatccacggaatgcgtctcctttttacagcagtacagggctggaacggggcgacgtggtggtgaaaatcaatgacgtcgatatgacgaaagaagcgcaggcgaaaaatattatcgccaactggtcgaaaatgaaagaagcggaggtcgtcgtcagacggcacgctcaccttgaaaatattcgggttaatgttctaaacaattaa

SEQ ID NO: 169545 - DNA, 1554 bp, Enterobacter cloacae
atgtatcagagccattttaaattcaccacccctccgttcagaaaaattacccgcaggtcgggtgattttctcgtgccttatcatcaggacgtgttcaatcttctgaaagaaaaaagccagcaggcagggatcaccgggctcttttaccacgacaatgagctgctggggcagttcagcgatgcgctgaaggccagcagcaacgccgtcatttccgttaatgcgtttccaaagctgagcgccagcagcctgctgttcaagctcaacccttcggcacaggagaagcataaacgccaggcggtcgacgccattattcgccagtggcgagaggcaaagtcatcccgtaaggtgctggtgattacccacgcgcaggcgatgaaagccagcgggtatgacgtgctgggcatgctgctcacgcgcgcccaggagctggaggtgcgtctgtccatcgtcctgatgggcagcggcgatgtggatatggcgctaaaaaattccgcattgcaggaatttgtgctgacctgccacacccttcgcgggctggtctgtcgtgaatacctgagctatgtgcaggctcagtgcgaagagcacggcgcagagacatcgccgctgacgcccgcccgcgtgaaaaagatccacaccctgactaagggcaacgtctgcaagctgaaccagctggcgcatctggccatgctggcggcgtggaccgagcgcgcaccgaccgtcgggccgcgtcatttgcgtctggccaccggtgaagtgcttccggcaccgaagcgcggcaagacgctggcctcggtcgggctgtttgcctccgttctcttcgccgcctgcggctggatgatgacgtcgtccatcacggcaaaactgccggttgctctcccggtgcccgccgcctggaaacagcaggtcaaaacgccagaggcgccggcgctgccggtcatcgagaacgaggtggttaaccagcctgatgccatgcatcagctgtacgccatgtggggatatgacgcctccgcagaggatgcgctttgccagaacgcggcaaaagtgaacctgatgtgtaagcagggcaccgccacgctggcggcgctggaagccgtagggtatccctgggtgagtgaacttaaaacgggcgaccatattaactacgcggtggtcgcccgggcaggaaaaacgtcgctggatctgctcatgaacaaccggacctggcaggtgagccgtgcatggtataaccagcacgccacgggtgagtacaccctcctccaccgcctgacgccgtccggcaaagatgaaatcaccgccgccagcgacggtaacgatctgcaatggcttgatcggcagctgagcctggcgctgggcgaaagcgaaacgcacgacaggcgctggacggcggagctgatgaagcgcacccgcgatttccaggcgaagatgcatcttcacgtcgacggcattccgggcgaagacacgctgatgcagctgatgcgcgaaacccacattgcgccgagcgtcctgattcaggcctcgcaggccaccccgaccacgcaagagaagcacgcataa

SEQ ID NO: 169546 - DNA, 603 bp, Enterobacter cloacae
atgtctactatctgtctcgctgcccagcgcagctataccaccgggcaaccggtctggttttcctggcgactgccctcgttcagtaagatcgtcagcgtcttcgcgctctggtgtctgggagcgtgcgcgctgatcgtcgccgggctttacgcgcacgtgtactggaacctgcgtcaccctgcaccggagattaaaaaagccagcgtcgcgaagccagaaacgggcctgtcggatatgcattatatctatgtgacgaagccgttcccgcaccccgagccgcagccggtgaaagtgcagcaggatttaccgccgttagagactatgccgctaaacaatgaagaaaatgactggcagcaggctcccgatggggcgttaccggagagttccgtcgcgcacgacacctcacgcgataccttacccggtaccgaagcccacgcgcgggctacggatcctgaccatgacggtgcgttaaaagcgatgttgatgcaggcgctgaaagaacaacagcaggatatttcgcagggaaaagtgcctgcgccaccggttgatgaaacgcagagtgcgtctccttccggcatgaaaggagacgcaggaggggattag

SEQ ID NO: 169547 - DNA, 699 bp, Enterobacter cloacae
atgaacgcgcttatcaaaaaaggagtgctggccacagcgttagcgatgtcggttaatacggccatggctgcacaaagcattgatattaaagtaacaggtaaaattcttccgtcatcctgtaccccagccttcccaagcggcggcggtattgctgactttggtaccatgaaggcggcatctctcaattcgaccagcatgaccccgctggcggacattaaagaaattcccgttaccattacctgtgaagaggccacgcgtgttgcggtgaagtttaccgatgcgcgtgacgactcttctcctacagaaagtgtcaaaattaatagtaatttttcgggttcaccattttatatgtttggcctgggattgtataacgataaaaaaattggtgcctatgcattagcgttatcccgcacgcaaggtgttaacaccaacgatactggcgaatcgctttacccaatggcgagcgtagatgctggtaaaacctggggcactaaaggtatcgactatttgcagattaccagcaataactctgaaatatatggatttagtacggagagatcgggtaccgagctttctgctcaaagtaagatcaacttcaaagttgctgtaagcgccacaattaacccaaccaacgatttaaacgttacggatgaagtgacgctggacggtttaaccaacgtagagctggtttacctctga

SEQ ID NO: 169548 - DNA, 528 bp, Enterobacter cloacae
atgaaaatagcctgtcttggctggggttcgttaatctggaaaagcggcgcgttaccgattgccggtgagtggcacaccgacgggccgtcgctgcccgtcgagttttgccgcgtaagcgatggcggcgaactggcgaccgccatctgcatgaatgctcccgccgtaccggtgctttgggtatggctggacgccacaacgctgagcgtggcctctgaggccctgcacgagcgggagggcattcctgacgatcgctgcgatggcatcggctcgctgctgataaccgaacgcagcgcgggtgtgctgtcgtcatgggcgagggagcgaggaatcgaggcgctcatctggaccggcctgccgccgagaagcgccgcacaggaaggccgcattccggccgtggaagaggctatcgcttatctcgacagcctcagcggacagacgcacagccatgcgaaggactacatgcgccgcgtaccggcacagctcgacaccccctaccggcgcgtcattaaagaggtcatggggtggtga

SEQ ID NO: 169549 - DNA, 2436 bp, Enterobacter cloacae
atgaaatacagttcacccggaatgatcatcgcaggctttcttatctcctcccctctgcccgccgttgagtttaacattaacgcaatcgataaagaccagcgcggtaatattgatatttcacagtttaatgataagaaccacgtcgcaccgggaaactattttgttactgtttcggtaaataacacgccccttgcgaacggctggcaattagcctggaggcgtaaaggcgaaaccacggaagcgtgtattccggcagcgctggcagataccttcggcctggacgacaagatccgcagtacgctacctgataaagcaggctgcgtcgattttagcggcttatcacaggttcacttcgcgtttatccaggcaacccaaacgctggagataaccctgcctcaggcctggctacagtatcgcgccaccaactggatgccgccagccacctgggacaacggcgtctccggcgcgctgctggattacaacctttttgccagccgctaccagcctgacgagggtacggccagcgatagcctcaacacctacggtactgccggggctaacctgggcgcctggcgcctgcgcggggattaccagtacgcgttcaatagaacggatgatggttcgcagagcgaggggcgcttatcccgcgcttacatttttcgtccgctacccacgctcggatcaaagctgacgctgggtgaatctgatttccagtccgatattttcgatagtttttcctatacgggcgcctcgcttatcagcgatgaacgtatgctgccctggtcgctgcgcggctatgcgccccaggtatccggtatcgcgcaaaccaacgcgaccgtgacggtcagccaggctggcaggatcatctaccagaccagggtcccacccggcccgttcgttatccaggatattaaccaatcggtgcagggcaccctcgacgtcaacgtcactgaagaagacggccgctttagcacctttcaggtttcagccgcttcggtccctttcctgacgcgtaaaggccaggttcgctataaggtcgcgggcgggaaagcccgtcaggacagctcgcacagcgtagaaagcgaggcttttttaagcagcgaattctcctggggtatgctttcccggacgtctctttacggcggcttgctcagcagcggcagtgactatcgcgcgctggcggcgggtatagggcaaaacatggactggcttggagcgctgtcgttagatgtcacccaggccaccagccggcggctcggggaggataagcggaccggatacagttaccgaatcaactacagcaaacgcttcgataccaccggcagccagcttacgcttgccagctaccgctattccgacagccgctatctcagctacgcccgctatcttgaacaagaccaggacgacgcagaaacggagaagcagaccttcagcatcaccgccagccagtatattcctgccctgtcgcttaacctctacctcggcattctgcgccagacctggtgggacagagaagcgtccacgacgggcaccctgacggcaggctataacttcgatcttggccgctggaaaaaccttggcgtaacggcttcgtggagtaaaacgcactacccggatcaaagcgatgatacgcagatctacgtttcgctcagcgttcctctcgattcggatcgtcgtcttaattacgacgtgcggcacaacgacagcatgcgccagacgctctcctggtatgactcctctgacaggaacaacacctggggaatctccgcaggaaccgagagtgaagcacccgatgccggtgcgcaagtgagcgctaactaccagcattatgccggaacgggtgacctgaacctttcaggcagctataaggccagtaaataccgttcggtcagtgcgagctggaacggttcgttcaccgcaaccgctcagggagcggcctttcaccgacgaagctatggcaacgagccgcgcgtgatggtcagtacggaaggtatcggcaacatcccgctaaaccagtcacgcgataccacaaatgcgtttggcatcggcgtgctgcccgccttttccagctatatacccgccagcgtgcaggtcaatctgaacagcctgccggagggcgtagacgttgataaccgcgtgctccgctctgcctggaccgagggggcaataggctatcgattgattgccacccgccaggggcaggacgtggttggggtattgcacaccgctaccggcgcgccgccgcttggtgcgctggttcgtcaacgtgattcggggcaggagatggggattgtcgcgcaggacggacatatctggctgggcgcggtaaaagccggacaacactttacggtcacgtggggagatagccagcggtgccatttctccctgccagccaccctggaaaacgttacgcagctcatcctgccctgccagtga

SEQ ID NO: 169550 - DNA, 756 bp, Enterobacter cloacae
atgaaatcaaaaacgttatttgcagcactttgtatttgcagcttcggcttctcgcacgccgccgttaacctcgatcggacgcgcattgttttcccggaaagcgataaggccagcagtgtgaccatcgagaatcagagcaaatcgctcccctaccttgccctcgcctgggtggaggatgcggacggacgcaaagaagacagccattttatggccctgccgcccatccagcgccttgagcccggcacgtcgtcacaggtgcggatcgtcaggcagcccgcggcgcagcagcttcccggcgatcgcgagacgctgttctttttcaacctgcgtgaggttccgcccaaaagcgcaagcccgaaagaagcgcgcagcgtcatgcaggtggccatgcagagccgcatcaagctgttctggcgaccagaagccatccgcaagaaggcgggtgacgatgcggaaatgcggctggcggtgactgtggcgggcaaaaccatgacgctgaaaaaccccacgccctatttcatcaccctggcctggctgagcaacaacggaaaaaccatgctcccgggattcgatagcctgatgattagcccattcgacacccgcaccctcacgctaagtgaaccggaagggagcggctacagcattggttacattgatgattacggtgcgctacgcaaggtcgatctgacctgttcacggtcaacccggtgcgcgctgacgccgcgcaaggcagggcaacatgcgacatcctgttaa

SEQ ID NO: 169551 - DNA, 681 bp, Enterobacter cloacae
atggacattaaaattgttatcgctgaagaatcttcattgattcgtcgcggcctatcctcaatgatgcaagcgctgtcgttacccgccttcggcatgaaccagcagtgcattctggccggcgaggcggcctcttccgctgagcttcagtcgcttcttggccagcatcacccggatatcgctattctgggctattcgctgacaaccagccttaaccgtgctccgcttgcgggcatggatggtctgaagctgttgagatggcttaatcagacctatcctgcgctcaacgttatcctgctctcgccctatgcaaacgccacgcttattcgtcaggcgctaaaggaaggagcccgatcgtatctgtcgcgcgatatcaacgagaaaaccttaagccaggcgattgccaccgtcctgaaaggcgagatctatatcgaaagccagctggttaatatgctttttcgtcatgaaaagacggacgtggagaaactctcgccgcgggaaattgacgtgctgcgcctgatttgcaacggtttaaatttgaaggaaattgcacaccatatgcacttgagcattaaaacggtcagcgcgcataaggtgcgggcgatggaaaagctggatgtgaaaaatgactgccagctctactctctcatcatcaagaaccagatgtttgacatcaggatgtag

SEQ ID NO: 169552 - DNA, 879 bp, Enterobacter cloacae
atgatattgaatttcgggggggcgccggaccggttaaccattcgggggcgcagcgccgattttcgtggcaagctcaacgttcgccgcgaacagtcatggcatgacaccaccattggcgcgatagttgatgccgtcgcacagcgcaaccagcttagcgccagcgtggcggcggagttttcgtccgtagccattgcccatatcgaccagtctcaggagactgatgccgcgttcctctcccgcctggctgaacgtaatggcgcgtttgtagccgttaaggaaggaaaggtgcttttcatgaaggcgggcagtgccgtgacggccagcggcaggcctgtatcgttaaaggtgattgaacgcgccgatggagacaggcacagtttttccatcgccgatcgcgaagcgtattccggcgtgacggccaaatggctgcaaacgagcgaccccaaaaagcaacaccccacagtcagtattaatcgcctgccgccggcagcagcgtcattcgcgttaccccatcccgacgccgccgtgacgcccgacagcactgcgcaggcgccgcaggagaagctggttggtgccgcagacaacgtctttgagctgaccacgatttttgcctcagaagagcaggcgctcagggcggctgaggcgaagtggcgcgcgctccagcgcggggtcgtgaaattttcaatcctgctggcgctggggaaagccgatctctttcccgaaacccctgtcctggtgaagggcttcaagcgtgccattgacgagcaggcatggatcgtcagccgggttatacataaccttaacgagagaggctttacgaccgagctgcagcttgaacctgacatctctgacgaaaaattttctatcgatggtgagtaa

SEQ ID NO: 169553 - DNA, 2448 bp, Enterobacter cloacae
atgagtaataatgtcagacttcaggagctgctgaatgcagtcgaccgggcaagccgaccgcttaaggctatccagaatgccggcctctctcttgagagcgcgatccgtgattcgcaggcggctctgcgcgcgctcgacgagcaggcggcccgcgttgatgggttcagaaaaacaggcagccagcttgccgtcacggggcaggcgcttgcccaggcgaaacaacagacggcggcgctggcgctcgaactacgaaacacgcaaaacccgacccgcgagcagagcgaggcgctggcggcagcacgacaatccgtagccgccctgaagcttgagtacaacacgttgcgccagtccatgcagcgtcagcgaggcgaacttgcacaggcggggattaacacgcgcaccctggcatcagatgaacgtcgtttaagaaagagcatcagcgaaaaaacgctgcacctcaacgagcagagagaggcgcttgcccgggtcagtcagcagcaggcgcggctcaatgccgttcagagccgctacgagtccggcaaacgtgttgtctcgcgcgtacatcagcttgccggcgcgggcgtgggtatggcaaaagcggggttcgaccagacgtcccgttttatggcgccgggtatcagccttgaaaagcagatgtctgccattcaggcaaatctggggctggagaagggcgacgccaggcttgaggccatacgccagcaggcgaaggacgtcagcgtcagtacgggaacctcaacggatactatcgttctggcgcagcgcgagctggtgcgctcaggatatgacgccgatggggtgcttgcggctacggctcccgcggtcaacctcagccttgcgggagatgttgatgcagcaaaagcggccgacatcatcagcgatgcacagaccgcgtttaatctggcgagcaccgatgccgggcgtatcgcagacgttctcacccgcggatttaccacgtctggtaccagcctcaccgagctggggactgccgttgcctctgccgcgccagccgccagcagcgcaggcgtcagccttgaagagaccacggcactgctgggcattctgatggaaaagggggtaaaagggaccgctgccggcgccggggtcagcgctgtgctgagccagcttcagctgccgaacagccagcgctctgcggcgcttggtgaactcaacgtgcagacccatgacgggcaaggcaatctgctaccggcggaaaatatccttaaggctatctccgactctttcgaaaagagcaagctcggcacggcgcagcagacggcgtacctgaaggccatcttcggccagggtaacgcgcgggaagcagggatactggtttcggctgcgggcaacggaacgctcgctgagaaaagccagcagcttcagggggctaatggcagttccgcgcggctggcgtccattcggactgataacctcgacggcgatgttaacaagctccaggcggcgtggagcggcctgaagattgacatctttgataaggcggatggcgcgttgcgcaccctgaccaccaccgcgaccggatggctcagtacgctctcgctttgggtgaacgccaaccctgagctgacgcaaggcctggtcggcgttgttgtcggcgcgcaggcgtttgccggcatagtgggcgggttaggtatggtcgtcgcaccgattctgacgggcctgaacctggtcataaccgccgcgggaatgttaggcaccacctttagcgtggtcggcggcagcattatgacgatcctcggtgccctcagctggcccatcattgccattggtgcggcgattgctgcgggtgcattactgatttttaaatactgggaacccgtcagcgccttctttgccggagtggtcgaaggccttgccgtggtcttcgcgccactgggggagctgttttctccgcttctgaaggcgtttgattacatctcggaaaaactgagcgggatctggcagtggttcaccgacctgattacgcctgtcaaagcagcccagcaaaccctcgacagctttaaaaacgcgggtgtggcgttcggccaggcgctgggggatgcgttgatggcgccgcttaatctgtttaacagcctgagcggcaaggcgacctggctgctggataaactcggtcttattaaaaaagagtcggacaatattgagcccgctgcggcgaaggcagagtcagcgtcctctgcgtcggggagttcttatattccgccgacatcgatctatggtggctaccagaaatatcagccagccatcgccacgggcggtcgctcttatgtcgatcagagcaagaacgaatatcacttcacgctgcagggtgacatggcatccggcgcgagtctcagccggcaaattcaggatgccctggatagcagagaaaatcagagagcggcggatcggcgatccagctttatgtatggttag

SEQ ID NO: 169554 - DNA, 432 bp, Enterobacter cloacae
atgaataaatattttagcaatgaagaaaatagtttttaccttgaggaaacggttcgggtatacgaagcacaaggtattcccgttccctcagatctcgtgaaaataaccgactcagaatatgaagaattcatggtttctccggacagaaaaacacctcgtttcaatgtgaatcgtaactgcatggaatgggtcgatattgccccaccctcgaaagaagagtccgttgacaatgctgattcactgaaatcacgattaatgtctgttgctactcaggcaattttgccgctgcaggatgctgttgatttagaaatggctacagaaaaagagagcacgttactgactgagtggaagaagtatcgtgtactacttagccgtattgacgtcaacaatgcaccggatattgaatggcctgagacaccgctcagcgagtaa

SEQ ID NO: 169555 - DNA, 414 bp, Enterobacter cloacae
atgagagctctcctgctgatgctggccacgctggcggccattaccctgtggtttcgtcatgagaatctcaacctgtcccgctcctttgctaaagccagccagatcgccggtgaacaaaaaaacaccattaacgcgctgaaccatcagctcaccgtaacgcagcggatggccagagaaaatgaaaatgcgcaggtcaggctccgcgatgcgcttgccgctgccggtgaggagatggcaaggcgcgaagcggctatcgggaaactggtaaatgaaaatgaagagttacgccgctggtatcacgctcagctgcctgatgctgtccgcaggctgcacgtccgcgccgcctgcgcctccgccgcacgctgtttaccacgcttgcccgaaggtgagcctctgcccgatgccggcaagtaa

SEQ ID NO: 169556 - DNA, 246 bp, Enterobacter cloacae
atgaatatgaagctttcccttttttgcgaagatacgggttacagtaaaaaggattctcctttatggacagatgtctgcgatgcgcttcaccagctcaggacaaatactggaagcatcaatattgaagacgttgttaatcaaaaaacgctcagcatacattctgatggtaagcattttctgctctccttaattgatggtaaggacgataaaacaaatattaaaaccattcaaagtgactgtttttaa

SEQ ID NO: 169557 - DNA, 552 bp, Enterobacter cloacae
atgggatgtattaatattcactttgttgttgctttgatatttataattactgcctgcacacccgggcctgttggtacaaagcgttaccagccctatactggtgtcgattcagcaataatatatacacaagttaatgaacgtcatcggggattagtttttttacaacgttttgagaaaaatggtgactgttttgaagaggctgatatgatatatatcagcaataacttcatggatggaggattacatcattttatggaaagtcgtattcaagctaataaatactggtcgctctacgtactggataattcaagcggaaggcaaatattaaggagaacagcattcattcctgaagctggaaagcgttatgttggcattgattatcaaggagtagttgaaattccacaagaattaaaaatttctagcgaagatgatttagatgagatttatacaaaatataaaaataaaaaagctatggcatggaacttgcgcagcggacaatgtaaaacttggatcggtaaactaatggaaccattaatttctagcaggaattaa

SEQ ID NO: 169558 - DNA, 510 bp, Enterobacter cloacae
atgagtatatatccaataccatttgagtttattgaaggtaaagtcaagttatcttggtgtgatattaaatgggcttatgagcataatcttataaaagcatatgttcctgtaaaagaagcagaaaaaaaagttctgacgaggaattactctgatgctgagcttaacttatcatttctttcaccggaacaaaaagaggatataatgtcttgtttgaatgtaatttgttcaaaagtagagggggaggacgagtcaataattaagcggaaatggttgtttataacgcttggttggctttgggataacagaagtagcttttcagaaccattgggagaagttgagaatgtctattcggattttggctatccagtcgaaatggaatcattcattaaatatatgccgccttctgatggatatgatccatctattcacacttacgaggaaaacattgaaagattgatgtgtaactgggagttttatttgaaaaaagaatccgctatatttaaatgttaa

SEQ ID NO: 169559 - DNA, 663 bp, Enterobacter cloacae
atgaaaaaagtcattctggcaacaaccatcgcccttattgcttcatcagctttcgcagcagacactgccattattaaagttacaggcacgttaaccaacgcggcctgcacggcagaactgggtaacggcggtgttattgattacggttacattcgcctcggcgaactatcagatacagccaataataagcttggtgaaaaacagattcctgtgagcatcacctgcaccacgccaaccaaggtcggcttcatcatgaccgataaccgcgccgacagcaatgcgcaggtccctgttgatattgcgaaaaataaggacgtgactgcaaaatattacaccttcggcgtagggttgacgcctgaggggattaagattggtaactacggcgtgtcgattagcggctccaccgtaaacggtcaagccgcggataatattgggcaaaaccaaggctgggtttcaaccaagtgggaaaaagccggaatttctcgcagcgatggcatccagacccttacttttgctgaaacaggcacaaccgttcctatggccatcacgacggctaactttaacgtcgtcaccagcctggcaattcgtgataccgccaccctggccataaccgacgataccgcgctggatggtcagaccacaatgacgctggtgtacctctaa

SEQ ID NO: 169560 - DNA, 663 bp, Enterobacter cloacae
atgaaaaaagtcattctggccacaaccctcgcccttatcacttcatcagctttcgccgcagacactgccattattaaagttgcaggcacattaaccaacgcgtcctgcacggcggaactgggcaacggcggcgttattgattacggttatattcgcctgggtgaattatcagaaggcgcgaataacaaaatcggtgaaaaaaagatcccggtgaccattagctgtaccgcgccaactaaaatgggtttcactatcaccgacaatcgcggcgacactaatgctcaactgccggttgatatcgcgggtaatttgaaccagacggccaaatattatacctatggcgtaggtaaaacggctcaggacgtgaaaatcggtaattacggtatgtggattacgggcgtaagcgtagacggtaagtccgcggacagtatcgcgaataaccacgactggccttcaaccaaatggaataaaaacggcattcctcgcagcgatgggtataataccctcgcgtttgccgaaacgggcacaactaccccaatggcgttcacgacagcgaactttaacttcgtcaccaatctggtgattcgggatacctcaacgctggccatcaccgacgataccgcactggatggccaaaacaccatgacgctggtttatctgtaa

SEQ ID NO: 169561 - DNA, 795 bp, Enterobacter cloacae
atgacactggcactttttccctgtctgcccggctcgacgctcaacgccgtcaataccgtcgggaagtggctggcgcaggatgactatcaggccagccagcccgttgatctggtgattctggcgggtaacgcggtgatccccgcgattgatgctgcctgtaaaatcgcggctgaacagcgtgctcccctgatagtcagcggcggcatcgggcactcaaccactttcctgtacgccgcgattgcgaaacatcctcgctataaccggctgcccaccaccggccgcccggaagctgccatcctggccgatatcgcgcgtgagttctggaacattccggctgaaaacattgttattgaagatcagtctaccaactgcggcgagaatgcccgctttagccgggagcttatcaggcatcgcggccttaacgacgcgcggatactggtggtacaggacccgaccatgcagcggcgcacgatggccacctttgcccgcgttttccgtgatgaaccggtttcgcccgcgtggttaagccaccctggcctcacgcccgtcctgcaaaacagcgacgacggtctggcgtttgttggctcgggcgaagggctgtggccggtcgagcgctatctgtcgctggtgctgggagagcttccgcgcctgcgggacgacgttaacggctacggcccggcggggcgcgactttattaaccatgtcgacatcccggcagaggtggaggacgcgtggcaaattttgcgcaatgacgcgatcctcaccgacgcgctggtcagccgctcgctgctgtaa

SEQ ID NO: 169562 - DNA, 666 bp, Enterobacter cloacae
atgaaaaaagtcattcttaccactattttatcattaagtattacatcggctttcgcagctgaaaccgctgttctgaaagttacaggcacgttaaccaacgcgtcttgtacggttgaactgggtaacggcggcgtgtttgattatggcgctattcacctgggtgagttatccgcaacagaaagcaatgtaattggtgaaaaacaacttcctgcgaccattcactgctccgcgccaaccaaagtgggattcacccttaccgataaccgtagcgacagcaatgccggattgacggtgccggtgggtactacagggggtagcacctctgctaagtataaaacctatggtgtgggaacgaccactaacggcgtgaaaattggttcttacgcgatgtggacgatggatcctactgtcgatggaaattccgttgacggaattgcacacaatctggactggcctgatggcaaatggacagcagcttccggtccgcgtagtgatgctttcagtatcctcacctttgcggaaaaaggcactaccactccaatgcctatcacaacagcttcatttaacttcgtgaccaatctggtaattagcgataccgcaacgctggctattacagacgataccgctctggatggtcagaccaccatgacgctggtttatctgtaa

SEQ ID NO: 169563 - DNA, 687 bp, Enterobacter cloacae
atgtctgtcattatcgatacttttattgctccgccgtgtcacgacgaggttgagatcctctggcaggacgaccatcttttgctgattaataaaccttccgggctgcttagcctgtcgggtaaaaatccgcagaaccgcgactccgtgcactatcgtctggtacaggacttccccggctgcacgctggtacaccgtctcgatttcggcacgtcgggcctgatggtgattgccctgaataaagccgttaacgccgccctgtgccaccagttcagccagcgcgccgtgaccaaggtttacagcgccctgctttgcggacacgtggagcaggatgacgggatcgtcgatgcgcccatcgccaaagatccggcgctgtttccgctgatgtcgatctgtgccgtcaacggcaaacccgcccgctcgcgctatcgggtggtggaacgtctgtatcagaatagggaggtgccggtaacgcgggtcgaactgtcgcctgaaaccgggcgaacccaccagctgcgcctacactgccagcagctgggccatccgattttaggctgcgatctgtatggggggctgacgctgccgggcaccggggcgacgccacggctgatgctgcacgccagcgagctgaattttattcatccggcgagcggcgagacgatccgcgcccgtcacgccgcgccgttctga

SEQ ID NO: 169564 - DNA, 525 bp, Enterobacter cloacae
atgagacatctgttactcgcgctcgcgctaaccgttatggcctgtaacgcgcaggcagctgactggctgagctggcgcaaggtgggcgacgccacgctcacctgggggccgtttaccgtgtatacctcccggctgctgacgcccgacgggcgctacgcgggggtagacagcgataacgcgctgattatcacctatgcccgggatatcgatcgcgacgaactggtcgacgcgacccgcgaccagtggcaggcgcagggcatcctgcagcgggagccgcagggtgaagcctggctgcgcatgctgtccacgctctggccggacgtcactaccggcgcgcagattgcgtttgtggtgagcggcggccagggacagttctggtatcgcagcccgacgtcgcagacgggttttacgccgctggggccgcgacagtcggcagcgttcagctcgcgttttctggcgatctggctcgatccccgcaccgaatatcctgaactgcgtcagcggttaatcggaggtccaaaatga

SEQ ID NO: 169565 - DNA, 1107 bp, Enterobacter cloacae
atggaaaaaagacacaacgctacacctgagccagcgacctggccaacccgtaattcgatggtcgtccacgggctggccgtaaacctgccgtggcttgctttcgtgaatgcgagctttgcgctgatggttctgctgcgcaactccctgttcggccatattgatgcccttctgcacatcagccagcacctgcggctgatgattgacgcctccatgcttggcgtggtgatcctctccgttgcgctggtgatgatggcctggcgacgcatccgcggggtcagcgccgtgctgttcatatgcagcgtgctctggtcgctttgctgttactggtttatcaacgttatccagcttcctcacccctggccgatatttgtcaccctgctgatggccggcatgaccgcactctattttcacccggtggggctgttatgcttcatcgtgccgctgtggctcaccatgcccgttgccagcatgctgctgaataaggaaatgacgcttcgctttgccgggctgtgggtgatcttcacgttcatcctcgtttgcggacgctatatcctgctccgctggtttgatgaagcctggcgtcgcaaccagcagaaccagcggttaatttcgcggctggacgcgctggcccatcaggatccgctgacgaaaacggccaatcgccgcgcgatggagctggtgctggaaaacgcggtggagcaaggcaagcccttcacggtgctgatgctggacgtggattacttcaaactttataacgatacctatggtcaccaggcgggagatgagtgcctggcgcgggtggccgaggtgctgaatacgtcggtgcgcacgcctgaggatgtggtctcacgctacggtggcgaggagtttgtggtgatcctctttgactgcgcagaagacgttgctgaaaaggtcgccgcacggatccaggctggcctgcgggcggcggcgatcccgcacgccgcgtctaaggtcaatgactatgtgacggccagtatgggcatcgcaggtcacaccgaaggtctggccgggcccgaaatcatcgcccgcgccgacgcggcgctgtatcgggcgaaagagggaggacgggatcggtggtcgcggtaa

SEQ ID NO: 169566 - DNA, 768 bp, Enterobacter cloacae
atgccggataacgagataaacggcgtcgattttgtactgccgttccgcttgagccagggcacctggtcgctgggcacgcgcgggccggtaacgttacgcatcggcgaggtgaaaaacctggtgacggcccgaaatatcaccgcggatctccagggcgattatccctggaccgaagcgaacccgctcctgctcaccaacgttaaggttgaggtgctgggcggaaaaatcaccatgcagcagctgagaatgccgcagcacgatccggcgctcctgcgcgtggataatatttcctccagcgaactgattagcgcggtagatcctaagcagttttccatgtccggcccggtgagcggtgcgctgccgttctggctggacaatgagaaatggatcattaaagatggctggctgaccaacccggggccgatgacgctgcgtatcgaccaggatacggctgacgccattgtgaaagacaacatggctgccggggcggcaattaactggctccgctatatggaaatttcgcagtcgtggacaaaactcaatgtggataatctgggcgtattaaccatgcaggcgtccattaagggcaccagccgcgtcgacggcaaaagcggcttcgtgaatctgaactatacccatgaagagaacatttttaccctctggcgcagcctgcgctttggggacaatttgcaaacatggtttgagcaacatgcggcgataccacttctccgcggttcgacagacaaggaaagtgaggaacaacaatga

SEQ ID NO: 169567 - DNA, 594 bp, Enterobacter cloacae
atgcacacgagtaaaaccctgaaaagggtgctagccgtatcagtagctgcagcgatgttcagcaccgttggcgtacaagcccagacgacgaacgccgcgcaaaccagcgctgcgggccaggctcaatcgggcgctaagctaagctccggcgacgaaaacgcgttgaaggacatggcgcaggccaacattaacgaagtggccgccgccaaacttgccctgagcaaggcccagagcagcgaagtgaaaacattcgctcagaagatggtcgacgatcacggtgccgccctcaccaaagtccaggccgttgcccggcaaaagggtgtagaactgccgaccgagccggacgttgcgcataaggacctgacccgtaagctggaaaaccagagcggcgacgcctttgacaagatgtatatggaatatgccggcgtgaaagaccaccagatggtgctgtcgaagctgcaaaaggatgccagcaagatcgacgatccggacgtgaaggccctggctaacgagcatactccggtcgttgagcagcatctgaagaccgccgagcaaatgtcggtgccgtccggcgcgtcagcggacaaaaagtaa

SEQ ID NO: 169568 - DNA, 366 bp, Enterobacter cloacae
atgtatcattctcaatcctcgcgcgtcggcagcattttgctgctgctggccgcgttaaccggcttcgcggtggcgctgtacgcctggtggacgccgcttaccggcgtcaccggcaccattggcgcactgggcgtagccatcgccagcgcggtgctggcgatactggcctttatgctacgcgcggcgtccggtcgcggaacgcgcattttcctgattattatcaccctggtggtgctggcgggcgtgggttttgccgccgcgctgctgcaccagtacatcatcactgcggccatggtggtcggcctgatcggtctgattatgctgagcagcacgtcagcccgtaaccatcaacgcgtcaaagcctga

SEQ ID NO: 169569 - DNA, 801 bp, Enterobacter cloacae
gtgaacgtaaaagcatggacagttttactgatgtcggtatgtctgacttcctgtgccacaccccgtacagagaaatatcagaccatcatggacagcgtgacggcggaaaaagtcagccggataatccggtcggacgtcatcccttcttcaggtcaaaaacacggggaaattatcagccgcgtgtcggctgcttttctcggtacgccttaccaggctgacacgctcatcggagggcccgacactcccgaagcgcttgtcgcgaatttcaacggcgtggactgctttacgttggcagattacgtcgaggcgctgacgcgcagccatgacaagacaacatttctgcataatctggcggaggttcgttacacccaggggaatgtagactatctcagccgccggcacttcttctctgactggttcgccacgcaaccacgcaatgcccgggacgttacgccggagataagccctgactatgctgtcgtcgacaagcagcttaaccgcaaaccggatgggggtgagtacatctccggcctgggcatacatccccgtaaaattaattatattcctggaaacgccatcactcagcaggtactggaccgcttgaaaaccggagattatgtcggcgtctattctccgcttgaggggctggacgtttcgcatgtggggatagtagtccgccacgacggtcgggtatggttcagaaatgcctcctcgctggccgcaaacagaaaagtggtggattcggcgtttctggaatatatgcgcgcgaaaccgggcatcgtcgttctgcgcgctgagtga

SEQ ID NO: 169570 - DNA, 885 bp, Enterobacter cloacae
atgcaaataaatctatttgaatctattagaatttttatagaaatagttgagtctggaagctttactcaggcggcagagaatttgggcattcatcgtcccgccgttaccaaagcgctacagttgcttgaacggcacagcggcacgcgtctgatgcagcgaactacgcgccgtatcaatcttacgcccgacggggaagagttttatcgtcgtagtaaacccctgctggcacaggcagatgaattgctggagtccttcagcagcgacaaagtgttgcacggccagctacgtgtagatatgcctatcgcgcttgcagcgctgctggtcatcccccggttgcccgacttttataaaacgtatccgggaattgaaatcattctgagtagttcagaccgccgtcgggatatgttgcgggatggtctggattgcatactccgggtgggagaactggaagatggtgattacattgctcacaggatgggcgatatcaaaatgacgacctgtgccagtcgtggctatattgcgctatatggcaagccggaaacgctggaggatttgaaaaatcacaaggccatcaactgggttaacagcagcagtaggcaaattatgccgtggacctttgcgacgccaaaggggatcgaggaaataaccctgccaggtaaacttgtcgtagataactccgaggcatacgtgtctgcgggccttgctggtctggggttacttcagggaatgaacgtctttttaaagccctatcttgatagcgggcagcttgttgaggtattgcccgactatccctctcctgaccgcaacttgtcacttctttatccacaccgccacctttcacgcagggtacgtatatttactgaatggttagaaagcttattgtaa

SEQ ID NO: 169571 - DNA, 981 bp, Enterobacter cloacae
atgaaagataaccgtgtctgccaaatccttggcatagaaaaacctgtcatccagggacctttatcatggctgaccgatgctcgtttagttgcggccgtaagcaacgctggcgggctgggcgtgctgggtccgaatgctggcttaaccgcggaaaccgccgtttccacccctgaagaaacggcagaaaaaatgcgtgcagaaattcgcaaaaccaaaaagctcaccgaaaagccattcggcgtaaacctgatacccacgcctgaaaatgacatctggactcaacctattttgcaggtgataaaagaagaaggcatcagggctgtggtatacaccgggtatggtgaaggggcggtgatacccgaattattcgacgaattaaaagcggcgggtattgccgtaatttacagggatatcaacccaacgcctgaaaatacccggcttgctgaagaagccggagccgatatcatcgttgctacaggttttgacgaaggtgggactcttccgggtactgcactgggtaccttttcaatcgtgccactgattgccgattccgtggtgaatattcccgtaatggctgctggcggtattaccgacagccgcaccgcaaaagcggcgcatgcgctcggcgccgaaggggtctttgccggttcggtctttatcggcaccgaagaaagccgcgtaccaaaatctgtcaaggataaaatcattgattcaaacgggctggacctgttgctgttccgtactctgcctcactattaccgctcgctaccgggcaggctgtcaacaacgctggtatcaatggataaagccggagcaagtaatgaggagttaggaaaaacgatgggagggctgcgcggcctgcgtataggtatgctggaaggtaacaccgatgaaggttatatctcactcgggacgggcatcggcaatattcgcagcgttaaaagcgtagcggaggtagtggacgagttaaccgtagggtga

SEQ ID NO: 169572 - DNA, 312 bp, Enterobacter cloacae
atggcgctagaattacaacttattaaacaccactcaggaatactgatcccggctacgcccgagaccagcgatatcctgcaatccaaaacccggctcggcgatgttcttgttgccgagttcagacgggtacgaaacccggcatttcatcggcgctttttcgcgcttctcaatctcggttttgaatattgggaaccaaccggcggggctatctctagcaacgagcggaagctcatcaccggctacgccaagttcctggcttcttatggcggaaatgaggggggcgctgatcgatgctgctgggcagtatcttga

SEQ ID NO: 169573 - DNA, 582 bp, Enterobacter cloacae
atgaaaatcaaaaatgtggcgctggcatttgccgcggcggggtttctgttatcttctcaggcggtgctggcaagcagtggttcagatgttactgctaatctggatacaggcgctggtacgcagggcacaggcggggtaatcaactttaccggtaagataacccttatttcctgtgatattactccagcgtcaaaaaacaaaaccgtagaccttggggcgtgggcgaagagctacttcgatgagcacgtcgaaacaacgccgcgtgagttcaaaatcaacgtcgaaaaatgcccggaaacggttgaatccgttgcggtgctgtttgacggaaataaagatgcggaagatgactcgctgttgcaggttacgcctggcacgggcatggcgacgggtgtcggggtgaagctttataacagcgaccgcagcacggctattaagccgggcacggtttcaaaaaccgccgcaccagatgaaaaaggcaatgcagaattaacgttctatgccgcactggacaaagatggagcgcaaatccaggcgggtgatgtcaacgccgtgtccaacttcctgatggtttataactga

SEQ ID NO: 169574 - DNA, 456 bp, Enterobacter cloacae
atgaaccgatttatcctggcggatcctgaaaaatgcatcgggtgccgcacctgtgaagtggcttgcatgatgtcgcaccaggatgccgctgcgccggatgcattgacgtcccgcatcagggtagttaagggtggcactttcactacggccgtgggctgccatcagtgcgaggatgcgccctgtgcaaatgtctgcccgacgggggcaattcgccgcaccgcgggagcctggctggtggatcaggcgcgctgtatcggctgtaaaagctgtatggtggcgtgcccgttcggagcgatgcaggttcggtacgtggcggaacgcgctcgggcgctgaaatgtgatttatgcgcgcatcgcgagggcgggcccgcctgcgttgaagcctgtcctacccgcgcgttgagctgcgtcgaccctgccagattacgcgctgaacggctgcgtaatctggcctga

SEQ ID NO: 169575 - DNA, 825 bp, Enterobacter cloacae
atggaaattaagctgcacgccaatgccaccaccacgccgcgcatccgccgctatctgcaacggtcggataagagcgacagggagctggccgtcgagctgggtatttcggtcacgaccgtcaggcgctggcgcaaccgcgagcaggtttcggacaaccacaccacgccaaaagtgatacacaaggcgctgagacaggaacaggtttcgctggtaaacgccctgcgggatattaccggcgcaccgctggatgaactgctgatgatggtcaatgacgggctcgggatcgccgtttcccgcgccaccctgaaccgctacctcaaaccggcctctgccaggcaaaaggacgcgtcgctgcagggtaaaaaggcgctgaaggcaggcatcgtgccgcaaaagctgctgctatggcatcagccgctgtcgctgcatatggacgacggcggggagcaacatctgctctgggcgcgtgaacccgtcagcggctggtgctacgcccggctttatgcgggcttttccccgcagctgctgacccactgggtaaacgcggcgctggctgcctgtccggctgatattcattgtgttgagactttcgggctggaagtgaagctgccggagcgtagcgtcactgtaagagtgcattcacggtacaatctcgccgttcaggtccctgtgccgctacgcgaaatcattccgcgcgtaaatagtgaacccgcggcggagctgttgatccagctgtgcgatttttataaccggggaaaagcgcagaaaaaactgggagagagtacgccgcaggcgtttctggaagcgctgcggcgtaacgattag

SEQ ID NO: 169576 - DNA, 459 bp, Enterobacter cloacae
gtggggcactcccggccgtatcatccgcagacgcagggcaagctggagcgttttcaccgcagcctgaagacggaggtgctgcaggggaagtggtttgcgaacgagggcgagctgcagcgcgccttcgaccactggcggacggtatataaccttgaacgcccgcatgaggcgctggatatggcggtgccgggctcgcgatataagccgtctgtacggcagtacagcggcaacacaccgcccccggaatacgacgagggcgtgatggtcaggaaagtggatatcagcggaaagctgagcgtgaaaggggtaagtctgagcgcaggcaaggcgttcaggggagaacgggtcgggctgaaggagatgcaggaagacggccgctacgaggtgtggtggtacagcacgaaagtgggggtgatcgacctgaagaaaaagtcgatcaccatgggtaaaggatgttaa

SEQ ID NO: 169577 - DNA, 1158 bp, Enterobacter cloacae
atgacctggcaggcgcgcatcagtaccgcgctcgacgagcgtcgggcggcggatgcgtttcgggtacgcggggtggtggaacacggcgcaggccgttttctcacccgggaaggccagcggttctgcaatttctccagcaacgactatcttggcctgagccagcacccgcaggtcgttcgtgcctggcagcagggcgcggaaagttacggcgtgggcagcggcggctccgggcacgtcagcggctacaccgccgcgcatcaggcgctggaggaggcgctggccgactggctgggctatccgcgcgcgctgctgtttatctccggttttgccgccaatcaggcggtaatttctgccctgatgggcaaagaggaccgcattgttgcagaccgcctgagccacgcctcgctgctcgaagcggcacatctcagcccggcgcagctgcggcgttttgcccataacgatgtcgctcagctgaacgccctgctggaaaaaaacggtacaggtctccagctggcggtgacggaagggatattcagcatggatggcgacagcgcgccgctcgccgccctgcacgaggccgcaaaacggcataatgcctggctgatggttgacgatgcccacggcactggcgtcgttggcgaagaggggcgcggaagcgcgtaccggcagcgcgtcaggccggagctgctggtggttaccttcggaaaagggtttggcgttagcggcgccgcggtgctgtgcagcgagccggtggccgattacctggtccagttcgcccggcatctgatctacagcaccagcatgcccccggcgcaggccgtggcgctttgcgcgtcactgtccgtgatccgcggcgaagagggggctgaacgccgtgcgcgcctggctgaacatattcagcgttttcgccggggcattagcgagctcccgttccgcctgaccgattcacaaagcgccatacagcctctgatcgtgggcgaaaaccaccgggcgctggcgctggcacaggcgctgcgggaaagcggaatgtgggtgacggctatccgtccgcctaccgttccgccgggcaccgcgcgtttgcgtctgacgctcacggcagcgcacgaagccggggatatcgacgcccttctggaggccctgcatgtctcccgtcaataa

SEQ ID NO: 169578 - DNA, 999 bp, Enterobacter cloacae
atgaacatattgagatttgcctttgcgatggttgtcttgctctcaggcgcgtgcctgatgccgcatgcgcaggcggcaaccacctgcgacagcaccgacctgccttatacccttgatgcaggcacgctttccgtccccacgaccctcgacattggcggcatcatcccggggtcggcaaagacgcacaccgttaacggcagctgtgtcgggccaatgactaatcacaccattatttcctgctattacggaacgggaacggaagtgccgggcatgccgggcgtgtactcaaccaacgtagacggcattggcattgagcttctgaacagtaacgggcagatcgttcgcggaaagggctactcatgtgatacctccgcgacgcccgtcgggacggtcagcagcgacagcggacaaacgttctcgttcagctatacccagcgcttaatcaaaacggcgtcacacatcgggagcggcaccctgtcggcggcgatggatccctttggattcggcgtttttcgttctgtcggaatctctggcgcgcgaaatacgagccactattccgccacggttagcgaaagaacggcgacctgctctatcgatcccctcaatctgacggtctcactcggcgatttcccggtatcacagtttacccacgtgggcagctatacggcctggaagtatttcagcatcaccaccacctgcacggaagaggtcaaccttacggcctcggtgaccagcgcgaacggcgttaacggcgttaacggccagtttggtgatgtcctgaaccttacgcccggcagcgacagcgccacgggcgtcggggtgcgaatgctgcttgacggtgtcgatcttaaatacgacttccctatcccggtcggtggtagagcagagccaggcgtcccggatgtgatcccgttcgccgtgcagtattaccagacggatgccaccgtcaccgcggggaaagctaatacgatcgccacaatcgatcttgaataccagtga

SEQ ID NO: 169579 - DNA, 297 bp, Enterobacter cloacae
atgatcagcatctttggaacatctgtatcagccaggcaacccgttccaattaataaacatcttgtcaatcgcgacataacctttaaggtgcttggcagaaacaagagtgatttttatttatctgatatattagtttctaaacaccctgatgataatatgacccaaaatgaatcagcagggttattgttcgatctgtttgattttgaaaacaaaagaattacgattcgaaaatatacaaactcatttattattggggatttaccactaccctccttcatttgcattaaaaagaaataa

SEQ ID NO: 169580 - DNA, 231 bp, Enterobacter cloacae
atgattgaggatcaatgcatcattttcatgtctcctgccctgtcactgcgcgaggtgcaaagtagttttaactttacctcccaaaagttcgactgctcgcatccaaaggagctgtacgtctacaagaaacaggtaaaaggaaccctgggtaatattatgcaactgctgctcatcgagtgtaataaagacagttgcgtaagtttttattacagagaaaaaaacaatgtctaa

SEQ ID NO: 169581 - DNA, 468 bp, Enterobacter cloacae
atgtctaaacgcctccttttcctgatagtcatcgtcggtctggccctgatcggcatggtttacgctcttaccaggcctacggctttctcgtgcgaatctcagttttctgtcttgcaaagcatcaacggagataacatccgtgcagaaggactcattttttttaacatgacagatgacgttatccttatcaacattgatggtcttctttcacacaataacaaaaaatatctaatctctcgcacgcttaagattagctataaagcttataatactaaagcgcacctatataaaataacgcatattaacattcagcgtgacaatacagataacgtcgacgataagattgccataaacctgctgtttggcaaaggccctgacgggaagctcatttatcttaataaactcaataataatacaatactctttggtaaccacacatttccgcagtatggttgcaaacgaaaataa

SEQ ID NO: 169582 - DNA, 1173 bp, Enterobacter cloacae
atgaatataaacctaatagaattactggcttgcatctcaaaaataatagatatgatcaatcctcgacttaacttgcatcatgtccgaacggcatatattgcctggcatcttgcccgtgaatcgcagttaacgtctgcgcaatgtcggaagaccctgctcgcagccctgcttcatgatatcggcgggcttaacgaggaatcacgacagcagcccataagctattacgataatgaattcaataaccatgctgctgtgggcgcggaactgctggcgaccgtgccgctgctggccccccttaagaccattgtccgttatcatcatattccctgggaaaatggcaaaggcgcgagtgttaatggtgcaaaaacgccaaaagaaagccatatcatctttctggctgatcgactggacgtattaattgctcaataccgtaccagcgatataatcacggccaaagatgaaatcatagacattatttccagtggagaagataccctgtttaaaccagactatatccgagcattccgtcgaatgacaaacagcgcgcttttttggcgaataattgaatcgacagaatttcatgactatattcaggatatccctcgtataaataatgactccgtttcgttacataatttccgcgatattgccgggatgctggcatttataattgacggcttcagccatcatggcgtccagcactctctggtggccggacgaatctcgggatacctcgcaaaaaaaatgggtatcccaccggaacaatgtctgaaaattgaaacaggtggattgctgcataacctttcttctctggcacagtgcgatacaccggcgcatgccgacggggggagtgccgtctggaatgaactctgttccattgaagccataagagatattgcgcgctggtgtcagattcaaaaaaccgttgttgctaaatctggctgtccgcaggaagtgatgattatgaaagccagcatctggctggcgtcactgctgcagggggttacgttatcatcggagtttaaagcgcgcgtcggggaaacggcggaaatcgcaccagagctggcaggcatagtgcagcaacacagtgcggttttattgcagatctttcaggagtccgttaaggaacgacgcgctctggtgcaacgcattaaccagcttagccagccatga

SEQ ID NO: 169583 - DNA, 723 bp, Enterobacter cloacae
atgttgatcaccggaggcagccggggaattggtcagagcctggtgaaccacctgttgcctgagtggaatatcgtcttcaccggtcgaaatatggccggcattgaccgcacgctgcaatacgcgcgcagccgcagtacgtcaaactgggttaaaggctaccgctgcgatggaagtgacgaagctggagtcgagaagttagcgacgtcattgctcagtgagttcggcgcgccctctgcaattattcacaacgccggaatgaccattgatgcgctgcatattcaccagaaagcacgcgactggcatgaggtgctggaaaacaatcttgttgctgtcgtgaactggaatcggatcctgctgccagcgatgatgatgcagggaagtggtgcaatcgtctttatgtcgtccgtgacggccataaagggcaatagtgggcagacggcctatgcggccagtaaggcggcaatgatcggcctcacgcgttcactggcgcgggaagtagggcgctttggcattcgggttaactgtctggctccaggcctgattgatggtgaaatggttcaggctattcctgaaacacggctgaaagccatgcggcagaatattcccttgcggcgactgggacgaacgcaggacgtagcgcgtgccgtagcttttctgatcggggaaggaagcagttacctcaccgggcagacgctggtactggacggtgggttatccgcctga

SEQ ID NO: 169584 - DNA, 252 bp, Enterobacter cloacae
atgagccaatatgaaaccatctacgacagcatcgctgaaatgctctgcgatgcgaaagatctggcaccggaagccctcacgccggagacgacactggctgaactggaaccagatagcctggactatgtggagttgatggtgctggcgaaacgtgagtttaacgtaacgctcactgctgacatgtttatgacaaaaccacccgtcacgcttcgcgacctgagcatgctgattgcacaggaaatggcaggctaa

SEQ ID NO: 169585 - DNA, 789 bp, Enterobacter cloacae
atgaggacgctgtgttacagccagctggatgcgcgtcagtgggctgcgttttcgggagattataatcctgtgcattttgataaagcgtgggtgaaagcgcgtggcggaaatcagctcagcgtacatggtatgcgtgccgcgctggatgtgaaacggtttatcagccctatggccaccagcgccccctttctcaagtgtaccgtacgttttcgccgaccgctgtggcgcgataccgcctacctgatgatgcgcgacgtgaataagcgtgatgctgcttttgtgcgcgatctttctgcaaaagagcattacctctcgtgccaaatcgcgccggtaaatctctttgccattgaacacgaaaaaagccagcgggagctgggggcatcgacaattgttgctctgcatcagacctttttacccctgttacccgatgcccggcagtggcattttcttgatgcgctgctgtttcgtcaccttcttcaggatagcgcgctgctacgtcagcaggccatcgcggccatcctgccggtctgccactcgctggatatgttgttttcccgatttcacgtagtacagacccatcaggaggttatcttcgactctcatctgctggaaccctggtctacggagccattttcagaaagcctggaaattgaaacgctgcccgccgtggtggtcggcgacctggtaaatggcgcagcggtgagaatcgctgcgcgtacgcattatcaacaacgctacattagcagtgccgtgacgctaaaaatcggcgccctgacaaaaggaaaataa

SEQ ID NO: 169586 - DNA, 1254 bp, Enterobacter cloacae
atgaagcgaaatgatggatataagcgggtggtggtgaccgggtatggtgcggtcaccccacttggcgccacggcagatgagagctggcaggcaatcatgcgttatcgcctgggctatcgctatgtcgataactcggcgcggaatattaaaacctactttctggggctggtggacaacgaaccgagcctgagcggcgttcctgccgtggtacggcgtcggctgccacgctttgcccggcttacgctcggtgcggctcgtcaggccatggcaatggcctttggcggtgagccaccgcaggaattctacagccctttagactgcggcgcgatcatgggcaccggttggggagggctggacgaaagctaccatgcacagagtgagtttgcgacaagagggctcgcctctccgtttacctgtttttattccatgccaagcgttaccaccgctgcctgtagtcaattttgggggctaaatggctatcagaatacggtagtcgctgcctgtgcgacgggaactatcgctattggtgaagcgtatgaagtgatccgcagcggcagggcgcagatgatgcttgcaggggccggagaatctctgacaagccactgtgcgatctggaacattgacgtgctgggggcgctgagtaaagaggcgtcagatcctcaacgtgccagttgcccgttcagcgcccatcgtagcggattcgtattgtctgaaggcgcggcggtgctgtgccttgaggagcgtgagggggcgattgcgcgcggagcgacgattttgggcgaagtcaccggttacgccaatttctcagatgcctgggattttacgtctcccgcggaggattgcctcgctcgcgagcacaccatcacctgtgtactgcaacaggcgggactacagcctgagcagctggactatatcaacgcgcacggcacctcgactcccctcaatgatatcaatgaaacgcagtcgctgaaaatggcgctgggcgatgcggcctggtctatcccggtttccagcaccaaatcgtacaccgggcacttaatttctgccgcaggtacgtttgagagcatcgtctgcttacaggctatcggccacggtatcattcccgcgacgaccaactatcagcaggcggatgaacgctgcgatctggattacgtcattgaaggccatcgtgccggtaacatccgcagaacgctgaacctgagctttggttttggtggcgcaaacgcggcactgattctggagaagcacgcatga

SEQ ID NO: 169587 - DNA, 1065 bp, Enterobacter cloacae
atgtacgtagcggggggggcgtctcaggagagctacagcagcggtatttccatcgcctgggagctggatctgtggggaaaactggcgcgtattcgtgagcaaagcgagtggcaggcgttggcgagcgagcaggattatcatgcaacggtgctttctaccatcagcaccaccgctcagctttactggcggatcgccctctataaccagcagatccgtaatcagcgtgccggtctggcaatctcgcagcagaccgttgagcaggtcgtatcatggttcaacgcagggaaggtcggtcagcttgatgtactgcaatcccgacaggcgctgctgacgcggcagaatcaattacgcctcctgaaccagcagcggcagaacgcccgcaatgcgctggcgctgttgctcaacagaccggcagaacagcacgcggatgaagcgaccgtgctggatgtgaatcagcaggttccagttgcacaacataccccgctgcgggtgattgcccgccggcctgatattcaggctgctgagtcccgcctgcgagcagcactggcaggctatgacgcggcgcgattgcagttctatcccgcgctttctcttgatgcttccctgaatgccggaagtcagatctttagccagtggttccacgatcctatacgcacaacgggcaccgcgctgacgctgccctttattcagtggaatacccgacagctcaccatcacgcaggcagatttagcaataaaacaggcagccatcgcttttcgcgctaccgcctacagcgcactcgccgaagtggacgatgccatggaaaaccgatcgagcgctgaggaacaacgcgttcggcttcaccagtcgctgaccctcagcgagcggcgtttatccctgacgcaaagccgttatcgcgcaggggcggtggattttcagacgctgttaaacgcgcaggacgatcggctgaacctggagaatgcccttgcgcaggctcaatacgactacctctacgccacgctgcagctctggctggcacagggaggcgacacgcaatacaggatgataagacatgaagcgaaatga

SEQ ID NO: 169588 - DNA, 1932 bp, Enterobacter cloacae
atggagccgattatcgtgctacggcgggtctgccgtacctttcatgcgggaacgcaaacgctggcggcgttgaacaatatttcactgaccatctatcccggggagatggtagcgatcgtgggggcgtccggctcgggaaagtccacgctgatgaatattattggttgcctggacaggccttcctcgggcgaggtactgataaacggcacgccggtacataacgctgacagccttcatctggccgacctgcgcagtcgctatctgggattcattttccagcggtaccacctgatgccctatctgacggcggaagaaaatattgctatccctgcgctgtataccgccatgcctgaacaggaacgtcacgcacgtacgcacagacttgcgcgtcagcttgggctggaagatcggctacagcaccgccctgcccagctttccggtggtcagcagcagcgagtgagcgtttgccgggcgctgattaacggcgcgcatgtcatcctggcggatgaacctaccggtgcgctcgacagcctcagcggcaaggcgctaatggaggtattccaccaactgcacagggcagggcatacggtgattatcgttacccacgatcgcgacgtcgcccggcaggcacagcgcactatcgagatcggagacggacgacttatcagcgacgtccagcacaccgctgctcatgcgtctgttccgttgccggagcaggataacgggcgcgcgtcgttacatcgtcgccttcacgaatctgtccgcatggcctggcgttcgttgctcgggcaccggttgcgtgcgtttctctctatgctggggatcatcatcggtattgcgtcagttgtgtcatcaatggcggcaggcgaaggcgcccggcaggcgatcatgaatgagatcggcaagctgggaaacacaacgctggagatccgacccggcaccggatggggcaacacgcgcccggacatggcgcgcgcgctgtcgctggacgacgtgcgcagcctgcaggctcttccctggattatgggcgtttcgccggtcatcagcaccaccatgctggccgttcgcaagggcttagactcctcaatgttgctgtccggcgtttcgcaggactttttcaccctgcaaggtctgcggtttgtgcagggtagcggttttaccgcgcgcgatgttgctgaaggtgaaccggttctgatcctcgatgaaaccggtcgcgatacgctgtttcccggtggagaagatccgctcaacgagatcgtgcagattgccggtgcgccatggcgggtgatcggtgttgcatctcgccccggaccaaaagtggtgggtgggtttatggccgcatgggtacctcatactgccttgcagcagcggcttacgggtgaaaaaccgctggaatccctggttctgcgttttcagccgcctctggacccgcatgaggcggcacggcgtgtggaacatcatctgctgcgtgagcatgggcgcaaagatttctttgttcagactgacgatcggctggcgaacgccatgcagaaaacctctgactctatgtcgctgctgataaccgcgattgcggcaatctccctgctggtgggcggcgtcggggtgatgaatatcatgctggtgtcggtgacggaacggacacacgagattgggatccgcttgtctgttggtgcacgcccctcagacatcctcaaccagtttctgattgaggcagtgatgatttgcgcccttggaggcctggcaggggttttcggatcgtggttagttgggctgcttttcgcctgtgtgaccgacgcgttcccaatggtttttactcttttcccggtgctgttggcctgcggcttctccgcattgatcggcctgacgtttggctattttccggcgcgcagcgcggcccgcctcaatcccaccgaggcgctggcccgagaatga

SEQ ID NO: 169589 - DNA, 1152 bp, Enterobacter cloacae
atgaagcctgattatcgttgggttgtgctgagctgcattctggtgcttaccgttgcgtcagcagcagcctggctgacgatggacacaacctcaccgcacgacgctttaccgctggaaacgatcggcaccggcgatattaaaaaggtcgtgctggtgacggggatcctgaaaccggcggtacaggttaacgtcggtgctcaggtcaacggccagttgcgtaagctgtacgttcgccagggagaaaaggtaaaaaaagggcaactgctggcggaaattgatccgactttgcaggagtctgatttgaaaaacgcacgggctcagctggccagcgccagagcgcaaaaactgtcggcgcaggccacgctgctgcgttaccgtcaggaacgcgaccgccagcggatgatgcttcgcgacggctcgggggtgcgcagcgagcttgagcaggccaacgcgcaatatgctgtgcaggtgcagcaggtcgaggtgagcgacgcgcagattgctcaggctgaaatggcggtgaaagcagcgcaggccaacctgagctatacccgcatcgtcgctcctgtagacggtgaagtgttgggcatcgtgacccgggaggggcagactattgtctcttcgcaaagcgcgccgaccattctggtactggcgaacctcgatacgatgcaggtacaaacgcgcatctcagaggccgacgtgcaaaaaatacgccccggccagccgctaagtttctatgtaatagctaatccggaaaaacgctacgtcggcgtcatgggttttgtacagccggcgccacaggagacgctggacggctccggtgagcgaggcgctggagggaaccagcaggcgatggcggtctactacaccggcacatttgaagtgcctaacgtcgggcgcgaacttaaaacggccatgacggcacaggtatttatcaagattgccgaggccagaaatgctctgcgcgttccggttgccgcgctaggtcaggcgctggatgccgggcgttacaccgttaccatccttgaaaacggattaccgcaaccccgtgcggtccgcatcggtatcaacgatcggcagtatgcagaagtgctggacggattacaggcgggcgatcgggtcgtgctggcgcaggatacggtgaggggatag

SEQ ID NO: 169590 - DNA, 1257 bp, Enterobacter cloacae
gtgatcggcacgatcgccctggcaatcatgttctggatcgcccctgtactggcggcgatctccgctatcggtgtcacggtgatggggatcatcagcgtctgggccgtgatccgcgaccgctggtatacccagcagctccagttaaaaagcgccgcgttgaatgactttttcatggagaccatacagggcattctgaccgtaaaaaccgccgcactggaaagccagcggcagggacagtttgccgccttgagccgcgatttatacgcgtgtctgcagcgtcagaaagtttatcagcaggtaaaagaagggctgtatcagcttagcggaagcctggagatggtggcgtttatgctggtggtgctgccgatggtccacagcaaacagatctcccttggcgatttttttgcctacagctttctgcggcaaatcttcacctcatatgtgacgcggatcttctacgccatcattcagaaatcgcaattacacgtgatcgacacccgtgctcatgccctgtttgcgccacgtgaagaggaggcccgctcgtctctggcgctacagcgacctgcagaaagggcaccggatttggctttcaggggatggtgttacggctacgatcccgcgaaccccctcctgtcatccatctcgttttcgttaggggcaggtgaacacatcgcgatcgtgggcgggtccggcgcgggcaaaagcaccttattgcggctgattgccgggctgttaactccgcaggcgggcgaatgttatgccgcaggaactgtactcccggctgcacagctggcgcactatgttttcctgcaaagccaggaggacattctgtttaatacctcggtgcgtgaaaacatcacattattcgacacgcgctaccggacacgcgagcgtgcacggattgaagccctgcttgattcccttgtgctgggtgacgtggtgcgtgcattaccgggggggattgacgccctgatccgcgaaagtcacgcggcgctttcgctcggccagcgccagcgtctgttgctggcgcgcgcaatgtacagtacacgcccggttttattgctcgatgaaccgaccgccaatcttgacgatgataccgccgcagttgtgatggcgacgatccacgcgcattgccggaaaagcggaaaatcgctgatcgtggtctcccatagcgagcaggttctgacgaactttcagaggatttatcagctggccgcaggcaagctcagcctgagggagagccgtgatgaagcctga

SEQ ID NO: 169591 - DNA, 858 bp, Enterobacter cloacae
atgacaaccacgatcccgaatctgatttttcaggaagagactaacgagtgcgggctggcatgcgtggcgatgctggcacaaacgcagggacaaacagtttctctggaaacgctgcgcgatatttttccggcatccgatcacggcacctcgctggacgcgttgatgaacattctgacacgcctcggtatcacgacgacgccggtattattcgaacacgatgagctgagcgatctgccgctgcccgctattttacattatggcgcgaaccactatgtcctgctggcatggcgaaaaggtagccatgtctgtgtaatgaatccagcgataggcgaacagtggctgcctttcgctgcgcttaagcaggagatcagcggctacgcgctgatcgttgatcgcggccaggagcagacggccgagccccatcttgcgttacccacaaaaacgcgaagcgtgccgggggcgatgagccttcaggagacggcgcaggtgtcgggcatttatcggctgatgatattgaccttcctcgtatcgttgacgctgtttctgatgccaacgatggtgagtggcgccatcaaccaggcgttctcaagcgtagaaaacagcgcctttccgtacgggtggtttatgctggcgtttgtggcggcttccctgatggcgctgggcgtgcgagtgctcagcgagcgttatatcaaacgctttgtactgcttaacagcggcactgggttttctcgtttgcttcagaacccgcttcgtttttttgaaagacgtgctccgggggagatcttcagccgtttcactgcctggcagatgggcctgctacaaaaaattgagctggataacgggctgcgttccgactag

SEQ ID NO: 169592 - DNA, 951 bp, Enterobacter cloacae
gtggtcagaatttttattctctggagcgtgttcggttttaagaacagcgccgaaagaattgtcgaccttcggcacagtctttcgcggaccgcgttatttctcctgcggagaatggtgcgctacggacctcttcccgtactgttggtcgtggcgaaagggctttgtgcgttgcgattgaccggacgtttatttcatcttcgaaacgcggtagcaaacgaaaactaccgctgcctgacgggtcaaaacggccggatagacgtggcctggattgcggtgcgtcgacgccttctggaagaggcggccacctgggggcaaaacgcgggactacttcagcaaatccgtgagtgtacggcggaactggaagcggtggttgcaccgctgcaccagcaaaaaacgccctgtattctggctccgctccatacggtttcggacgtattagccgctatcgtcggtgccagcgttacgccaggaaaggcctgcgcgttggtctcctccagtgcagaactgtataacgcgcgcgcccgtgccctgggcgggattgcgctttcctactgctctatccatcaggagaacaacgcacttgccagtagcctgatggcgcatatcactgaagtcgccaccgggcagcagaatatgattatttttcctgatatttccccagattacaccctgcaggctgaagggagtctggcggcgaaactgccgtgtcgtttattcggacgcagcgcgaagctgcacagcggcgttgtgcgccttgctggtgctgttgcggctcaggtggtgttttaccacctgagttatgacagcaggctgcgcatccacattcatcctccggtgagcagtctaaacgttgctggtgttctgcccagggttatcgaatcaaccctgcgtgaacatccgcaggaatggcttttgtggcacagccattctctctactttattaatcattaa

SEQ ID NO: 169593 - DNA, 618 bp, Enterobacter cloacae
atggtttcagcgctgattacagtgctttattaccatatttttgtctttagttcttttgcaaaagatgactcgcagacccaggcgtttcaggaagtcagcagcgaacaacttgccaaaagtccaataaaagaaccctacggtattatcgaagtaatgtcttatggctgccattattgtgcagcgaacgaagacaatctgactgaattttcacgggctctgccgcagggcagcacatttaccgctatacatatcgcaggtgataataatggccttgccgtctgggcgcctgtttttgccacgctggaagctatgggggtagaaaagactgttcgggagagtgcatataacaccattatcacgaaaaacatcgacctcaccaatgaaaaaaatctcgacgcctggctggtaaaaaatcacatcgatgtcagtaaatttaaaaatctgcgttacagcaaggcggtaaaagatcggctcaacgaaatgacggctattaccgagcactataatatcagcgctacgccgatgttcattattaataaacgctatgtagttgctcaggatagcgagtttcctacatttgcacagcgtatgctgaaattgcttaaagaggataaataa

SEQ ID NO: 169594 - DNA, 660 bp, Enterobacter cloacae
atgaatcatcagtattttctttacgataaaaacatcttttattcgcaaggaattagaatacttattaccagtttactggctgaaacgacggaagctttatataccgtaacggatgattatgaacagcttatcactcagcttcagcgtcgggttaatgatgagtgttgcgcatggatcctctgtgatgtggatagcctgccgcgagaacggattcatacattgcaaataatgaaggaatgctatcagcatgaaaataaaaaaatggttattttattgggtaagcaccatatgcccattttctttgcactttatgccatattcccaaccgcccattggctcttaaaaagcgaaagtatggaaagcataacgttatattttaaggagcttctgcaacacaggtgtcagggatattgcttcagcccctctctggtgagctatacgcgacgaaaactctttaaccgggacgtggaacctacgatttcaggaaatgagtggtggttaatagaagagttatttaaaggaaaatcactgtcgcaaatctccggtgagattaatgtagatgtccgtcgcctgagttatatcaaacggcatctaatgaaaagattgaatatcagaaacaacatcgccttattctcagcgttcagaggcatgatgccctga

SEQ ID NO: 169595 - DNA, 549 bp, Enterobacter cloacae
atgcatcgcatgacacttatcctcgcctgtttgttgacggtagtttcagtagtaccagcctgggcgaaggccgagttgaccggtggcgatctcagctttaaaggggtggtcatggcttacccgtgcagtattgcaccagagtctgaacgcgtgcaggtcgattttggtgaaatttctacaaaatcgttgtctggcagcggaaaaacgacgcccgtacccttcaccattcgattgcaggactgtaatccgaacgtgtttgacgcggtaacggtaactttcagtggcgtcgctaacgcaaacctggcggatcgactggcgatcaacgcaaccccctccgggaatgcgggaggggttgggattggtctgctggaagccgatgaaacgcccgtgcgtctgaacgttgcgacccgtccaacccctcttaacgacacgctaatacggctgagctttctggcttttattgaagccgagccggatgccttaacaaatggaacgataaccgcagggccatttaccgccactgccaattatacattgaactatcagtag

SEQ ID NO: 169596 - DNA, 1038 bp, Enterobacter cloacae
atgcaatatcattatgcagccctactggcgatgtgcgcgcttggggcacccgggacggcatggtccgaagtgggcggcgaaattaaggcggtgaatggcacctacgaatatcttattaatattaataatcaggatattaccaacaatcaggtcggcgctgtggttacggatgaatttgacctggcagggatgttccagggccgggcttactgcacgcagcctatggttaaccagccagtgtattacacatcgaaggcgacgctgacccaatctggaatgacgacgggttatctcaagctcaatgagtatatggacgtgaaaattgagatctatatcggcggtaacctgcaacagtacaaaaccgtgccgttcgacagtgtttcaaacaacgtcaatcagaactactgcaacccgccgagcaccgtcctgtccaaccagtttgcgtccggcgcgaagggaagggtgacctttatgatcaccaggcccattatcaacggggtgaatttacagggctctgaaattgcgacactttacggtcgtctggggcctggcgtgatggggcaaaccccgctgtcgcgcgttaccatcgcctccggcgtcgtcaccgttccagataaatgcatcgtcaatcagggtacgcctatcgtcgttgatttcggcaacatccctgggacaggtagtcgcctgaacggtatcaattacagtcagaacgtaccgatacacgtgaaatgccagggcggcagtttttctcagggagcactcaatatcaggttggggatccagcaggctaacccggcatttgaagacggtaagtacctgagtacgcagggagcaaccgatcgttcagagctgggtattgcgctgcgcgatacccagggcaaccccgtggtgccaaatacgttctataacgtgccgggattctccaacaaccagggcgactggaacctgactgccgctccggtggccaaaagcgtcacttcatcgatccctgaaggtgattttcacgcgtctgcaaccgttgtggctgaattccagtaa

SEQ ID NO: 169597 - DNA, 744 bp, Enterobacter cloacae
atgagcaagaaaagacagaatggttatctgatggcggcgtgtgttttgagtatggtgggaggctgcgcccaggcgggagtttctctggatcggactcgccttattattacggagaaagatgcatcatccagtgccaatctttcaaataccagtccggatattcctttcctcgctcagtcgtgggtggaggatgaaaagggcaacaagatcacctcgcctctgattgttttaccgccgttacagcgcatcaacggggggcaaaaagggatcgcgcgcgtgaccaaaacggccgacatagacaaattgccgaaggacagagagagccttttctatctcaatgtcagggagataccgcctaagccggaaaagcccaatacgctacagttggctatgcagtcacgcattaagctgttttaccgtccggcgtcggtgatcccgaagatgaagggagaaatctggcaggatcaggtggtgtttcataaaaatgccggtcagatgacagcacagaacccaacgccttactacgtcacaatccttaacctgaccaaagatgatgggcagaagatcacgcggtttccggggattatgattgcccccaggtcgagccagcagtttgcgataacagacccaaacgttagccagttttccatgatgtttgtgaacgattatggcgggcatccggcgctgaaatatcgttgcgatggcaatacctgtaaagcgttaccagcggcccagcagggttaa

SEQ ID NO: 169598 - DNA, 2055 bp, Enterobacter cloacae
atgaaatataacgatcctgactggacgccgcctgaacgctgggatgaaggtattgccggtctgatttttgattacagcctgaacgggcagcttacccgtcagttaaacgatcatgaaagctacagtgcaatatcggggtacggccaggctggagccaatgtggggggctggcgggttcggggagaataccagaccagctattacagccaggaccatcaatccgatttcgactggaatcagatctacgcttatcgaccactgccgttgatggcggcgaaactgacgctgggtgagatttacctgaactcacaggttttcgataccttacgtttcaccgggatcaatcttgcgagtgacgagcgcatgttgccacctgctctacagggctatgcgcctgagatccacggcattgcccgctcaaatgccaaagtgactgtcagccagagtggacgagtgatttatgaaaccacggtgcccgctggtccattcaatattcaggatttacgcagctcggtacgcggaacgctcgacgtacgcgttgaggagcaggatggttctgtctcccttttccaggtgaacactgccaacatcccgtatctcacccgtccgggctacgtacgttacaacctcgctggtggtactccgtcccgttacgaccactccctgaaggggccatcattcctctccggcgatttctcctgggggatcagcaacgcctggtcgttgtacggaggtttgcagtcttcgggcgaagcctacacggcgacctcgctgggtattgggcgcgatctgaatgcttttggggctatttccgtcgatgccaccgagtcatggagtcgccagcctgacggtaaacgcctgaaaggtacctcattcaagctcagttacgcaaagacctttgatgaatacaacagctcaatcacttttgcgggctaccgtttctcggaggaagacttccgttcgatggcacagtacctggatgagcgttatgaaggttatgaccaaagaggacgtgaaaaagagctctataccctcaccggaagtaaaacattttgggcaggcgaagcgggcaaggcaacaaccctttttctcacctggactcatcaaaactactggaataaacgcagccaggatcgctacggcctgtcggtgggccgcgccttccgtatcggtgatatcagcggtattaccgccaatctctccgcttaccgtaccgattatcagggacgccaggatgacgcgatatctttctccctctccgtgccgataggcgataacacgtgggggggggggctggatatccagaccactaacggtaagagcagcccgatggcctcatacaccgataacagcgacttcaataacctgtggcgggttcgcgcgggtgccagccagaacagcaacgccagcgtagatggctattacctgcatcgttctcagttggctgaaattaatactaatgccagctatcagcagaatgagttcatggcgctaagcaccacattgcgcggcggttttacggcaacccgccatggagcggctatgcataacagcggggcaacgatgaatacggcccgcgtcatggtcgataccaacggcattagcggtgtgccgcttaacggtgaaaagtctcgaacgaaccgcttcggtatcgccgtagtaccggacgtggtgagctacaacagctttgatacacgtgtggatgtcgatgcaatggacagcgatatcgaaccggcaaaatccatcagcacgaccactctgacggaaggcgccattggctatcaggctttcggcatcgcgaaggggatgaagatgatgggtacggtacggcttgcggacaacagcgttccgccattcggagcggaaatttacaacaccgatggcgttagcgtcgcgatggtgcttgaggacggtaaggcctggctttccggcgtcaatgccaatgaaaccctgaacgttttgtggggcggcaaacagcaatgcaaggtcacaatcccgccgagcataaacaatggccattcggacacgttattgccgtgccgtaaaaccctgtag

SEQ ID NO: 169599 - DNA, 435 bp, Enterobacter cloacae
atggatttgttcagggcggggatgatgtcgggaaaattaaaaactaatctgacgatgatagctcttctgatcatgaccagttgctataccgcaatggccagtgcagaggaacgtattgagtttaataccgatgtcctggacgctgcggaccgcacacatatcgatctgtcgcgatttgcgacagacaactatgtcacaccgggagactatctgctggatatccgtattaacggtcagtcggtagggcaagagaaaattcgttatgtcgaagcgcctggagaaaaacgttcattgccgtgcataagcggcgagttgctggacaaacttgcgctcaaggaggacgcgcgtttacaggctactcagatctacgagaactgctattcgctgcatcgtctgccagggggcaaaattaagcaactatgccggcgtgcttga

SEQ ID NO: 169600 - DNA, 543 bp, Enterobacter cloacae
atgatgaataaaattctggtcagtgcctgcctgatggggcttaaagtccgttataacggaaaagagaaagcgcagatgagtcaacaacttgctctctggcaacaggagcagcgcctggtgattcactgccctgagctagctgccgggctacccgttccgagaccacctgcggagattgtgtcggccgatggtagagacgtaatgtgcggacaagccagaataattgaaaatactggaacggatgtaactgctcattatcagcttgcagcctggctcgctctgcgagcagcacgagaatcaggatgtgcagcagcattgttaactgatggtagcccaacgtgcggaagtcagtttatctataacggttctttcagcaatcagcttaaatcgggtatgggagtggcggcatcactgctctccgatcatggtattgcggtattttccgaaacccagtttgcggagcttgttatctggattcaagaacgggaacgagcggttaaccacatagagcgcaattctgttcagaataggtgtgatctttaa

SEQ ID NO: 169601 - DNA, 978 bp, Enterobacter cloacae
atgattgatgcagaatatgaaccaaaacaagttatcgatgcgggcattgcattgcaaagtgaaggacgaaacgttacaggctttgcactccgtaatcgaattggaggtggaaacccgggaacattgaagcaagtttgggatgaataccagacatcacattcgagtataaatgtaaatagtggtgatggtctccccgtagaagtagctgaggaagttaaaaccgtagcagcatcccttactgaacgtatcgttcatttggcaactgaattaaacaacaaagctgtacgagcagcagagcgacgagtatcagaagtcacccgagctgccggagaacaaacggcacaagcagaacgtgagctcgctgatgctgcgcagacagttgaagagcttgaagaaaaacttcgggaagctttttctgaaaatacctggctagcgcaatctcttgaatctgagagacttttgtcccgtcaacgcggtatggaaattaatcaactcaaagaaagagttcaggctcaggatcaaacaatacgacagcgcgaagaaactacagaaaaattagtaaacggcattcaggagtcactgcgttctgttgaacaaacgctgcaacaggaaagacaatcatatgaaaataatttgactgggatgcgacttcgcctggaccaggctgcagagaaagagagacaacttacttcagaattgaaacgagcaagaaatgaacaggttactttagctgcaaagcttgaatcgcatgaaagcatagctaaagaacaaattcataagctaaatcaagaattggctcgctctcaggaaaaagcaaacaagctggagctttcacgtgctgaagctcgtaaagaggtttcagatgttcgcgagcagttggcttttatacgacgttcacagattgcagatgattcccctaaagccaaagtctcatatgagcaaaaggcaatgctgtgggaagctcaaacgagtaattaa

SEQ ID NO: 169602 - DNA, 303 bp, Enterobacter cloacae
atggctaacgacataataatccagtggcaaatgttattcccagataatgagggcgaagattgcttaaataaccctaagggtacagaaaatatcaaacgtgacgaagaatcttcagataaatgtcttgaggctttctctctggtcactgaagaactgttttacttgcaacaactaatttctgaggtagtgactaaaaaggatttacatgagtcacttaaatgccacaaaaagaaaggtacaaaagtactggttgtattttttatcattgttgtgatttttggtctggtagttagcattttttag

SEQ ID NO: 169603 - DNA, 861 bp, Enterobacter cloacae
atgagtgaattcaataagatcatgattgcagcgggattgggaatcctctgctcatcaaatgtagtgttaggtgctccgcaggaggcagcaaaaacgctatcgattccttcatataatattattgcagaaacgcttattcgtatgactccgagtgtaaatgggaagcgaaatgatgtgttaatgcaggagatatgcgctattgctcagggagcaaaaaataaagatgacgttgttaattctttaaaagatgagaaactagatcgcagtactgccgtgcttttaaacagtgatttgagaagccagcaatcgatctgtactgcctggatggcttcaacgctgttcgatacagttaatacctcagcctggatgatgccagtaaaatctgagagtgttaagaaaccgtcagattctgaaagctggaaattctggaagaaaaaagaagcagcagaagaaacaaagcaggaacaacatcaactggatcagcaacgatttttccgtagtgcacagtctcgtctcaatattgcacaagctgatgctgaattgttcggagtgattgctgcaaatatggaagtatcgaaggatattagcactttttctggctggcagcaaaaagtcgtccaaattgttaccgagcacgcaccgtcttatctgaataaaattaaattacttacgtctgcttcgaataataaccatttcgttagttttgtagtaaaagataattctttcgctgtactcgattctaacggttatgaactatcccaggcagggagtgtgccgttgttaagagttagaggtgttgactggttaggtaatggtaagattttaggtaaagaatattttgtaaatgtgaatattaaataa

SEQ ID NO: 169604 - DNA, 795 bp, Enterobacter cloacae
atgactaagaaaaaaaaccttttttctcattggccgcttatggctgttattctggtggccggctgtaccagaacattgagtgaagttagtgattctggaaaaacaggatcaccaaaatttcctcaaatgatatccgctgttagggaggaaggttcctatgtttcattagaaaatctgtcgcttgtaagagataatatgacgaaggcgcagatttacgaactgatgggggcgcctcattttcatgagggagttttatttgtaaaagagtgggattatatactccattttaatgctcctggtggggaagtaatgacatgccaatacaaaatcacttttgatgataaaatgaaagctcgtggtttttattttaagccggaagactgtcttgcaaaattaacgccatcagccaagacaaacaaagtagtgctacataaggatttaagtgcagagtcattattcgcatttggaagtgctagtctaaatatagctggctcgggtaaaatagaagcacttgctaaggaaatattagaacttaatcctgattttaaaaggcaaaatgttattgttactggttatacagatcgttttgggggggcggctgaaaacgaaacattatcttataaaagagcaatagctgtaaaatcactactggttaaaaatggtattccttctaatgctgtaaaagcatatggaatgggagagagcaatgccattaaatattgcgcgggtccaaaaacactagccgttgtggagtgtctggctccaaaccgccgagttactgttgaactaaactaa

SEQ ID NO: 169605 - DNA, 1992 bp, Enterobacter cloacae
gtgaccgcgggcaacagcgtgctgaacaccgacggcctgaccatcgcgaacggcccgtccatcaccaccggcgggattgacgcgggcgggaaggtgatcggcaacgtggcgccgggcgtcgcgggcaccgacgcggtgaatgtggaccagatgaccagtctgggaagcgacctgacgacgaaggggctgaacctggcagggaacgccggcagcggccacctgaacctgggcgacactctgaatgtgctgggtgagggcagcacagcaggcagttacagtggtggaaatattcggacaaacgttgatagcttcggtcatctcaatatagaaattgcagactcgccgaaatttggaaatatcacaattaacgatggcaacagaataaccggactggctgatgggcagaatttagatgatgccgttaacttgggtcagctaaatgaagtcgctgcaagcgcaggtggtagctggaatatccgtgatgcaaatgaccttggttatgcggcatcttatgaggttaattcaggtgatactgttacatttgcttcagcagatgaaaatccaacagatctttccggcaatttaacagtgcaacatgagaacggtacggttacatacgatctcaatgaagatcttgtcctgagttcagtaacgacgggacaaagtgttctgactaacgatggattgacggtcggtcgcaatgtaatgcttggaaataccggtctcgtcattaatggcggtccaagtataacagtgaacggtattgatgcgggaggtaaaaaaattactcatgttgcagctggtactgatgctacagatgctgtcaatgtcagccagttaaaggattatggtgatgtcattatcaacaacatctataacacagggatgaagtatttccataccaattcgacattagcggattctcaagctactggaacagactctgtggctattggacctaatgccgttgcgtctggtgataattcaattgcaagtggcaatggtgctatttcatcaggctcaggcgcgttagcaaacggacataatgccgaggccacaggaaatgcttcagtatctataggtgaaaattcaacttctaaggctgaaaattccgttgcactgggttctggtgctgttgtgactgagaatggtaaaaactcagtggcgctgggggctggctctgttgctgaccgtgaaaatacggtttccgttggcagtgaggggaatgaaagacagattacgaacgtagccgctggggaaaaagagacagatgctgtaaacgttggccagttaaatggcgtccgtgatgaaattactaatattggcggtacgatcactaatattagtgagggtaaggatggaatgttccaggtaaataataccagtaataattccagacctaatccatcaggaaaggattcactcgctggcggcgcaggcgcaaaagcgtcaggtaataacagtatgtcagtggggactaattcttctgcatcaggcgaaaatagcgttgcattaggtaatggctcttcctcaaaatcgcaaaactcagtttcattgggggcaaattctatcgccgaccgtgataactctgtttctgtaggttccattggggcggaacgtcaaattactaatgttgcggcaggtgaggcacctactgatgcagtaaatgtatcccaactgaatgatgctgttggcacgattaatcagaatacgaacaataagttcggacagctgaaaaatatggtcgagaagcagggacgtaaaatgagcgctggcgtagctggagcaatggctatggctggtttaccgcaaccttattcgccgggtgcaagtatggtggcgatgggaggaggaacattccagggagaatcagctgtggcattaggtgtttctgttatttctgataacggaaaatgggttaccaaactgtcgggtagctcaagctcgcagggtgattatggtgtcaacgtaggcgtcggttaccagtggtga

SEQ ID NO: 169606 - DNA, 1038 bp, Enterobacter cloacae
atgattgcatttctgatagaagggcatttctacgcatatttttttatccgtatcgtaaaagcgctaccggaaagggaaagaaaaaatgtgatatttttttcccgtgattctgacatttgcaatttgattaagagtcagttgccatactgtcaggtaatgcaaattccgatgctcaaatcggtgccagaagaaaaattatttcatcactccagaccgcttcttggtgagcggcttggtaaggcgattgaaagtagcttcgagtacgtcatcgggggcggtgagcgtaaggtctgttggcatgttctattgtcatgctttgttttttttaaccaatttgaacccgccagaatttctcggtttgtcatgtgtagcggctgtggcatcggggcaaaagcagcaaaggtggtatgcgagctaaaatcgatcccaatgcaatttgtagaactgtcaaatttacccaataagatttttgtcgatccactgggtacgaatgcccactcacaacttgccatgactccagaaatacttgaaaggtatccagcggttgaagagacaacacatctggcatggatgtccaggtaccgcgcttttaaagcacagccgccccgccaggcgcaggggaatatattgactaatttcattaacgagtgttcgacagataaaattcttaacactggggcaccttatctctttgttccacttcaggtttccaatgatgcgcaactctggctctattcacgttataaaaacgaagatgttatccgttatgcattacagttggcacagagcagtgggtatcaggttgtagtgaaactccatcctgcggaaccacaaagtgaagaagttcgacatattgtgcaattacaaaagacgctaggttttaaattatcgagagagttaactaccgatcttatcaaacagtcagaaggtgtagtgacgataaattcgactgtagggctagaaggtttattacattataagccagttatagctataggctgtctcttatacacatctccgagcccacgagactcctga

SEQ ID NO: 169607 - DNA, 942 bp, Enterobacter cloacae
atggaactgactgaacactaccaacctgaatttgtgtcacgttttgatgcgcgcgagaccgcgtgtgaatgcccggcctgccggaacggcggggagggctggccgcatatcagcgtgaagatgaaaaaccagcagcgtgagagcctggatatcgtttgtgaaacggcggccaaagagatgctgttcaatccggacgcgtttattttgcacaccacgcagagggcagcgcagggcgaagagatgctctctccatggagcgagaccctcaatcagcagtgcgttaacctcgccattcatccggcgctggcgctggaagtgagtctgtacagcattggcgtgctgctcagtaaagcgcagcaatatcgggataacggtgagtgcgacccggcactgctggtaaatatgggagaacagctggccgcgctggcggagcagggagtgttaacgcagcaattcgcgatgctgcctccgattattgagaaccgcgtggccacgctgaaagagatgggcaccctgcgccttaatctcaacctgccgatggtggagaagatgggtatggcgctgaagctgagcgagctgtcgatcatgcagccttcgcgcctggcggaacgtctgcaaacgctggaagcggtatgggcggatatcagcctgtttaacgagcagccgcacatccttcgcaatgcgttgatttatccgctgtacaacgatgtgttccccggcgtgaactgtagcaactatggcgaagccctgctggggctggcgcgacagttcttccacctcaaaatgctgtgcgccatgcgcgccgagcagggcgcgtttggtcaggacgacgcggcgttgctgatcggcgcgttacgcggctggcagcaggagaatccatttgcgaccgacgcggcaaatacggcggattacagcctgctgtgcgggctgtcgctgttgtaa

SEQ ID NO: 169608 - DNA, 1422 bp, Enterobacter cloacae
atgaccacaacctctaaaaacactcagtcttccctgatctcagccctgctggcgcgccagcagcgttcgcagccgcggtcgacgccgtttgtcagcgttatctgcccgacctacaaccgccgcgagtttttgccctatctgctctatatctggcagtaccaggactacccggcggacaggcgcgaactggtgatcctcgacgattcgccggccagcaacgccgatctcatcgatatgatggtcgatccgtcgcagccaaacgtacggtatatccacagcccggagcggctgacgctgggcaataaacgtaaccggctcaacgcgctggcgaagggtgaatacatcatctgtttcgatgatgatgactattatgcgccggataagatttcccatcaggtggcgcagatgcagacccaccgcgcgctgttttccggcagcgaccagatttatatctggtacagccatctggataaaatctatctgacccactccttcggggcccgccacgccctgaacggcacgttcggctatcatcgtaacctgctgaaaaatcatcgttatgatgatgaagcgatgcaggcggaagaggtgggatttctgaataatttcaccacgccggtgcagcagattgacccgaagcgaaccatcctctgtatttcgcacagcagcaacacctatgacaaagatttcattctcgatagctcaacgccggtcgatcttacgctggaggactttgtcagcgatcccaacctgctggcgcactaccgccggcttagcaccgcgccgctcagtacgcgggtgaactggtcggtattcgagaagattgccgttctgtatgacccgcagcaggaatcaacgctgccgacgcgatgtgaagcgctgctagcgctgggggtagaagccggacaaatctggccggtggcaaaagtgcagacgggaacgccggaggccgccgaactggcaacccacgtgcaggtgctgtcccatgcccaacagcagggctggaaaaacgtggtgctgctggatgccgggctgcgctttgtcagaaaagagaatgcgatccagaacgtcaacaaactgctcgatggactggaccagctggactggcaggtgctgctgctgggtggacgttatgaaaacttcacgccaacccgatctttaaaaggagtggcacgtatctttaatgcgggctgcgcgtgcgcctgtgcggtgaatgccgattactaccctgtgctgctggatgcctatcgtcaggcgatggagcagagcgtcagcatcgatcgctgctgggcggtattaatgagcaaaaacgcgctgtggctgggattcagcccaagcttcgccttcctgcaacactacccggaccccaaaagcggcgagcctgttgactgtacgcactggttcttccgtaaacaccgttaa

SEQ ID NO: 169609 - DNA, 447 bp, Enterobacter cloacae
atgagcaaactcatttcgacactggaacagctacagctgatgcgtactcgcgcggttgatgacctgaccgtaaagctggcctcgcaaaaacagctctgccagcgctttgagaagaacattgatgcattgacctcgctggcatcaggcctcgtcacgcagagcgcgaacagcgccgtgctgatgatcaaccagtcgaaatataagcaaaatattcagcgggttatcgactggcagaagcaggagcaggcgctggcttcgctggaagcagcaaagattcaggataacctgctggccgaagcaaagcgggaaaaaagccttgcgatggtgctggatgccaaacgcagcgaccagcggatggcgttaagccgacgcgatcaaaaaataaccgattctgtttctgttcagtgctggctgcgccaacggcaggccgccgctcgccaacgataa

SEQ ID NO: 169610 - DNA, 531 bp, Enterobacter cloacae
atgtcgccacccgctttatggtcgccgcttaacgtcacctccgacgcggtaaccgtggtgctgccgctggcaagggtgtttttaagcaccacttttccggcgctgttgagcgcaatatcgccctggcgcgcgttcaggttgccaaggttaacgcccagccccttttcgcttgagacaagacgaatgcggttggcgtacataccgcccagcgcaccggtgtctacggcgacctttggcgcttcaccttcacctttcagcccgctcacgctgccatccgccgccacgcggtttgccccggcgataaccgttaacgctttcgcatgcagccgggcattaatctcggtggcgcgagaaatgattgataccgcatcgctctggctgccgtccagcccggcgccctcgatggtgacggcgcctttggtcacgtcaagcgattgcagcttaccgccggcatcgagcaccggcttacccgtggtgagcgttacattcggcgtgttgataaacccgcagccgttacaggtaatgccgtag

SEQ ID NO: 169611 - DNA, 126 bp, Enterobacter cloacae
atggcggtcaggttgtgtatgactggtatgagcattgcgccggaagtggcgcaaatggtagcgggcagtgtggtgacagagtggattatcgcctcacaggggaagatattcggcaattcctgctga

SEQ ID NO: 169612 - DNA, 1419 bp, Enterobacter cloacae
gtggtaatcgctttccgttgccgtcgtcagattcacgtcgcggcctgccgccacgccgatatcgccctgcgccgtcacgccagccgcctgcgcggacacgtcacgccctgcaaggatcgtggtgttgccgccgctggcaatctccgttccctgctggcgtacggattcgtcgataacggtttttttcttctcacggcggctcgcgctctgcgagctggcttccgccagcaggttcacgtcccgaccggcctgaatccccacatcgccttccgccgccatcgccgccgcccgggcattcacgtcgttgcccgcctgcaacgtcaggtcatcgccagcgctcagggtgctgccctgatgcgtgacggacgccgtctccgttgtcgcgcggttgcgcccggctcgtccctcgctcgtcgcaatctcgttggcggtgatgttgatatcattccccgccgccatggccaggctgccgcccgccgacacgtttgcgccggtcacgttgatatcctgtccggcgcgcatcgtcagcccgtcggtggcggcgatagaggccgccctgcccacatccgtgccgctaaaacgcacattgcccgcatcaacattccactgctgcgcgcgggtaacgttgttaatgctgcccgtgacgctctccagccctaccgttttaccgctgatggtggagccgatgttgttgatgtcccccagcgcgctcaggttcagcccgccgcctgcgctcagcagcccggcgttgaggttgctcaggctgttgctgctatcaatggacaggccattctgcgccacgatcgtactgccgctgttgataacgttgccgcccgccagttggacgttattgccgctgatgacgctgccgctgtgaacggtgacatccttcggcgacaggtacactttcgggatcatcaccgtctggccgttgatggttgccgcttcccaccacagcaggctgtggtcaagcgcggcaacctgggccgccgtgagcgccacgccaaatttcagccccagcgttttctgttgctctgcggcgctgtccatcaggtagcgcatctgatcgagatcggagccgatgccgttgatatagcggctgccggtctggttcagaatcgcgttgctgacgtagcgggtatcaaacaccgcgtcgccgaggaagcggtagtcgcgatccgggttcaggccgagcctgtcgaggaaataggccgagccgaggaactggttccgatcggtgtacgcggtgttggtttcacgcggtgcatcgccgggctttatgccgagcaggccatacagtccgtcaaacaggctgtcgtccatattgccgaggtcatcaagcttagggtttaccgtaatcagatacgggctgtcgggatcggtggacggcacgaaatagccgctattgccggacggtag

SEQ ID NO: 169613 - DNA, 399 bp, Enterobacter cloacae
atgctgacgctgccgcccgttgaaccgacggtgctgaagctctcgctctgggttgtaccctgctcgcgaagatcgtgggtagacttgctgctgccgatggtgaagccgatgccgcccgtgcccatcaggccggactttttggtctccttaaagcgccatgacgtgtcggtgttggtggccgccacgatgtccacgttgttgcctgcggacagcgccacgtcgccgtctccggcgaccgccgagcctgacacccgtaggttgttgcccgccgacaccgtcacgttgtcgccgctcagcagcgatcccttctcccgcgtcgcgctgtcttcctcgatggtgtgggtggtctttttgctgaggaacccttttttggtcttcgtctgctcctggaagtggtaa

SEQ ID NO: 169614 - DNA, 252 bp, Enterobacter cloacae
ttgacgtcccgcgctgcatcaagccgtacgtccttcccggccttaatctggctgcccgccacggtgatgtcgcttccggtagcctttatcgtgacgttattgcccgcgctcagggcgctgcctgtcgtcgtctcgctctccatatgcgatgaggatttggacgactgtgacccaatcgacgcgctgacgccgatggtgttgttattgcgtttgtcagagtcgcccttcgcctggtccagcgccacggcctga

SEQ ID NO: 169615 - DNA, 372 bp, Enterobacter cloacae
atgcgtccatttgctctgatgctgctgctgattttatcgggttgtcagatcgatccttataccttccagccccactggaccagcccggactggttcagcgcaggtaaagaagacgccatgaacggcgttgcggttaaagataaccagacgctggccgatagttttaacgacccgcaggtggatcgggctgaatatctccgagactacgccgacggacggaaaaaaatatgtgaagaaggctttattcacgcatggggattagcgggaaaatcattccctgccagctgtgccaacacggagaatgctgccaggctgcatgattcatggcaaacgggaatggataaaagcatgagttccaccagactgaattga

SEQ ID NO: 169616 - DNA, 537 bp, Enterobacter cloacae
atgaaaaatgcattcttgatcgctttgctccgactgacgctggcgctaatgctgctccttatggtgggccctgtcgccgctggcacgtttacggaaacggacaaatcggtacgttcgattgtttcaggaattgtgagctatacccgatggcccgcgctgtccggccagcctaaactctgcatctatgcctcttctcactatacccatgcgctcagcagtgaagatgagcaaaacccgttgccctatgtccctgtcattgtgcacagtgaccgggaagccctctccgcaacgtgtgatgccctttatttcgggactgaatccccagctaagcagctggaattaataagcgaataccagggccgggcgttactcttaatgtcagagcaaaatcctgaatgcgttattggtagcgcattttgtctgattatagagcacaaccaggtcaggttttccgtcaatctggatgccctaacgcgcagtggtgtcagagtcaatccggatgtattaatgctcgcacggaataagaagcatgaataa

SEQ ID NO: 169617 - DNA, 348 bp, Enterobacter cloacae
atgctactttccttccactttctgcaattatggcccgagctggagttgaagggtgtcacaggagccactggtaaaaatggcgcgattactcactactggctggaagtggatgattacgttattgatatcaccggggatcaatacaacatcatcaacgccagtaaactcaacgaagctatcgtaaaaaacaggccttttgtgcctgttcacgtcgctcatcgaaaggacagctatctctatgatttatttaaaatacaagggacagaactcttaacctatgggtttccgacaatcggtaaagattttattgatgagatggaatgtgattatcgccagcttgtcgggtga

SEQ ID NO: 169618 - DNA, 603 bp, Enterobacter cloacae
  misc_feature (364)..(373): n is a, c, g, or t
atgacttttgcacctgatgcaaggaagcggttacgtgatgttggcaggcgcgttaagtatctgatgcagccggggggaaagctgtaccattataacgactgggctgcacggtactgcgaacataccgccaggagtgctgctgtgatgcagttgtttatcactcctgactcaaccgttattacgctggaaacactggaagctgcattgttaatatcggaatggcaccttaatcattttattgtaaaaatggatgctgtccgagggccttcccattctgaaagagttatcaagtggcttgaaaataatcttgttaaaaatgggtcttatgattttttaaggcgagacatgatgcaagacatacatnnnnnnnnnnacatacatcgttcactcagaaaaaaagctgatcttgagcctgttctggaacagcttgctgatgaagggaaagtccagttgtgggaagacgcaagcggaaggcattatgtcaaatatcttgcttccgaaatgacaccttcagaactggatgaaaaacatagagcaatgaaaggtataccgcattatctcgggggaggtagcgctatcagtcgcgtccctttgagagaataa

SEQ ID NO: 169619 - DNA, 960 bp, Enterobacter cloacae
atgaaacttacccataaaaaaactgaaaatcatcatgttaatctgaacaccagagcaattttgactttttttcaacaaatcatttctttcatttatggcaaaaccagcgcggctgttgagcttatctttgcagccctccaggggagcatggctctggcctgccaggatatgtatgatgttgaaattgatgatgatattatcgttcctgtatcgcattttcacataatactggcaaggtccggaagcaaaaaaacgacggtatacaggctcatcatggcgcaaattcatcaaactgaacgtgagttggctgaggtgttttcagtcaagctgaaggagtatgaacggcaatacgtgctatgggatgaagaatgtaagagccttaagaaatcgcttcagaaagcagtgcgccagaaagagggagtggagacggccagaaatgaactggatgaatgtctcagaaatgaaccggttaagcctgtaagggtgcatctgacggtaacggatcccacgccggaagcccttctgaaagagctggggcaatactccagcttgggtatcacctctgacgagggaagtgcgctgcatgaaagcatcatgcggcgtaagatcgcaattcctaatacattgtggtgtggtgatgattatcgggtcagtcgtgcgtcaacgggtatcacagatattaaagatccccggctcggtatgctgttgatgacacagccggagccacatgacagcacactgaaatcactgggtaacacaatacgatctacgggaatttatgcgcgtacgttaaccatggatcttacgttgctcaccaaactaattgatattgatgagctggtttctggctatgagtccgacctggaaaagttttatgccattcagaaaaaacatttacttgccgggattgaacgcagaaaaaaaaaatcaacctcgtatctgtatgacttttgcacctga

SEQ ID NO: 169620 - DNA, 453 bp, Enterobacter cloacae
atgaattatgctttggtagtagacaatttggttatgaatattgtcctgtgggatggggtgtcagagattgaacagaatgaaggtaaatgggtggcatgtgctccacaagttggcatcggatggaactatcaaaaaaggaaatttatcaagccgtcagatcctgtcctgacgcaagaggagcaaatagaacttgccaatgagcaaaagcgtgagcttatagcgtcaatagtcgctcatatccaaagcaatatgtggaacacaaagttgtcgcttggcaggctttcagaagaggagaaagctagttttaacgcctatcttgattacatagatgcgctgattgaggtagatacttcgtctgctaccgatgtcgattgccgatggcaccagaagcgtaaatttgatcgaatgttctccatgcctatagttgcaaaacatactgattggtttatatag

SEQ ID NO: 169621 - DNA, 1125 bp, Enterobacter cloacae
atgacattactggaacaaatacagggctacgataatcacttcgttgaaagcatccgcactatgcatgccagcggtcttccgctggtgctgtacggcgcaggctgcctcgggcagatgaccgcggaatttatgttccgggaaaatatgcctctcgataaggtggcattaaaccgacagtacctgaccgagggcatgaccttccacggcctgccggtggtggcgattgaagatctcattgaacagcccggcgaatttaactgtatcgtggcgctacagtacgtaagcgaagcgttgcaggacgaattacgtcgcggtggcgccaacgtgctggtatacgatcccgcgtttatcggcgtaagcacccgtctatggtataccccgtcgttttgcgccgggcatagcgacgtcctcgaagaggtctatgcaggcctggcagacgaacgttcaagagaaacgctggtcgcattcctgaagcagcgtctgagcgcaacgcgtggcttttaccagacggtctacgagccagcgcactatttccctgccgatgttctccgtctacaggataacgaagtcttcatcgattgcggtgcctacaatggcgacagcatcggcgcgtttatgcaggaagtggagcgccagcaggtcgcgatgccggaaaaaattgtcggtttcgaaccggatgccggtaattatgctcagctttgtgacaatacgcgtcagtggccattctgccagccggtgcaaaaaggggtatgggataataaaaccgttctctcttttcagtcgggaaatgccctctcttcacgccttgtggagcaaagcagcaataccgtcaccattgagctggacagcatcgataatatcctccagggcggtaaagccacatttataaaaatggatgtcgaaggggcagagcttaaagcactggagggcgccgctgagactattcggacctggcagccgctgctggcaattagcctttatcataaaccggaagatctgctgactattccgcaatatattcagtcactcagcgcagattacgccttttatcttcgcggccatcatccggaactggcttttgaactggttttatatgctgtgccagcgtcgaggattataaagtaa

SEQ ID NO: 169622 - DNA, 1146 bp, Enterobacter cloacae
atgatccttgacgcgggctttgcctcactgcccttgcagcaggccattaaggcggcgggttttcgcacgctcgcctgtagcggaaaagcccaggacgcggggatgaaatatgccgacgcgacctgcgtgcaaaattatgccgacagcgacgccgtgctggcgattgcccgcactgaaaaaattaccgcgctttccccgggcgtaaccgacgtctcttacctgtctggctgtcgggtcgcgcaggcgctgggccttccaggcttcgacgagcccgacgtcagcgatcttctctttcttaaggaccgtttcaggaaatgggccagcgcccagggataccctatcccgcaggccgccggcagccttcaggaggcgcgcgctatggcgtttcccctgctggttaaacccgttgatgcctacagcggaaaggggatttcactgattcatcagccgtcagagctggatgaggcggtaaatatcgcccgtgcggcatcggcaggaggggagtgcgtcattgaaacgttctgccagggggccctgtacagtcactccgcctttatccggggtgggcaaatcgtctgcgaattttttgtcgatgagtactgcacggtctacccgtggcaggtgaatagcagctgcctgagcgtcaacctcagcgagccgatgcgcgatcgcatcagcgagtgcatgcaggccatcgtcagtgatttgaatctggtagacggtttgttgcatacccagcttatcgctgacgaagaggcgttttggctgattgaggttacccgccgctgccccggcgatctctactcgaagctgattgagttctcaacgggcatagattattgccgcgaatttgtcgccccctttatcggtgagcagagcgcgttcgcgcaccggcgaccggcgcgccagcgctacattgcgcgccatacggtctccagcgaacggcaaagccgtttcttcggctttagctacgcctcgctgccggccacggtcatgcaggttgtcccgcttaaacagccgggcgatgaactcgggcctgcccccggggatcgcgccgggctggtatttgcggagtttaccgaacttactgccatggcgcgctacacgccgcagctaaaaaactatttctcttttactacgttgtaa

SEQ ID NO: 169623 - DNA, 3351 bp, Enterobacter cloacae
gtgacgacactgtatccctactatcgggttagccctgagtccctccatgcctctgcgctgcttaatcacctggctgcaccgctgcccgcgtttgcccgcgtcctggagatgggctgcggatcggcaacgcgcctgataatgcattcctgggcgtaccccgagagtatcgccattggcgtggatattgatgaagaggctatccagaaagggcagcagcatgccgcagaattaggatgtcagaacgttgagctctttgccgcggggttaggtgatttactggctgccgatcccggcgaatttgattacatcattattcatcagacctttgcctttctggggaaaagcgagcgggaagccttgctgaagtggtgtcacgcgcatttatcggccagcggcgttatcgccataaaatggtccgtactgcccggcagttctgcgcgcctgacgctgggagaagcgttacggtttcatcttgaacgagcagaagagggaagcgacctgctggcatccgcccgcgccatgctcagctttatgctgttaacgctggaggagggcccgctcaggaatgaagtccggcttgctgaagaaatggacgacaacgcgctggttctggcctacttaagcccgaccgacggagcctgtacgcttgctgacttcagcgcgcaggcagaacagatgggcttgcagtatctgggtgacgtactgccgcagtcggagctgggaggctactataacccgacaacggaacggctgctggaggccgtcagcgacggtgccagcagaacgatggcacagcagtatcttgactacgccgtgcagcgagaagaacgcttcaccctgctgtgtcatctgaacgcgctctcgcctcctgccgaaccggatcttgaccagctcaaaaacctgcactgggccggcagctttgtgccggtggacgtggatcccgcaaaagcgccgcacgaattcagaaataataacggccgaatcattcgtaccgacaacgccattattatccgcatcatggaactgctgggtaacgcctggccaatgtccttaagcttcgaacagctggtgctcaactgccgtgcccctgaaaatcaggaggattaccagcagacggtatgggaagccctgaaaacgctgttcatgacctgcgctgatggcttcttctggagcgccgctcctggcgcatacaacgccgcgcggcatgatgagctggtgccggtggggcgactcccctccgggcgtcctgcagagaatatccccctcatgaacctgtggggagagtgggtctcattgactcccgacgagtggcattacctgcggtttgatatgaacagggcagggcaggcgaactgggaacactactcggcgctgaagattaaagggttgcttacgggctcgccggaggcctggaaaaaacagctccagcgtttcctgcgagcgggcatgctcgacgtgctgaaatcgcaactttctctgctgttgttattgagcgtcgagagggcgcagggcggaatgctgctgaaaggcaatgccgaacccgaattagccgatccggccgtcgatgcgatttacgagcgggcgaacggccttattcaaaaaggacgctctaaagaggcgcgggaatacgcccgcgaattaatggagaaaaaccccgacaatattcacgtgcttcgctgctactcaaaaacgtgcgtattgacctcggcctgggacgaggctctggcctcgctctgcaggctgatgggatattatttctccagccttgatatctattacgatcttgccacggtgctccagcgtaagcgtgaattttacggatcccggcagatcgtccgtaccttacttcgcctcaacaataagaatattgactactggctcagcctggcgtcgctgcatcatgcgtatggcgatatgtcgctggcagaaaaatgctgcagggaaattatgcgcttccagcaccctggccccagctcgcttggtcttaccggcatcgttctgagtgacaatcataaaatggccgaggcgcgctatttcatggaaaaggccgtcgagctcagtaactacaattttggttacttcagcaatttactcttcgtgatgagtcacgacgccagcgtgaaggcggatgaactgctggaaaggcatctggaatttggtcgtcgcgcttcagcctgggctaaggagagcggggtaaagcttgcgctcggcaattcccgggagcctcagcgcaggctccggctcggctttgtttccggtgatttgcgcaagcaccccgtggccaatttcctgctgccttactgggacgccatcaatcgtgaacaatatgatttggttgcctataacacccttttcctcgaagaggatgacgtttactgccaccttcgcgagagcgctaccctgtggcgccaggtggatgccatcagcgataccgagctggcgaagctgatagcggaagacgggatcgatattctgttcgatttatcgggccataccgcctacaaccggctaccggtcttcgccctgcgtccggccccgatccagataacctggataggctatcccggcacgaccggtatgaaggagatggattatattctgctttcatcgagcctggcgcagtcgccggcgcttgaagaacagctggtggaaaacgcgatgttcgtcgcaacgcgtaagagcttccagccccatccgcgaagcccggacattaacccgttgcccgcgcttcgcaacggctatattacgtttgccagctttaaccgttctaaaaaaataaacgaccaggttctggacgcgtgggccgctattttacagggctatcctgagggtcgcttgttaatcggtaacatgaccgacgccgaaatgatcgcggccatgacaaaacgtctcaggcagcgtggtatttctcaggaccggctgcttttcagagggctggtcgaactggacgagtacctggccctgcatcatgaaattgatattttgctcgatgcattcccctacagcggcggaacgaccacgcatcacggggcgtggatgggcgtgccgacattgacgatgaatggcccaaccataccttgccagcagggcgtcgatattatgcgttcttacgggctggagcagtttattgcggcagatgaagccgattatatttccagggccaccggctggagtaaacgtattcccgagctggctgaaatacgtcaggggatgcgggagcggatcccggtcgaccatatacccgattttaatgttgctgaaaactttgaacgggcgctgcgcgaagcgtgggggatctattgccgtggagaaaaaccgcatgccttcctcattgctgaagagcgcgcataa

SEQ ID NO: 169624 - DNA, 1395 bp, Enterobacter cloacae
atgagtgaattcgcacgtagccgggctatgcgtcagttttatcgggatgtttttacccggtttatcgatctcccggaagccgacgttatgcccgcaaacatcgcggcggaaatcttcagttttaagagcgccaatattaccgccctcgagccgacgatccgtgcggcagaaacggggctggaggcggaaaaagatgcggccttaaaaaatatgctgtgcgcgatcgtgctggccaacggcgcgctgaatgacgcccgcactggcgaaggagaggcattatccgcagaccagcgcgcccggcttaccgaatatatcgtctcggccctaaaagccgacagcaatattaattatcttgtcgccgccattcagctgttattccgggtgaatgaaatcagttcagcgctatttttgataaacaataacctttcgctggtaagcagctcggccccggtactgaaaatcctgctgctgatctgcttaatggaaaacgacttcaaccaggcgatggtggtgatccaggcgctgaccgcggatgcgtcgttgattggcgaagatcccatggctctgctgatgatcgcctgtgggatctacaggctcgggggcattccggattcttacatcgatttccgatcgctgaacgcaagtgaaggcgtggtgaaggcgggagcctttgaaaactggattgaaaaaacctcagccggtaaaacgacggtgttgttaacctgcgatagcgaggagtatttcgaacacgccgtaccgatgctgtactccctgtatgacaccaaccgcgacgtgctggatgttcacctgcatctttttaacggtagcgacgcggttaaagcaagcctgacggcgcttcgggaacagcttccggaacttaacctctctgccagccatgaaaaaatagccagtaacgcggacgcgtcggtagtcagcgctgcccgtcgtatcgttttcctgcgccatgccctggcgaccttcaatacgcccgttattgccataaacacgaatgtgctggtgcgcaagccctggacggagcccgacgcgccgctgctgctgttgcagaccgaagccgctcctttctgggaggaggtctttgccggtttcatctacgccagacccggcggcgtcgcgcagcgctatctcgaccgggtggcgcactttatcgacgataacctcgccagcggcaactacgcgccgggcctggagcaggttgcactcttttcctgtctggactgcctgtcgccagaggaccatcgcgccatcacgcgagccgagcgtcgcgtaatgctggacagcgaggcgggtgaagaggcgttcagctgggtgacgataaaggaagaagggtcatgtcaggcctataaatcggcgctcatccgccagtaccagcgctga

SEQ ID NO: 169625 - DNA, 390 bp, Enterobacter cloacae
atgcagcatgatattacccacatcctgactgacctgatcggcggcacgacgccgctgcgtcaggtgcatttcgccaaccccgccctctgcgcacccgagctcgccctgcaggtcgatttcccccgtctggagatcgtgctcgaaggctcggtgaaagacccggcggcttgcgtattacagcagggtgacgttttatacgtcccggctggcggctggaacgatccgcaatggcacacgcccgcgacaacgctgagcatcctgtttggcaaacagcagcttggatttagccttttgcactgggacggcgtagacgttcgtaacctagcaaaacagcacgtcgcccgtcgggggtccccgcatcggctccttcctgctacagacgcttcatga

SEQ ID NO: 169626 - DNA, 513 bp, Enterobacter cloacae
atggcgagtatgcgtgcaaacccttttgaggccttttccatggttatgaccctcccctttctgctgacctatttttcactgacggctgtccttatacgtgcagacattcgcaccgggcttcttcctgataaatttctctgcccgctgctttgggtgggcctgctctatcagctctgtctccacccagattttctgccgagtgcagtggtgggtgcgatggcgggatatgccgggtttgccgctgtctattggggctatcggctactctgccggcgtgaagggatgggctacggcgatattaaatatctggcggcgctcggcgcgtggcatggctggtgcgtactgccgatgctggcattggtagcggcgctgttagcgctactttccttcctgtgtctctcgttgcttacccctgataagcaaacattaaaaaacccgctgccttttgggccatttctggcggcagcgggtttatgcgtcggttgggaaaacctgattaattttccactttga

SEQ ID NO: 169627 - DNA, 843 bp, Enterobacter cloacae
atgaaaaaattttttttattaatttatattgtaactcaatatgccaatgcagcgacgcttcaatgtgaaaactataaagcttcccgcatgaatagcccttttgtttcaagctccgtcaatgccctcacaaatgttgaggtcaagactatcgcggtgggaacccccaaggtcaaaaatttccacataactattacttacccggatgccaatgttggtttggccctcgctggaaactacgtacatatatatcctaatatagatgataaacagtctgcaccgctaattatcggagaaaggcttacaggtttaactggccagacaataagcattccatgtacatcacccgattcaaacggttgcgctatattaaaacacaactgggccccaatagtttctgctagcccttcctctgccacccttgcttcaattgatcgtaacgtaactgtacccgagagattaaatagaatgtcaacggaattaacaatcacctcaaacaatgttcaggtaccaagcacgaccgttacaggaaaccaatctgttttgtttggtgaattgaccgtagaagattcattaaccattccagataaaatagatattggctcgctgactgcaggtgaaaacaaaaatgcaggcatatttatagactatacaactaacacaaacaatttagatgtacgtctaagcccgtcgtatgacatatcagccccacttacagtaaacgagaagcaggtctacggtccaacatctttcaagccaccgttttccataggtttatatgttatgacatcagcccagcccggtaccaaatctgccaatgtaatcgcgtcctggacatgtccatga

SEQ ID NO: 169628 - DNA, 534 bp, Enterobacter cloacae
atgcaaagttatgagactctccgaagaattatttacggaatggttatgggatacacttttttaagttcccctttaaatgcagctaacattacatcgacgcaatttactataactggagttctggaggcgaagacatgtgcatttaatgaaacatcttcttcggttacccttcctgaagtggatacgctcagtttgaatagcagtaattccattcaaggaagtacatttttcccattatcatttaattgcaacggcggtgtaacatcgataagcatcaaaccatatggctctgctgtttcaaacggtgacaaaacattattcttaaacaccaactcagcgaaaaacgttggacttagactattagataaatatgggaacattctcacaccagatggacagacagaggtgacatttaattaccaagggtccagcgataaatatacattcaccgcgggatatgcggctacaggcagtggtcgcgtcagtggcggaacttttcaatccatggtgatcttcaccatgacttatagttaa

SEQ ID NO: 169629 - DNA, 696 bp, Enterobacter cloacae
atgttttataatttattcggcaaagcactgccgggcttattcttaagcgttacgattcttttttcgcaactcgctttagcagaaggaatagttctgggcggaacacgacttgtttatcccttagaagccaaacaatcaacgttgtctgttcgtaattcgtcaaaagaaaccagctatcttgttcagtcctgggcggagaatgcacagggtaacaaatccactgactttattattactcctccgctatatgtaagtaaccctggcgaccaaaatatgttacgtgtaattttcagtggtccttccctaccacaagacagagaaacgttgtactacttcaacgcgaaggcaattccgtcagttgacaaatcaaagatggaagggaaaaacacacttatgctcgcagctgttacgcgcatcaaaatgtttgtacgcccctctggtctcgatgttcctgtcgaaaaggcaccatcgatgctgacctttaaacggagcgggaaccaagtgcaaatcagcaatccttccccctatcacataactatggttcaggtcgcactcgatggtcgcaaggttgctgacataatggtggcgccatttagtactgaatccctgtcagtatcaggaaatcctcgaatgctgacctacagcacaataaacgactacggtgcggtttctgctcagcaaaagcaaagtctgtaa

SEQ ID NO: 169630 - DNA, 555 bp, Enterobacter cloacae
  misc_feature (453)..(462): n is a, c, g, or t
atgaaaaatattttctctatagcatctattgcttccattgttatggtttctgcgtccgcgtatgcagcatcagaagggcaacgtagcacagtagaatttaccggttcaataaaagaaaacacctgcgtactcaatagttcatccgtcggacaagtggtacctctaggagaggttgagtccagcgtgttgtcaacgcagggctctgtatcgcaacacaaaacattcagaatcatactagatcaatgcaatctagctagcgcctccatcaccttccagggaattgctgaggctgctgacgtacttcgggtcactggtaccggcacagtggctgatggagtaggtattcagattttagatatggataacaatgccactccgttaaaaattgacggttcatctccaacagcacttaaaaccgtcggaacaggtggttctgatgaattcttttttgcnnnnnnnnnnttcttttttgctgctcgatacatcgcgtttaaaaataacataacagctggcgaagcaaacggcactgttaattttagagtgaattacgagtaa

SEQ ID NO: 169631 - DNA, 345 bp, Enterobacter cloacae
atgaccaccattcatgcatcaacgccatccgttcagagccaaagcaccggcagcagcggaaatgtgagcggcaacgatatctccgcacaaatcatgcggatcacgaagcagatcacaaagctgactcagcagttaaaagagcttgccgatagctccgccagcgcagaagaaaagaaaaagcagcaggagctgatccagacgcaaatcaaaatgctacaggcgcagctggcacaattgcagcgccagcaggccgaagaagcgcagaaaaagcaggagcaaatgctgggtaaagccgaaggggttaatcacccttccgacgatcgtcagattgatgtctatatctga

SEQ ID NO: 169632 - DNA, 1092 bp, Enterobacter cloacae
atgaaactaaaaaaacacttcgtggcaatatttgtggtggccgcaggtttaactggctatcacttatacggtggatatccgccaaaattaaaattaacagcacaggaggctagcgtggtgaatacttttctggataatatgacgacccgctgtataggacgctatttgattgatattcctcaagcatattcggtaacgagtgataatattctggcatttataaatgaggcatcagtaaaaacgaaaagactataccgtccggcatttgagcagaaaatccgactcagggaagaagccttaaggaaagagaaaactgttaatccacaggatatgccttatcttaaacaggtctatccattaccgatagggatggagggggttgtttttgaaagaaacgaaagcgactcagtgcccgatgttggtcggatattagaagcacacctttatacaaatggtgttgcagtggaaattgctatgaaagcagataatggttctgctaagcgttatactgaaagacgtggtaaatatcctgagctttatggtaatacagttcctgagaaactggctgagttgatccagttgctgaaaaggatatcaggaaaaaaggatacggaaattccacagcaggcagggttttgccttccggaagtttttattgcagatggtttaggagagaataaggaagagcttgatataacttacacttcaaataaatatcctcgggctgattttgatttttcgacggacaatttcaataaagccgaagacactatgctggacagaagtgctgagatggacaaagttataacagcagcggaaggccgaaccattcaaaaaggaaagcggaaaatcaatggcctttatacggaggaatggctggttttcgggaatataagtaatgatgaaaaagggctgcgttttgtgtttcattctaatgagaatgtaactcagcctgagtcaccctggatgtatattagttttttacaacgaggtctgtcgggtaatcatcagttgacagaaaatgaagcagtaagcacctgggagaacattaccggtacgttgaggttgcgccctggggcatttcgtaagtga

SEQ ID NO: 169633 - DNA, 1605 bp, Enterobacter cloacae
atgaaagatactgatgaaataataaaaatttatccaacatatgataaagctggaaatgcacagtacgatctgcatagccaaccaaaagggagtgagctcgttcagcaatgtattgtgtatccagaacgggtgatacccgttgtttttattccaggggtaatggggagtaacctcaaaagcaatcgtaagaatggccagaaaatctggaatcttgacagcacggcgagtattgctttcacatggcttggtgcaagtgctgtcattcggaaaaagaaactcgatccgtcattaaccgaagtagatgatagcggtaaggttgatgaaaaagaggagaccttactgctgaaaacccgccgggagagggggtggggaagtgtggcatatacaagctatgctccctttctttcttggttgcaggatgaattgaatgatttcgaggccacgggagaacgcggtaaactgctgaccaaaacgcaattgatggattctggggatatttcgctgcaacaagaagacattgatttaacctaccgatatatctatccagtttttgcggtgggatataactggctccagtcgaatgcggattcagccaaagatctggcagccaaaatagacaaagagataatccaattttaccagaagaaagggcgaaaatgtgaaaaagtgatcctgattacgcattcaatgggaggattagttgcccgccattacacccagaacctagggggagaaacaaaagtactgggcgtagtgcacggggtgatgccagccttgggggccgcagccacctatcgcagaatgaaagcagggacggaatatccggaagggagcattgagggatgggcaacttcacagactctggggggcaatgcggaagccatgactgctatactatcacaggctcccggcccgatgcagctactgccagggagggattatggtatgcgatggttgaagataatggatgggaaggatgtgcatttctatccaaaagaggatccttacagtgaaatttatctacagagagataagtggtggggtctctgtgaagcgcagttaattaatccgggagttagagctactcagaaagaacaagaccaaagttgggctaatttcgccaaaattatagatcgaacagtaagtccatttatagaagaactttctgggaaatatcattccaatacctatgccttttacagttgtgaatcatcattcgcatcatatggcgatattatctggcagtcaaaaaccccagtaatagaacagtggatgaaccgggggcgtagccgaaggccggaagatggacgtgcactggataaaaccgaaaactcaaccagtcgtagtgtctcaactccactggacggaaaaggatgggcacagggaatctatcagacctggaaacttctacccccgcaagaacccggtgatggtactgtgccggaacgttccggaagaattgccgggcatcatttacgggcccgctaccctgtttccgtgcaacacgaacccgcttatcaacatgtgctggcacagcaattcacgctgcgggcattggtgaaaattatccaggatgtgaagcagacgacactggcttattcatga

SEQ ID NO: 169634 - DNA, 1800 bp, Enterobacter cloacae
gtggcggaagccagcgtcaccacgaaagactataaccatcgtgaagcgcagtatcttttgcagtccgctccggcagatatgacgcgcggcgatggcgacgggattaactatggtgaggtataccattatcatcttcgtcatcttgagcagggtgataaaattgacccgacgccagagacggccaacttttatgcccgcctcgaccatgagcgttttctggcggagcaggtgcggataacgggcaacagtacggacgccacgctggcacccgcgcaggttctgaccattaccgatagtcttccgccaacgctgcctgcgccgctgcacaatcctgtgctgctcaccggtgtcggttttaccgcgagtcgtaaggaagccctgcaggttgttctgaagggggtgccctacagtgaggttatctgctggcgtcctcctttacttccgcggccgaaagtcaccggcaccatgaccgcccgagtgaccagtgcaaaagaaggggatatctacgcctggcaggatgcatcaggcctgtaccgggtgaaatttgatgctgacctggatgacaaaaatccgggccaggaaagtatgccggtgcgtctggcgaagccttacggcggcgacgtgtacggttttcacttcccgctgatacagggaacggaggtggcgatagcgttccacgaaggcgaccccgaccgtccgtatatcgcccatgccctgcatgattcccgccatgttgaccatgtgacggagaagaacagcacccgaaatgtgatccgcactgctgcgtttaacaaactgcggatggaagacaaacggggtgaggaacatatcaagctcagtaccgaatatgggggtaagacgcagcttaatttaggtcacaacgtcaatgcgtccagggagcttcggggggaaggtgctgagctgcgtaccgacaggcatgtttccattcgtggtggggctggtgtgtttatcacggctgatacgcagtcttcagctaagggaatgatgctagatatggcagcagctttaagccaactggagcaggctcagaatctgacagagtcgttaaatagtgcagcagagacggcaagggcagaactggcagatttacaaatacagaaggctttgctaagtgacacactgcgagacctcaaaaaagcagctttactgttatctgccccagaaggcattgcacaggtgacaccgaaaactttgcaattatccgcaggagaaaatatcacggcgaccagtggtgggaatacagattttagtattctgaaaaaactgactgttgctgcgggtgaattaatcagtctgtatgcccaaaaaaagggggtaaaattatttgctggtaaagggaagatggaaattcaggcgcagaatgatgagatgacgttggatgctctgaaggatgttcgaatcagtagcagtgaagggaaaatagtcattagtgcgaaaaaggagataattttgtgtggtagcggtggagcctatatcagaattggtgatggagtagtggaaagcggggcaccggataagattattgagcgagcagccgtgtggcaaaaatttacagggcaaagcaccagtcaaatgttgaatcaatatcaacagggtaattatgaagtgcagccaactctggtttggtgtgggacaaagactcctgtatctaatcgccagacggtattggatagcgatatgggggtaattgctgaaaagacgacatctgatggcaatacatccagacagaattttaatgcagtcagtagtgttcgcctcaccgtgaataaagagagttga

SEQ ID NO: 169635 - DNA, 744 bp, Enterobacter cloacae
atgagtctgaaagatacgctttcaaatattatccctcccccattgaatcgctaccatttaaatattccttcctgtccgtcaccgctggatgttgagcatttcagcggcagggaggggctgagtcagacctattattacatcatcaattttaccagtactgacaactatctggatgccagcctgctgctgcgtaaatcagcaacatttacattgggtacgggagtgcttcaggatctggtgaaccagaaagcagtacacggtgtcatcaccgattttcgccgcatatcgggctctgccgaccaggcaaaatatcaggttacactggaaccttcccttaagctgctggacaaacagcatcgttcccaccgatttttcgttaataaatcggtgcctgaggtagtgacagaagttctccaggagcacggccttaaaggctgggagtttgaattcaggctcaaaaaaacttacccgaaacgcgagcagattaaccagtatcaggaaagcgatctgacatttatccagcgtcttctggcggaggtgggaattttttattttttcaccctgcaaccggatacgcagacggaagtggtgcattttggcgatagtcaggcagctctgacgtttgacaagacgctggcgataaatagcccgtccggcatgaatgataacggggcggattcagtgtggggggctgaatgttacgcacaacgtggcggaagccagcgtcaccacgaaagactataa

SEQ ID NO: 169636 - DNA, 642 bp, Enterobacter cloacae
atggacagtgctaaagaaatagccagagatatgttggaggccattaatattaaaggcgatggctttcttggggccgtcgggaaaggtatcatttctttaccggtcagtctcggttatatggggtatgattttatagatactgagcaccggcgtgagaatcaggatgacaaattcaggatggccaggttagtaaaaacaatgactttcaatagagatcttattgaaaaggttattagtccattcatggaggattttgcatcgcgtattgatatggaaaagatttctaccattattagtaatgtaggcggagaaattatagggaaggtcttttttgctcagcttaccgggattaatcttggaagggctatatcctcacgcggcgtgtctgcatttttctcgggttatatgtcagggctactgctggcgattggcggtgaggtatcaagagccatttatacatcaagacaacttaagggaagaaatatcgtattgcataataaattacagtgtatgggggatttagatcttttgtattttcttgttgaggatattgttaaaccttttgaaaaggcttgcgagatcagcaatgcagacaaggaaaagtttaacagaatatgtgagcattttttcggtggtctatga

SEQ ID NO: 169637 - DNA, 525 bp, Enterobacter cloacae
atgcggagttggctgatatcgttatctttaaggacggggttctctttaatgcagggtgatttttctaatgaaatattgatggttaatgaattcagaaaatacctgcaatctaataattggcaggtagtacagcttgtatgctcaggtgggcaggcccatttgagcatatcctataaggataatggtaaaaataagacagtttttccggatgttatcgctataagggggaaaatgattttagtcggagaaatcaaaggtcgttataattatagcgatgaacttaaactgctcgaaataaaaaaatcttcattggcgcaagaacgattgattaaaaatatagctatgagatttggtttggaaaaaaatgaactgtatgcagagtttgcattgataaactcatcttttgatccagttcaaccctcttctttgtttcagtttgtatttgaggggagaatttttgtattaattcatcccaatggaagtgtaggtcatgaattttctgattttttttgtgtaaccctttga

SEQ ID NO: 169638 - DNA, 1152 bp, Enterobacter cloacae
atggaaataatcgtttattatgaaggcgatgaatcagtaaaatcttggttttcatctttggttgatatggatgtgacatataaaaaaatgcctagcaggaatgatactagtgaatatactgaccttcccgcatatgtatccgatattttatatcttgataagcctgacctaatcgtgtccatgcaacatgatggccatgaaaagccgttgctttcaattgaatttgcttgttgtacgccacaataccagcattcactacagagattttcaagaatgctggcgtcaattagcagtggctgcccgagtattctgattataccctccattaaaagagaaaactctggggagagaatatacaaacggagtgttgcgatagagtatggtgcggttagattaatggatgtttttaaaacaccatgttttgttctggattggccttcggatgaaaatcatttcttaattaatgaaaaaaatactcaatatcctttaattgatagtaaagggattcagtatctaaagcaatttatatttgagtgtgtcaaatctcgcgaagatataaattatatcgagtcgttatcaaaaaagaaactagttagtacacttactgatatgattcgtacaaacgcatacagagcaggagtcccttcaatttctaatccgggcggtggagataaaaattccacagttaaacttgagcttattgatactcaagagctaataaacaaaatcagtgcaagctcaccattacataaagcactatgctcgaaaatcccttcttatattttagataggaaggagtcattggtgttttatccaactagaataacagctcatgcaggcgatccttatgttggtatgattggatattatgatattgctttcgcaaggtttggaaaaagtacgagggaaagataccataatatggttgcttatgcagagaatgtatctataaaagaaattactgatgttatgggtaagttcgttgcgaagtcatgtccatttaataatccgtttgaaccaaaaaatgctaaaacatacaattatcatatgcgatatggatgtaaggaaacaaaatcaaagcctgtaaggatttatgcggagttggctgatatcgttatctttaaggacggggttctctttaatgcagggtga

SEQ ID NO: 169639 - DNA, 174 bp, Enterobacter cloacae
atgagctgttcaattaaccagcaatggtcatatcttatttctgaattacgttattttgcttttgtgacgccagcgatatatctcaacttattgtttatattgaaaaataacagacacaaaaaagccgcccgcggaatattttccgcagacgggtttatctcaaaaaataattaa

SEQ ID NO: 169640 - DNA, 774 bp, Enterobacter cloacae
atggagttcaatgctgtttataactcagcatctataatggatgtaactcccttcttgcaaccgattgttaatgttttagatggcacgcttgcaggcgtagaaattctttgtcgggttgagacaaataaaggttacatcctaaatcaatttcaaatagaagaactcgaagctccgggtcgagcagatttctacgccaggcaattgttacttaaaacagttgagcaactgagtcgatataatgctataggaaatataccgcaagggtttattttcacattgaacataactgcatcacagattatgtcagaagcgatgaagaaagagatcgtcagatttaaacattgcttcccttcaaatgttgaagtgttgcttgagatcgtcgaaagaaatgttatggatttaacggaagggttaatcgaatcaatcgctttttatgattcaattggtgtaaaaattgctattgatgatgcagggataaactccgcagcaatgcgatactttggaatcactaacgttgcgatgctgaaactagatcgttctgtaactcgtatcactgaaaaaaacgaattaatacacaagaaactagttaacagtatagtaagtctatcgagtttttgtgatgtaaaagttattgctgaaggagtcgaaaattctaaccagcaacatgcacttgaagagtgtggcatttctttaatgcaaggtttttattactcaaagccagttccggttaaagagttttgcattttgttaagtaaatttggaggccagggataa

SEQ ID NO: 169641 - DNA, 597 bp, Enterobacter cloacae
atgcgaaagaatgttaaaatcatatctgacgattactattatattagaggtttacagtctctatttaatggtaaacgatatttgaatgttacatgttattacctgtacgatctgactcgtggtgggttaatagatattttccttacgtcagccaggactatggatgatgttgttcttttagctgtggatgatttaaatatcattaaggaaatatcttgcttagataacaccaatgtaatctactctattcgaacccttagtaaaaacgacatggttcttttttacaaagattctttggttatcgatcgatatatttctctggatcggctgaacagactttttatcaaaactcctgctattttatccaggactgaagcatctttgtcgaaaaaagaggagatggttatttttaactattttggactcacttttaaacgatttagctatttacagaaggatattgagcgaaagagagtaagttattataagcgctctgcttatcagaaatttagagtgtctggagatggagctgcatactctatagtcaaagctttatgtcatataaggccaatggttcgtcagcgcgttgatttataa

SEQ ID NO: 169642 - DNA, 1116 bp, Enterobacter cloacae
atgaaagagtataaaatcattgatttgttttctggtgcagggggcatgagtactggctttagcatggctggatttaacatatcagcttcaattgagcttatgcctgtatacgcaaaaacacattctcttaacttccctgagtgtaagagtttatctggcgatataaccaagatttccccagaggaattctctgagaaaacacagatttcatgtaatactccaacaataataattggagggcctccatgtcaaactttttctagtattggtcgatcaaaaattgagtcaatatctagcaaagatattaagcatgatccaagaaactatttattcaaaaattactttgattatgtttcttatttcaaacccgatgtgtttgtcatggagaatgttcctaatttaaaaactaaatacaatggcgaaattttcaagaaaatactctctatttgtagcgagttaggttatgaaattagttatgatatcttggatgcatcacattatggtgttccgcagaaaagaaaacgattattcatagtaggcagtaaattaggaaagtttgttttcccgactgcaagatttatacaaaacccaagaactgtttatgacgcaatagctgatttgccaattatttatgatggaattcgagcaggaaatcttccttattccttaaataataacttgactgattttcaagtggcgataagaaatagcactggagttgttggtaataacatctgtagggtttcaaacgagagagctaagaaggttttccctcacatgaaacagggtgataaatatatggatcttgatccaagcattagaaatatattgccttttaatgaggggagatttcaggatagattaaaacgattggatatgaataaaccatcgtggactgttcttgctcacataggtatggatggatatagatatattcaccctactgaaaatagaactctttctgttagagaagcagctagaatacaaagcttccctgattattttaattttatcggtaatatgagagagcagtatattcaagtaggtaattctgttcccccgttactagctaagtctattgctgagaaagtgaaagaattatgcaaaaaaaaataa

SEQ ID NO: 169643 - DNA, 852 bp, Enterobacter cloacae
atgttatatatttttaatgataaggttgtttatgatgatactcagtgttctttaaccaacattgatactaatgatacaatactgctcccggctacagcctcgcggttgttatcactattcattaaatatcaaggaactacgttaactcgcaccgaaattttaaacagtgtctgggatgaatacggatataaggcctcgaacaatactctttcacaatacatatcccttatccgtaaaaactttcaacttcttggagacaatactgaatttctgataactataccgcggactggatttgtgctgacaacgaaagtcgaagtcaggctagttgaaagcttaactgatgcgtcttcttttgtgtctacattggataaccctttgacacctcttgaacattcggagtcgttagcttctttccataccgaacataccgataattcattaattatgacaaaagataatctcagttctttattgaaagaaaatgatattaaatactttcattatattaatgtgctttcattcatcatactttgctctgtcctgcttttattttacttatatagaggggagattaaaactacgaaactttatctggccggaaaaattgactcctgctcagtttacacgctttataaaagctcgaaggatttaatcggttctaaattagtcaccattgaacatattgctaaagataaattaccatgcgtcgctaataacttctatatctcacaacttgaagacagtctgctttatgataaaacaggtcggttatttattagccgatgtggttatcaggataatatatctaaagttatctctacctgtaagagcctttttactcatgaataa

SEQ ID NO: 169644 - DNA, 234 bp, Enterobacter cloacae
atgctcggcttcgtaaagtgcgcagacggcagcggcgcaacggcggcaagctggccgtgcttcttgcgcagctcctcaatcgggccgaagtccagcgcgcgcagcgggcaggactcgacgcagatcggctttttgccgtccgccacgcggctgtggcagccgtcgcacttggtcatgtggcctttggcggcgttgtactgcggcgcgccgtacgggcaggccatgtggcagtag

SEQ ID NO: 169645 - DNA, 978 bp, Enterobacter cloacae
gtggtgaatacatttctggatgagatgacgactcgctgtgttggccgctacctgattgatatgcctgaatcattttcggtcacaaatgataatataaaggcttttattaatgaggcgccggtaaaaacagtaaggatttaccgcacggcattcgagcagaaaatcaggctcagggaagaaaccttgaggcaggagaaaaccgttaatccgcaggacatgccttatcttaaacagatctatccgttaccggcagggatggaaggggttgtttttgaaagaaacaggagtatttctatgccggattctgctcgtacattagaagcacttgtttacactaatggtgtggcggttgagattgaaatgaaggcaagaaatggattatcctcccgatatgatgatgatagaaaagatataccggagatttatggtaatacagttcctgagaaactggctgagttgatccagttgctcaaaaggataacaggtaaaaaggatacggaaattccacagcaggcagggttttgccttccggaagtttttatcgcagatggtttaggagagaataaggaagagcttcatataacttacacttcaaataaatatcctcgggctgattttgatttttcgacggacaatttcaataaagccgatgacactatgctggacagaagtgctgagatggacgaaattataacagcagcggaaggccgaaccatacaaaaaggaaaacggaaaatcaatggcctttatacggaggagtggatggttttcgggaatataaataatgatgaaaaagggctgcgttttgtgtttcattctaatgagaatgtaactcagcctgagtcaccctggatgtatattagttttttgcaacgaggtctgtcgggtaatcatcagttgacagaaaatgaagcagtaagcacctgggagaatattaccggtacgttgaggttgcgcccgggagcgtatcataagtaa

SEQ ID NO: 169646 - DNA, 4419 bp, Enterobacter cloacae
  misc_feature (3417)..(3426): n is a, c, g, or t
ttgccaaatctgggggggtaccaaggcgaatttggtccacaaaaagcgcgtaagccttgtgaatatttgcaagtgttcacaccattttttagaggtaaggatttcaagccttcaagtttttcattcaataatttccaaattgttggagaagcaacttttcctcatcctgatggattgtacaaagaatacaaatctgtcaaaaaggatgaccaacgacatgaagcattgttaagacgatgggatttctcagcattatctggcatcgcagatactattgatgaacgagcccgtatagcattgcgagaacataaagttctaggtttcattcatgagcaaaatgaacaacttgatagcgtagttttgcaacctctatcgcatccaactcgagatgatatagatgctgacttctgtgaactatatagactaccgtcgagacaattaagacttaatgaattcattcaacgctttggtgaagatctagatttctgtgaaaggattaactttgtaaaggtgcttttatcccacgcagccgatttacatgacttgggcgttgctcatcgggatattagcgatcataccatttggttagaacggccatctaaaatatctatatcaggtttcctgactgcatatttccctgaattaggaacagttggttctcttcgtgatcagcttcgtgcaagcaaaactattttacctgaggattccgaaattggtcaaggtgaagcgagcgatccattccgtagagatgtttatttattggctgtagttatacatcatattttatttttacaagtacccaagcaagaagactccttatttgtttggaatagtccagctaattttgaaattgatccacagcttagcacttggtttgaaactgctttggatttaattcccgcaggacgattttcagatgcgcgaacgatgcttgattcgtttaatatcttacctttaggatatccggaaaaaacaggtattgacttacgtagattcgagccttatcgaagtgagttgattccaatggttatttatcctattgaggaaaatataaaacagggcataagtcatttatataagtcgactttttctggtgagagtgtttcggttaaagtatggtatgggaggaaaccagatataaaacgaccggaagaggctttacaacttcagaattttcttgataaagctcgcctaataaaatctcagccctgttcttctcttgctgaagttattgattttggtatttcagatgcaggaacctatttagtccaaaaatggttgaatggggaatttctaaatgacgctgtcaaatcatgtcatgttggccgtgaattgatattactatgcaaaaaaatagttagggcagtgttacatttacatgctatgcagttacaacatggggatctgcaccctaacaatattttaatagaagagggagatgttcgcttcattgatgcacttgatataccttgttcaggtgataatataatattcactcctgcatatgtgcctacagattacgaatctttgcctatggaggaacgtgattgctacgctgtagccaaagtttgtaatgagattttagaacacgacgttaactgggaagggattgatccatcagctttactaaatgagatcagaagttgtatgggacgggattttaaaatttattctcttgaccgaataaatgatgaaatagagatattaatcaaccctccacaaataaatgagggagtgaggctatcagtattaatgaggcaactgacctccagccaggaattaataaatgacaatggtgtataccatatcagtattagtgaagaacgagtccgttcgccaaagcagcagcctcatattatcgtagcttttgcaggagtacgtaaacagttacaagtctatcttaaagcgacccaattagattttgcatttttacggaccaaagatatagctcatagcttatttgtacgaatggcatcacaagccattacacaactcgaagctagtatactattcgaaccctcatccgcggatgaccctaacaagttattagaacatgtaaaaaaaatacctgaggttatctctgcaatatcgagaattcagaatagaattctcggtggcgatcttccttctgatgaggaagaaattgagaactcagaaactctaactgtttctcaaacaagaccacatacagcatcactttggcgtgcaattttagatgcagaagaagattccttacctgaaattgaaatcacctcatcagttgtcagggatatggataagcgtcatgagaaactgcgaataccttacagaaaagagggggagtctttagactatgaatcagatgcaaaagttgaggcattacaagaaataaacggtgaactgattcgcgtagggaatgttgatataagagagactacccaatctactctcgtacttgaaaatccaaagattcgtattcagactaatattggcgatactttgaaattacgaagtcaacaagatctatcatcttttattcgtaggcgtcatgcagttacacgtattttaaatgccgaatcggctatcccctcattaatcaattactttgatccattaacttgccctcatccacaatatctacaaccggagccaactgattctgatcttgatgcttataaccgatatgataaagatggagagctatctttttcactcaatcgacagcaacgagatgccttttctaaactttggtcatacggcccattgagtcttttgcaaggccctccaggcactggtaaaacttcattcatcgcatcatttatccattatgctctctcacaaggagcccaaagtatacttcttgcaagccagtcacatgaagcagttaataatgctgcagaaaaagtaattgaactttgtcagcacagcaatctgcccctagatgttgttaggttcggtgcagaaggaatggtatcagaaaaacttcatccatatcattcatcttccattttgcaaaattatcgagacttattccgctcagagatgcgagttagaatttcagcaatgaaccgaaatttaggtctccctaacaaatttgtagaaagatggtttgatattgaatatcaacttaagcgtttgaatcgtgaaatagaaagattaaccacaaagctaaataaaaatgaaataccagaagctaataataatcccctgatagctcgaataaatcagcgacttgaacgatttaagacaattgcatctgaaaagtttggttatgcgggggagggaactccagaggaagtgattaatcaattaagccgtgagacaatgaatcagtttggtgtaacttctttagatgcagtgtctagactggagcaagtaattgcaatgtctcaagagtgggtggatcgcttaggcactctgagaggtaattttgaagannnnnnnnnncttgtatgtgggacttgtgtgggtctaggacgctcacaatttggtgtagcaaaaaatcgctatgattgggtgatagtcgacgaagctgctcgtgcgacacctggtgaattggctatagcaattcagtcgggccgcagggtgttactggtcggcgatcatcgtcaattgccacctttgtatcctgaaccagtagtgcgaaaaatatcgatagaactaaattactctgatcgcgcagtactaacacgtagtgattttgaacgtgctttcgaatcagattatggtaaacaagtcggagcaacattacgtactcaatatagaatggccccaccaataggtgaaatggtttcagcttgtttttatcccaaaccgttagaacctggacgtggaaatccagaaccttggtttaatcaattacctaaaagattaagttctattgttacttgggttgatacttccgatgctgggggagaatcttatgaaagagcaaaacatcctgggtttgacaatccttatgaagctagagaaattattgatacactgcgttcaatatgtacagcagaatcattcatcaaatatttaattgatgaaacttcagatgaggaaaaaccaattggtgtaatttgcatgtatgcaaatcaagaacgcctattgcaacgtttacttagcgaacaagattgggctactggttatagacatcttattaaaattgatacagttgatagctatcaaggtaaggaaaatcggatcattatcgttgcaacgacgcgcaataataatcagtgtattcaagggttccttagcagctcggagcgaataaatgtagcgatttcccgtgcaatggatagattagtaatcattggggctgctcgtatgtggcgggagaggcatcaaacttcagcgttaggccgtgtattaacccacattgaaacacatcgtgatgggaataacttcaatttggttcaggcattagccattgaggggggacagaaatga

SEQ ID NO: 169647 - DNA, 312 bp, Enterobacter cloacae; identical to SEQ ID NO: 169572

SEQ ID NO: 169648 - DNA, 552 bp, Enterobacter cloacae
atgcacgttaatgatggcgctgcacttgtcgctgccgctggaagactggttgatccccatggcgtaaagggtgatcgcgcgaggcgcggtgataaaccagtcgtaaaaggttcctattttcccggcagggagatcgcaaaacgccgccacgcgggcaatgggccactcaccggtgccctggatcagattgagcaatcccacaaacagcccggcgtcgctgccgggcttcagcgccaggtgcaggtcggcgatatcgcaggtggcggtggtacgcggatcgatcgccacgaccttcatctgcggattattgagttttgcctggaccagccgctggtacagcaccggatgcgtccaggccgcgttcgagccaacgagcaccaccaggtcgctgttttccacatcctcgtagctgcacggcaccacgtcttcgccaaaggcgcgtttgtagcccaccaccgccgacgacatgcaaagccgcgagttggtatcaatgtttgccgccccgataaaccccttcatcagcttgttggcggcatagtaatcctcggttaa

SEQ ID NO: 169649 - DNA, 126 bp, Enterobacter cloacae
atggtggtaaggggcattatgtatggtatcagtcaattaatcatgcatttgatattactccagacaatgcagaatatctcactgtttgcacgcattgtggttacatcagccgatatcacagtatga

SEQ ID NO: 169650 - DNA, 1473 bp, Enterobacter cloacae
atgaactttattatatatttggtactttcccttgtgagtaaggtttttgcatctgcaagagagtttggcattggttatttttggggcgctggagctctggtcgatgcatttatcattgcaatgatgttaccaatgttctttattgatatttcaaatgtgctatttaattcaacatatattaatgttttcataaagcacaatgcgaaaggtagaaaggatttattcaaagatgtgatgttttttttagcaggatatattgtcttgtctgttttagttatttttgcctttttaaaagtttatgttcattatgcggacattcccctagtaacaaaaaatattatcaaagatataacatattatatcctaatttattattctttgatggtatgctgcgaactatataaagcacatatggtcgctagcgaaaagcaaaggttaatgcccttgccaatgatttttgctaattttatatttattatctcaatgtattttgttgcaggtgaaaaaaataaccttgcgcttgttttgtgttttgtattgtctgcggcgattcaatatcttttatatgtcggacttgtgtttttttgcgtaaaagacattaataagaaaggggcagataaacaaagcgcaatactcttaacgcgtaaagaaagtagggggctttttttaaaaaatataatccctgttgcatttaattcagtcttgacgcaatcatcaaaaataacagataagttaattgcttcaggtttgcttattggaagcctgtcttcattatatttcgcccagcaattctatgcactttacataaatataattattgtaagtgttttgacttttgcttaccctaaaatatgtagcaaaagtagtgaaaatagtgaaatggcaaattatgtcaatgatgtaattatactcttaatagccttgttaacgttgccattagtaataggatggtattattcgaattcaatattcacacttttattaaataatactagccctgataaaatagcactagcatcagaaatgttcaactggctaagtatagccgtgtatttcgaagcagttagtgcaacaattaaaagagcattttgggcaatggatagaatgaaagtaactgtttacaatagtgcattttcaatattgctaaatatttttttgagtgtttttttgtcaaaattcatcggtgtttctgggttggttatctcatattgcatatcgaatttcgcggcatctgttttgttagctaaactatattacaaagattatggtgtgagtctggacgtaaaaaaaatcaaagtgttaattatcatttttttaactgctcttttactattcttcattctaaattgtttcgcaataaatattaatcaaccagaaggctttataattcctatcattattactttaattggatttgggttctatttggctattattatcaaaaacaaactccttaaggtgcttacagcatga

SEQ ID NO: 169651 - DNA, 282 bp, Enterobacter cloacae; identical to SEQ ID NO: 169389

SEQ ID NO: 169652 - DNA, 861 bp, Enterobacter cloacae
atgaaaaacgtaaccggcgtttataccgcacctcgtccgcactgggtcggcgacggttttcccgttcgttcgatgttttcttaccagacgcatggcgaaacgctaagcccgtttctgctgctggattacgccgggcctcacaccttcccggcggatggcgtaaaacgcggcgtgggcgagcatcctcatcgcggctttgaaacggtcaccatcgtctacgccggtgaggtagagcatcgtgactccaccggcagaggcggcgtgattggcccgggagacgtgcagtggatgacggctggtgcaggcattctgcacgaggagttccactccggcgcgttcgcgcagaaaggcggcgaactgaaaatgatgcagctgtgggtcaacctgcccgccaaagacaagatggcgacgccgggctaccagagcatcactcgggcggatatcccgtcggttaccctgccggataacagcggaacgctacgcgtcatcactggccgctatgaagatgtaaccggcccggctcataccttctcgccgctgaacgtgtgggatctctcgctgaatcagggcagccatctgacgctccatcagccagagggctggagcgcggcgctggttgtcgttgagggcagcgtgacggtaaatggcgccacgccggcgggtgaagcgcagctggtcgtgctaagccagagcggtgacaagctgcatctcgaagccagcagcgacgcgaagatactgctgatggccggggagccgctgaatgaaccgattgtcggctatggcccgtttgtgatgaacagtaaaaccgaaatcgccgaggcaattcgcgatttcaactccggccgctttggccagatctga

SEQ ID NO: 169653 - DNA, 285 bp, Enterobacter cloacae
gtgttcagtacggagcaaagaagggagattttttataaatatgagcaactttataatgctctgatgactcggcctgtttttactgaactaagtcgcaaacaaatacaaatccgctacgctcagtatatactccccaagctcatcgcacttgatatctataaaacttacaatgctgaaaacaaaaatagcttttatcaccatatacacattttcttgcagaaagagtactgcccatgctgggaggagaaaaaaaaggtgctttttctgccgttcggcagtatctga

SEQ ID NO: 169654 - DNA, 225 bp, Enterobacter cloacae; identical to SEQ ID NO: 85979

SEQ ID NO: 169655 - DNA, 693 bp, Enterobacter cloacae
atgatcgcctttagccagaggcgtgtctggcgtgtaggaccatttaccttcgtcatcaacgatgacggaaccgatcttctcgtcgttgtcgtagatgtccaccacgctgcccggctcggcttcgccgctcagggtcggggactgatcgtcagtggtgtcgcctggacctaccggtccctgcttgtcgcccacgttatcattgataacgatattttctgccggagacggtgccgcagtgtcaatcacgatcgggaaggagccgctggtgcgcgcgttgcccgctgcgtcagtcgccgtgacggtgaaggtgtgcttgccatccgccagcgcggtatccggggtgaacgaccacttaccgctgccgtccgccttgacggtgccaatcactttcccgttgtcgaggatagacacaacgtcgcccggtgcagcgctgccgctcagggttggggtggtgtcgttggtggtttcgcctttctgcattgggccgacgtgcggctcggcgttgtccacaacgctgttgatggacggctcggtgctgaccgggatcagaacggtaatgtcgtaagacggtgcttcacccgctacgcggttgcctactgcgtcctgggtttccagcgtcagctgattaagcccttccaccagcggtgtatccagcgccagcgtccaggtgccttcactgttgaccacggctga

SEQ ID NO: 169656 - DNA, 405 bp, Enterobacter cloacae; identical to SEQ ID NO: 143451

SEQ ID NO: 169657 - DNA, 990 bp, Enterobacter cloacae
atggcttcacaacttactgatgctttcgcgcgtaagtttttctacttacgtttgtcgattaccgacgtgtgtaacttccgttgcacctactgcctgcccgatggctacaagccgggcagcgtcaccaataatggctttctctccgtggaagaagtacgccgcgtcacgcgcgcgttctctgaactcggtacggaaaaagtgcgtcttaccgggggagagccctccctgcgccgtgatttccctgacatcattgccgccgtgcgtgaaaacgaacgtatccgccagatagcagtgaccaccaacggttaccgcatggcgcgtgacgtggcgaactggcgcgatgcggggctgacggcgatcaacgtcagcgtcgatagcctggacgcccgtcagttccacgccattaccggccaggataagttccagcaggtaatggacggcatcgatgccgcgttcaccgccggtttcgacaaggtcaaagtcaataccgtgttgatgcgtgatgtgaaccaccatcagctggacacctttctggcgtggatcaaaccgcgccgcattcaactgcgttttattgagctgatggagaccggggagggcagcgagctgttccgtcgccatcacatctccggcatggtcctgcgtgacgaactgctgaaacgcggctggatccaccagatccgccagcgcagcgatggcccggcgcaggtcttttgtcatccggattatgaaggcgaaatcggcctgatcatgccctatgaaaaagacttctgtgccagctgcaaccgcctgcgcgtctcctctgttggcaagctgcacctctgcctgttcggggatggcggcgtcgatctgcgcgatttgctggaagacgacgcccaacaggacgcgcttgaagcacgcatttccgaggcgctgacgcacaaaaagcagacccatttcctgcatcagggcaacaccggcattactcagaacctgtcctatatcggcgggtaa

SEQ ID NO: 169658 - DNA, 1245 bp, Enterobacter cloacae
atgcgagttgaaaaacagattgaatgggggacaaagcttttttgcttcaattcttggggtttgaccaaagatcctttctctggaatgtacagatatatatgccatttttacgaaataccattcggtggttttgggtacggtgactttgattcgctatgtaagaaagccattaatgacataaataatagtgggcgatcggataaaaaggcgcttgattatgtatttatcgacgagagccaagatttccctcaaagcttcattgatctttgtgaaatggttacatctaaaaagctatacgttgcaggagatgttttccaaaatattttcatgccaataaatgataatgtaaatcgagccgatatcgatcccaagaacttgatgttttctcatgcattagggatggggctttatgaagaacctgttctaagatggctaaaggaggctgaatgggattcctgtgggtataaataccataaagtagataatagagtagagttatccagagatcctcttagacgttttgaggatattccaaaggattataaaagcacagctcttcatctactggaagggacagataatggaccggaaaaaataattgaaataataaaggatataaaatctagaaatccatctttagaagaaggggatattgctgttatatttcttgactcaggcggttatatttatgattacattcagaccttaaaaataaaggttaaacagcaactcggctgggattctaatatctcacatgaaacgaaatctaaacaagatggtaagctgtttatttcaaatataaataatgcaaaaggtttagagtttccttttgtaatttgctttgctatgaagttggtaaagaaatccaatttccgaaatgcactgtatacaatgatggctcgatctttccttgagagtcacttggttttgaataatgacaaagaaaatccatcgatgcctactattcttcagggcttagacttcctgaataataacaattacatgaatgtacgactgccatctgagcaagaaataataaatcaaaaagacttcattgttttggatgaatctatctcgatatctaaattggttaagaattattgctcagataaaaagtcgactcctctgttaattgcaaaaataattgataaagtcgaaaggtatatttcagaagaggatgatgttgatggggagtatataaaaagtctgattgaaatagaatatcaaaggaataaaaaaagatga

SEQ ID NO: 169659 - DNA, 342 bp, Enterobacter cloacae
atggaatctgcgataaacccattaagcttcgtaataaattatgatattacaaatgggtcgaatgtttttaccatgtttggcacgctctggatttatttgaattatttctcctttgttttttatggagttatagtctttttacaggctgttttatatttaaatcgtagcaattacatactgtgtaatgttttttggcttgtgacaagtttcggtatgttttcatggtttgaatattactattttcatttggcctcttacgaagcgccaatatatgtgttaattttatcagtactcttttcaggatcaaaacgtggaaaacaattgcgcaacaattattcttaa

SEQ ID NO: 169660 - DNA, 690 bp, Enterobacter cloacae
atgagcgaaaaatcgagaattacattcgccagcgttaatcaggcgaagctgccatttaatttagtgctacaggggaacgaaggaacgcctgccggaaccatcaaaatcgacaaggagcttgtgacgttcgaaggtaactttgatgaatcggcgcaggtttttatcgaacatctggcacgccgttggagccagcagtggagagaccttgagaaacgagccaatgagttcgaccggttcatggacgcaatggacacagcaaaagaggctctgtctgccggcactccgttagatctggagtcgcttttcaaaggagaaatggcctctgcgatgttcgccaccatgttcgcaggtgagttcgtccgcagcggcgccagaaactacctggagctggggtacaacgttcctgaaatgggcgagtttaccgtcaccatccagcgcaaagaaggcaagacgccaggcgaacgtatcgctgaacttgaggccgttgttgatcagcgtaacggcgagtgtgttcgtttgatcaacgaacgtgatgcgctgcgcgaagagcagctaaacaaaggctcgaacacacgcgcggccgcagacatctacttccagttagttgaggaatgcccgatcccaccaggcggctctttggtcgagtatgtccgcgaattgcaggataaagcagagaggtgcgcggcatga

SEQ ID NO: 169661 - DNA, 360 bp, Enterobacter cloacae; identical to SEQ ID NO: 140456

SEQ ID NO: 169662 - DNA, 3387 bp, Enterobacter cloacae
atgaccatcaatgctggtcaaatagaatacaccattagcgctgatacccgactattgctatctggtattaacgatgcgaataatgctcttaatggtctgaacggcggtttcggaagaaccgatcgcgccgccatttctgcttccgattctatttcccgagtagggagcgcgtctgaaaacaccagtagaataatgggtcgcctttccggtgtggcaagctcattaatggctgccctttccttgcagcaggtagcgagctacgcggacgcatggactgagctgaataacaaagtatctaactcgattcgcaccggcgaaactcaagccgaagtcatgcagcgcatatttgatataagccaggctacccagtcaacgctgaacggtacggcaacgctgtattcgcgcctggagcgtggcacccgtacttacaataccagtgcggaagacttggtccgcctgacgactattatcaatcaggggtttgcggtatccggggcgacggcgcaagaggcagagaacgccattattcagttgtcacagggcatcgcctccggcgtgctgcgcggcgaagagttcaattcggtatctgagcagggcagtcgcctaatgattgcgctggctgactcgatgggtgtatccatcggtcagttacgctccatggcagcagaagggaaactgacaacggatgtcgtggttaacggactcctgtcccagggaggcgcaattggcaaagaattcgctaacaccaccgtatcaatcgccaaaggcttgcaagtggccggtaataacatcactaaattcttcggcgaaaactctacggtcaaatcctttgccgccggattccgtgattctgttgtgtcagtaagtgaaaacctggaagcactcagttctgtactcattattgtcgctgctgttatgggtagccgctacgttggcgcactgactatggctacctcaaagaaaattgatgatattgcagcatcgcgccagcagcttgtcgcagaaaggcaggcagcacaggctgctttgttcgctgctaattctgttcagcgtaaggctctggctgataaagaggctgctctttcgtctctagcgctggcccaggctgaatataacgtggcaaaaggtagcgctgctgaaatgttagcgcttgatgcccttatagccgcaaaaactcgggcgaccaccgtatctcttgctcttgctgaggctgaaactgcccaagctgccgcatcagcaagagcagcagcagcggcacgggcagcatctgttggtgttggacttgctcgtaatgctcttgccctcataggtggtcctgctggtgcggctatgcttgcagctactgcggtgtattatctctatcaaaaagtacagcaggcgaagcaggaaagcatcgattttgctgactctcttgatggtcttacagccaaaatgaaggagatgagcgctgtacagatggcttcagccatagccaaaacagagcaatccatcctagatcagcaggatgcgattgcggacctaagggctgaatatgagcgactggaaaagaaaaaaaccttcatagaacaagctgagcaaatgagaggatcggcggctgttgcagaagacctcgctgaagcaaaccgaaatctcgccattcaggctgataaggttgagcaggctgaaaataaattaagcagaaccactagttctctcggtctgctccgagctcaggcaaacgggcaattccgtgaaggtattgacctgttgcgcagggatggagaggaggccagtgttaccgccggaatgatgggcaagcttggcgatatgattaatttcgcttcaaaggcgaaggataaattcaactccagcagtttgatggtagagcggccgaaagacgttcaggattaccttgataaactgcaagaccaggtgacactccagagcgagcttaacgatcgcaagcgtgcgcagttgaaggctgagcaggacatcagaaaacttggtgggactgaagctgatatcagactggcgagggaaagggctgctgccgaatacgacgcccagcaagctcagcagaaaggcaaaaaggaaaccaaagacgccacgtctgaggcgaccaaatacgctaatcagcaagaagcaatcgcccaaaaacttgcgaatctgaagcagcagtctgaacttgctgccggttctacttctgagctaagcagagagcaagcggttctcgcagcgcaacaatcacttggcaaaggtgctacccaggaacaaatagagctggctggtaaatatcgcggggaaatctgggatacagcaaacgcccttaaagctcaggccgctgctgagaagttattaccggaagcgcgcgagaacgccagctataagcaggatgttcaggatctgaaaactgcgctggatgcgaaaaaaatcagccagcaacaatacaatcaaaccagtgaggtgttagagcaacaacatcaggctaatctggcaaaaatccgcgcccagcaggtaatcacgcctcagcagtccgctcttggcgaaatcgacccggttcagcaattggcaaatcagcatgctcaggaactggctctcattcagcagtttgagacgcagaaaggtcagatcactcagcgcggcctcgagctgatgaacgcagccaataccgaatatgagcaggctcgtattgcggcgcaatgggagatttaccgcaaccagagcacgaccaatcagctgatggctgacgctatcgattctctccaggggggggcgaccaatgccattaccgggctgctcaacggcacccaaagcctgcaagaatcctttgccaatatcggcacgacaatcctcaacagcgttgtcggtagtctggtgcaaatggggattgagtgggtcaagagccagttaatggggcaggccgctgctgctgcatcactggcatcgacaatggctcaggctaccgccgctgcatctgcatgggcgccagcagcgatgagcgcttctatcgcaacgatggggagcgccactgctatagggcaaacggcttatgctggctcactacttgcagccaaaggaatggccgttgctggtgcgcgttataacggtggtccggtcgatgccggatctctgtatcgggtcggcgagaatggtaagccagagatattccaggccagcaatggtagccagtacatgataccgggtgataatggtcgggtgatcagcaacaaagatatgcaggggggcgggagcgggacaagcgttgtccagaatgtcagtttcacaatcaacactaccggcggcattgacgatgccacaatggctaaaatggcgcagatgatgaagcaggttagcctcagcaccattcgtgatcagcagcgccctaacgggttactacggaggtcatag

SEQ ID NO: 169663 - DNA, 348 bp, Enterobacter cloacae
gtgccagaaacattcacatggacaccacagaaagcatactccgttgagcgcacaccgaatgttgccgtcgttaagctcggcgacggttacgaacagcgacaggtgaagggtatcaatccactgatggataaatactcgctcacctttcgcggcatcagcggcgcgtgccgcagtaacccagctaaggatgctgaggcattcctcaaagccaggggtgcggttgaatcgttctactggacgccatccgacacgggagtgcggaagctgtttgtctgccgctcctggaatatgacaaagaccgggccgctgtttgaactgacggccacttttgaacaagtaccacgataa

SEQ ID NO: 169664 - DNA, 744 bp, Enterobacter cloacae
gtgcgcgtgtcgagcgcctgggcgggccagggctacggcggggtgcagatcccgcgcgtcggcgatgaggtggtggtggactttatcaacggcgacccggaccgtccgattatcactggtcgtgtctataacgaagcaagcatgccgccgtgggcgctgccggctgcggcgacgcagatgggcttttatagccgcagcaaagatggccataaagacaatgccaatattctccgttttgaagataaagccgggcacgagcagatctggatccatgcagaaaaaaatatggatacggatattgaaaattctgaaactcatgatgtcggtgtcgatcgtagaaaaaccatcggacaggatgagaatataacgattaagcggaaccagaaatcagatgtaggtaataatgtaacgcataatattggtaacaagcacgttataaacgttgggaaagatcaaaccgtcttgaccatggataaagaaggtaacgcgctgctggaatctgtaaccacgattaaactcaaagttaaagacaactatattctgatcgccccagataccattgagattcacgtaggccaaggcaacctcaaagcagaggctgtggaacaagccatcttcaaaggtgaagagcttacaaaactgggtgatgggatcaataccgagctcaaggcaaatgatacggtgagtataacgggaactaaccttaccgatattaagggcgcgattgtaaaagttaacagttaa

SEQ ID NO: 169665 - DNA, 1056 bp, Enterobacter cloacae
atgggaaaaccagccgccagagcgcgcattgattccagcgcacatactggcccaattcaaagcggaagtcccaacgtaattattggcggatttccggcggcacgaaaaggcgacccgctttcatgttctcaacatggtcagggaagtattctcagcggttcaacaacggtatttgtgaacggtttacctctcgccagggaaggcgacaagacgggttgcaatacttcagcgacccctgcggtcgcaaccactcaacctgcacctccgcaatattggggaggaacggcggcgaaggatgcgggtaaagatggtgctatacatggtgatgtttacgacgcccgggtgctcggcgcctatgcaagtctcgaagataaatccggctttggaaaacccgatacggcttcagccggattcgcgcttgccgatatcacggtcgggaatacaaaaagccaggataaatataaaggcgaggttcgtacaaaagtaggggtggcgaatgccagcggcacgttagtgacagatagggccgattacggggctatcaacctcaatgctaacgctaccgcgatacaatatggcgcctcgggtagcattggaaaagaaggggagcaatacggcggggttggtggggacgtgtatctggcaaccgctgaagcgaaggctgtcagtgaaatgtacgacggtaataaaggacgttatggttttaatgtggaacttggcgcagaagcagcggcggtcaaaggagaagcgacggctaaagccgatttttatggcgtagtcgttgccgatggcaaactttcagggagtgcagggagcgctggcgcttctgctggcgtgggaacctggattgatagtacagattattcatttaacctcaaggtgtcaggtgagcttgcagcggcgcttggtctgggaggggatgccagtatcaaattggctctcaaaccgatccttgactggatttatgacgatgatgaaagtaagccgtccccagcggtgggcagtggcgatggtgtgattaagacgggctgtgttacagtcctgataggagattaa

SEQ ID NO: 169666 - DNA, 435 bp, Enterobacter cloacae
atgcattggtttttctttattctctttatgatctggacgctagcgctaatctggaatggaaaagatttatttaacaaaaaacaatggctcctggctgggttgatgttcgttctggtgctagtggctacagtcgtcattggctttacgttgaaatggcttgctcagtcaatgtcattattttccgtcgcaacggccaaacattattcgatcatcttatccatgtctttcctgtgcgtctggggattaaaggtcacagtagtcctgctgtgcacgttattttccgggattatgggggggcacaaaagatacaacgcagaaaattatgaaaaattatcgtctatgacacgtgccgtggcgcctggcttacttatctttgctaaaagcttaattaccctcggaagcttccttatgttttcgggtttatggcttaagtaa

SEQ ID NO: 169667 - DNA, 1074 bp, Enterobacter cloacae
atggttactgaaaaaaaatatctttttcctctcgagatgaaggatcaggaaaaagagattcgggaaaaattctggaaatgtctctatacctccggagaaaaagagatgttccattactggctactgttaccacagaatgttaagccagcagaattaaaaccggtcacgtttcaggaggttggactgacgaatattggacgatacatcgccgatgacaccggcccctatattgaagtctgggctgcgtatgaacactgccagtgggagatgaatgcgtcagactggcttatcaataagctcgacttaatgggcgagaaagtactgagccagaggataattacgcatccttcaggaagtgggaaatttgcggatatcctgtccattaaaaagatgccatcgggtgatgaggtcgtttcacggtatacggtgcaaaaggattataatcctgtaaatggtggagggaattacttccttttgaaaacggcttgtggttctaaggattacaactcgatcgccgatactattttcctgattgctatcaactgggatttaatgcatcgcagcaatatgatgctttcagaactgttgaaaacagttagccttagcaacaaaaatgacagtggatttaaaattccggattcatggcaggtgagtacactagatgataatcgtctggtaattgaacacacgttagctaatgtcaaccatggagtgattaatttctgtcttttccgtcagactgattatacttctgcgcaggctattttcgaagaagcaactgcgcgttttaaccgttacgatagtgcggtctctcttgcgacgtcggacattgccagcattccaaatgatatcaatctcacgtttacaggcgatctttatagctgtactggagaggttgtcagcgctgctgagaatatcagggcttattacgacatgcgtatcttcaaaattaatgatttatggtgttacgttgaggtggttgggccccatcgtaatcatcgggattattattacgaaaccaataaacgatgtatggaaatcattctttctacgtttcgcatagaaaaacgatga

SEQ ID NO: 169668 - DNA, 381 bp, Enterobacter cloacae; identical to SEQ ID NO: 120748

SEQ ID NO: 169669 - DNA, 921 bp, Enterobacter cloacae
atgatttttcttcgaacagaaaatggcagcgaaaaagttgacgactgggagctaatcacttcaagaccaaattttgttgccaaaatagcaaaaggcgatcatcagtttgaggagattattggttactataaatttaaggaagaaatccactgtggtttaactggatgcaaccagccacaccaaatgggttacatcgtcaaaacctcaagaggtatagaaaccaacatcggcaacaaatgtggaaaaaacgaatttggagttgagtttggtgaaaacgttctcagtttcaataaattcatggagatcgaaacaaaccgagaaattattagcaccgcaaaagataagtgtgatgcatggaaaaaaaatattgaagcgctacgaagcgtcaagcccactatcgattatctgtcgtttgctattgaaaaaagtaaaaactccaatttttctggcaggcttggggctgcagaaatccgtctattagaaaaaaatcagagtggctttgtgactctttcagaagttgaaactgataagaagacaagaaccattctttttgcaatgaataagcatatgcgggattctggagaggcaacaagcgagtacgacatggggaaagtatcatttacccatgtgctgctacccgaaaataatcttcgaaatttatttgtatctataagtgaagacatcaaaaaaattcgtaccattgacctatcgacagcaccaagccctgagattgctgaaactgccagaatcgcggccacaattgaagaacgaatcaaacaactaaaaaacctaaaacatcaagccggtaagttcttaactaaaaagaacctattacctatagcaaataaaataaaatactcttcgacagcagaagaaatcgagcttaaaaactttatgggctttttaggttggcttaagtaa

SEQ ID NO: 169670 - DNA, 168 bp, Enterobacter cloacae
atgaaagcatggtcactcgaagagctggcgctgctgtggcgacactcaaacgccgaagccgcggaaattaccggccgcagcattgaagaggtcggggataagcggctgcaaaccaatattgagcgtaatggctgggatgttaacgatccggagcgggaggatgcatga

SEQ ID NO: 169671 - DNA, 576 bp, Enterobacter cloacae
atgaaaaacgaagatatagcgatgaatagccgcccaatgagcaacatcgacaaacgcgcattagcaatgacaaaagaattggccacgctcatggctgagcgtttcagtatgaaccctgtcagtagcaaattactcaatgaagcatggcaaaaggagttccctgacgaagtagccattgcgaaacggatgctggcgctgctggatgagctggaagtcaaagacaagcgcctgaatgagattctcacgccgaacatgctgctgccggtgattgacgacatggatgaagacaatctgcgtcacgttattaagacagtatgcgaaaactactcgttgctgcacgcgaaatgggaatcagaagggaatcgcgctgaggccgcagagaagcggattgctgaacaaagggagattatgtgtcaggccgccagcgatatctcttacgcaatctttaacctgacaggctctgatttgagtcgcttgcaagctggcgtcgttgaaaccaccgacccgactgatacagctttaattgcagagcgcaacttacgtgccgccacagccggtaaaggagaggcatcatga

SEQ ID NO: 169672 - DNA, 282 bp, Enterobacter cloacae
atgagtattgctgatttggctatggatcaagaaagttgggcaatgatggtgctggtcagatgtagggcgttaacggaatgtgataggcatgaaggcgtttacgttgacgagggcattgagcaatctgaaatctataagtatgcggctatagagtataaaaaaagcaatggcttgcatccatttgaaagttttagagacatgacggataccgtcaaaatgaagtacgaagagcatggtggcaacgatatatgctcgctttgctttaagcacatagacgactaa

SEQ ID NO: 169673 - DNA, 471 bp, Enterobacter cloacae
atgattgattttaatgctgatattttatcagggagagcgctaggtaacgtttttttgggtgaaaatataagtaaatatatgaatgagttatataccgggtttaaggtaaattactttgattattttttgcctgatgatgagaaaaggcttgcatatattgtagatgacactatcacaatcgctacccttgaagatggaacgatcatttcgattggttgtaatgtaagctataaggggaggtataataacatattacaaacaggtcaaacgatgaggcaaataatcgacttgactaataaacaacgcatttttaatggtttcattattataaatgacgactttggtttttcatttgagttgccagcgccttatgatgaaatcgcagatagcattgcacatgttccactggatctcgttcttaatgaaatccgtgtagctgattactctgactggaatcctcaaaaaatataa

SEQ ID NO: 169674 - DNA, 216 bp, Enterobacter cloacae; identical to SEQ ID NO: 133521

SEQ ID NO: 169675 - DNA, 693 bp, Enterobacter cloacae
atgtcccgttttattctgggtgactgcgtgcaggtgatgtcccgttttccggcgcgtgccgtcgattttattcttaccgatcccccgtatctggttggctataaggaccgtaccggccgcaccctggccggggacaactcagctgaatggctccagcccgcctgccatgaaatgtaccgcgtgctgaaaaatgacagcctgatggtgagtttctatgcctggaaccgcgcggacctgtttctcaatgcgtggaaaacggccggcttccgggtggttggtcatatcgtctttgccaagagctacgcctcaaaatcgacgttcgtgggttacacccatgagaacgcttacctgctggcgaaggggaggccgcaaaccccggaccgtcccgtcccggacgtgatcccctggaaatacaccggcaaccgacaccacccgacggagaagccggtgcagagcctgcggccgctgattgaatcgctcacgcgtccgggggccatagtccttgacccgttcgccggcagcggctccacctgcgtggccgccgccgaagccagccgccgctatatcgggatcgagatgcttgaggagtaccacgccgccggcgtccgccgtctggcacaggttgaacgggcgagaaggatgccggcggccaatgacggcgcgttttaccccgactggccggaggcggcatga

SEQ ID NO: 169676 - DNA, 468 bp, Enterobacter cloacae; identical to SEQ ID NO: 126312

SEQ ID NO: 169677 - DNA, 222 bp, Enterobacter cloacae
atgaattacccgggccttgaacacctgcgcgcggatgtggccgcgctcagcaatgccatgtgtgatgtgcggatgctgctgaaccgcctcgaatcgcagcaccggcacgacgcggcaacgcttactgaacgtatggcagcgcagaccctgcgccggatcaacaccctgcttctggaagcctaccgcgaagccctggtgctggacgagacctttcaggactga

SEQ ID NO: 169678 - DNA, 477 bp, Enterobacter cloacae
atgatcgccaccagtggcgaagcctgcccgctgccgctcacaattgacgtacaggccgaactgtttcctgaggtcatgcacacccgcacgggtcgacggctgcacaggtccggcattaagaccacgcgtcagatgcgccgccagtctcgtgagtacgaacagcgctggaaactgcgccagaacctgctggagcaggcgaaaatcgacctgaattttcagtcaccggaaaccgtctgcatctggtacacccggtggagcgacgagtttgacgcggcagagcttgccggaccgttctggcgctggcagtcgcggttctcgtcgctgaaggaacttgactggcttcgcatcagcggcgagccgctgtatgcagtgatgtacgaaatcccgtttatcgtgcgggagacgccggagtctgtccgtactgctgagcgctggcaggtgccgaacaagttgcggtatcagcagggggcagaatga

SEQ ID NO: 169679 - DNA, 1200 bp, Enterobacter cloacae
atgagcgagttaagttatctgggaaaactgctggatagcgctgaggttgagtggctgccactcggtgttttaggtgagcttgttcgtggaaatggcttaccaaaaactgattttactgagtctggcattcctgctattcactatggtcagatttataccttttatagcctttcaacagaaaccacaatgtcctttgtttctgaagatacagctaaaaagctgagaaaagtaaatactggcgatgtagtgatcactaatacaagtgaaaatcttgatgatgtcggtaaagcattggtttatcttggtaaagaacaagctgtcaccggcggccatgcaacaatatttaagcccaagcaaggtattattggaaaatactttgcttatttcacccagacaaattcattttacaatgaaaaaagaaagtactcaaaagggacgaaagtaattgatgtttccgcatcagatatggcaaaaataattatccccataccttgccctaacaatccagaaaagtctcttgctatccagtctgaaatcgtccgaattctggataaatttactgcccttaccgctgagcttaccgctgagcttaccgctgagcttaccgcacgtaaaaaacagtacaactactatcgcgaccagttgctgagctttgaacagggtgaggttgagtggaagacgttgggagaaatcacaacgaaaatcgcatctggacgcaacaagactcgggatgccgacggaaaatttcctgtttacggttcaacaggattgataggatttattgataaagcggcttactcaggagatttgctcctagtcgcacgcgtcggtgcatatgcaggattggttaatgctgtctccggccattttgacgtttcagataatactcttattattcatccttctgactcatggaatgtacgtttcgcatttcatcaactaagacacatgaatttaaatcagtacgcagtaggtgctgggcaacctcttattacaggtggactgttaaaaaatttgaaagtaccatttccctccctcaaggaacaaacacgtatcgcgaaaattctcgacaaattcgaaacaattacagcgtcaatcagcgaagggcttccccgcgaaatcgagctgcgccagaagcagtacgaatactatcgcgatttgctgttcagcttcccgaaacctgatgcggtcagcaactga

SEQ ID NO: 169680 - DNA, 153 bp, Enterobacter cloacae
atgttgttttgctcctattatcgcaccagttatttcaattacttatcttacattcaagtaaaccacgttctcctcctgtgccgtatttgtggcattaagaccaataatcgcgtcaattttgctcgcgtgctctgtcaggtgtccggcagataa

SEQ ID NO: 169681 - DNA, 552 bp, Enterobacter cloacae
atgacggcccgaggcacgcctgaccaggcacttaccagttttcggaatgcccgtattctgtgggccggacatagtgagagccgaaaagccgttgaacaacagataacatctctcctcgctgccacagaaaaaccagcagattatgcccgacagctcgaattactgcgggaacgtctggatgtgctgaaatggcaaattaactgtgctgcgcgcgaatgcatttacgcgcagcatttactgatggaggcctgcacagaagccgctctcagcaattttatgcaggcgaatggggcagccctgacatctgcactggctccgttcctgaaggggcgcggaggggttgacgttgcgtcccgtatattacgcagtgctctggttcgccagctggcaataacaccgcctgaaattgccggggattatcgtgagatcctggatgaatccggtttgatgcctgaccccgggatgattcgtgattgccagggttcttacaccccggcacaacatctgcgttttcagcaacgcctgaatgacattaacgatatacaggagtga

SEQ ID NO: 169682 - DNA, 165 bp, Enterobacter cloacae
atgtctcgtaatactgaagcaacgagtgatgtaaacacctggagcggcggacacctcaactataaagagggtttctttacgcagctgcaaaccgatgagctggcgaaaggcatcaacgaagaggtcgtgcgcgccatttcggcgaaacgtaacgagccggagtag

SEQ ID NO: 169683 - DNA, 312 bp, Enterobacter cloacae
atgagtgatgagaaccttttgaaatatattgagggtcgattaaatattaatgatgataatagcactgattacaccttttggttataccctccgttatgtttaacacatacagaattacaaatactgtattttatcttgcaaggcaaaagtgttgatgacatcgcgaaatatagaaacagaagctcaaaaacaatatggggacaaaagaaacagatttatataaaattagtaattcaaagtgatacaactctttatcgtgatttaataaaacagggggtaatttgttttaaaaaacacaatatcaaagggtaa

SEQ ID NO: 169684 - DNA, 177 bp, Enterobacter cloacae
atgcgagttcaacttatttttaaagcttttagcacaatccaaaacagtaataagatcgtcacctatatctcgagaatggagaccactaccactagccttaaaatcatttttagcaacaaatctcttcagtacataatatttactaccaaaaatcaataccttataatcatagagtag

SEQ ID NO: 169685 - DNA, 1059 bp, Enterobacter cloacae
atgaaaatagtgcatattgttcataatttccatgggtttagtggtgcatctttgcaggcaaaaaatctggcgaaagccatcggtaagtacgatgaatcaactgaacagttttttgtcactcgtttaaagaatggaccagttaaactggttgataaattcattgatgattttttagttgttgaaattcctttaaatatcagtaggctatggactttttttagattttgtttgaaatttaaaccagatatagcgcattttcatggtgccgattttggtttattagtgatatgcaaaatccttaatattaaggtctattggaagtctactttgttaggaagcgatgattttgattccttaatcggaagatcaacaaagggaatcattaaggaaaaactattaaattgtatagacgtaaataatacacttactaaacaaatatatgatatcaacagccattatcttcctccttcaaagttggtcaccatacctaatggtgtggaaatggaaagcttcgataaaattggacggaatgaaagggtagccgtaattatatcagccataatccctagaaaaaaaatattagaaggaattgaattttttaagcaaaatcttgccccgaagggatacatgcttttgatctttggtccatatgattctggtcttgatggatatagtaaggagtatgtaaaacaatgcctatctcttgccgacagcaatattatatttaggggtagtgttaatcatagcgagattaaaaatgcactaagtaaagcgggttttttgattcatctctcggaaaaagaaggtatgcccaatgttgtcctcgaggctatggggcgtggcgtttacccaattgtaagtgaaatgaatggattagcgtatgagatcataataaatgaaaaatgtggatatataatctctggttcagaaaaattcagtatcgataactatatggatcttaacaaggttggaatgagcattattgccgaaaattatgaatttaaggttgtcgctaccaaaacatgtcaaatttatgaattgctttatggtgataaatga

SEQ ID NO: 169686 - DNA, 1140 bp, Enterobacter cloacae
atgagcactgaatattttttaaaaaagagtgtttcctcagtaactattttatggttgctttgttctggcatatacttaactaagttaacaccctttagccctgtgtattttgcattcattttaatctgccttaagcttgttttagggttcattcaaaatgcaaatttccaagcaacaaagtattcactgctctgcggcctttttacattattctctttttttctttttctgaactcttcaccaggtcttgtcattaatattattataactataatgtctccgataatagtcagctattactgtcgaaatcggtatattaaagctcatacattgcttaatatttttcttttatacggagttatttttgtaattgatggtttatggcgtttgagtcatccttatctagataatgtagaaaaattagattcactaggtattgggtttcaaatttataaagtaaactcattaatgtatcttgattctaattttgttggtcttgaagctgtttttattctttcagttatagtttatttaatgaaggaactgaggctttcaggttattatttcttaaagtatttaaccgtcatttcatgtttgattcttggtgtgttacttacattttcaagagccgcaatcatagcaatgatcataatgtttgttgtgaatttattattaagcaatcgtagattagtgcttttatctttttttttagtaccagtattcttatttattgtgatagaggtcgttctaagtaaatttgaaaacgatattagttttgctagtaagtttcatataatttcatatacgcttgattatatttctactgcaagtctaacaaatatatttttcggggtcggtataggtaactctattgatgctattggtatgggggcccacaatttgatcgtgacatttttcattgagtcaggattttttggtttgacgctatttctgatattattatcggtgaattgttattacttgaagtccgatgcatttatagttgtaatgccatttatgattgctgcaatgtctctcggtacaacagcattgccttatttctttactttctcattcctttgctcactttataaaacaaaacaatttgatataatattgaattctcattcttcgaggtga

SEQ ID NO: 169687 - DNA, 2214 bp, Enterobacter cloacae
atggctacgcaacctaccaatttgtctgtaccaagcgaatcaccgcgcgacctgaagtttaacgcggggaaaattgacgaattcgttacgtctttggcgctgcaatacatcgatcgctttggcaatgctcattacacgcttgaagggctgaagcagcttgttctccagcaaatttataatctcggctggaatactgtcggcacgtttcaggatggggctattatcagcgcagctggtgatatcatccaggatgagtctacaggggtatggtatcgatgggacgacctttctaccctgccaaaatccgttccagctggatcgaccccggattcaactggtggggttggtgaaggtaagtggcttgcagtggatgttagtgacattctgcgcaagcagctcgctgaagatgatggcgcactcctgataggaaacttcgcctcatcagcaggtgttatttctgcgaagctgtatggcgtgaaaagtggcattgattgcgctccaatcattcagcaattgcaggatttatcggagtcactgcggttgccgattgattttagtggtatagcagaaatccgcttcacaggccgagttcagataggggattggttttactggaaaggcgccgggaggtttaatacggtaatcaagccgttatcattgacacgatcagaagttggcacctacggagatggtgtgtacgcatggttcagcaggaaggacccaacccaaagtttagacttcgcaatgctggaagatattgggtttgatgggcaatatcaggatggctatgacatatcgacaattgctccacaaaaagtcatcagggctttttgctggcattttaaaggtactgcaattggtcgtaacatactcgccttgcgctgtcacttcaaaaactgtccgcacgagggttgggagggatacacaacggcaggtggtcaaattgatggaattggctacgttgattgtacgagcgaaggcactgacccgttgcttacttcagttggttttaactcctttaagtgtatgaatggtgcaatagattcacctggctcctatggtacttattcaattaggaatgttgcatgtatcaatgcgacaggtaaggggcatagaactatagctgacattaaaagaggatgtgaaaaaataatcatcaataaggttaggtctaatgatattaatgattgccacattagtcttgacggcgttagaaaagctatggtcagcgatgttattggtgttcagacaggtttgtctcagaatacaaaaaatttaattgagtgccagggggaggatgttgatatccacgacacgcaatattatgcagcacaaaccagctcagcaggtgttgcaggagttcttattacagattataaatatccatctgaggctaactatcatcaaagtctgcaaatcagaataaagaataattacattaacagagttaacaaccatgctataagagtaattaacgcgtctaatgtttttgttgaaaacaccaccgctgaaaactgtaacggagctggcgtatcatttgaatacatatctggtaggattgatggggttacaaacaatccaatagtccctaaaaataattctttaggaaatcttgttactagaggttgtaacttcgaggcgagcataaacaacggccatgatgtttatgttactggtgcggtcagaaatggttcggatggttgccgattcggatcaggtaatattgtgtatcaggacacgaaaccgtggagagtgtacaaccctaaggtaatgaactacgacagactaatgcaaaatgttacctcgacgtcaccagcgaaaacagacgcggcgacccatccaattgatgttccgtatgcatttatgcttaatgacaataatgcagcatctgtacagtcactaaccgtctacacagtagcggcgaccacagcagactatgtgtatgtgtcccttcgtgtgcttgccgggacggcttctcaggcttgtgttctttatagagaactaaattcatctggtacagttgtaaacacttccgcgttgcagttatatccagaaggaacatggaagaaaagagatcatgcatacaagcctgctaattcaggatgtgcatacgttgaggttttacttgcacctgcatgtgattccagcctgacagtctcactaactggaaccacatctttttcagggattgatgtctcaaataaggttttgtaa

SEQ ID NO: 169688 - DNA, 1098 bp, Enterobacter cloacae
atggataagcaaacttcattaaccattgattatgcaaaggccattggaatctcacttgtggttattggtcataccgcatggaaaccattccagacgctagatccatattatttccacatgccccttttctttttcattggaggttttttatgcagtggtcgcaagccaattattaaatgcgtacaagatacattctttaaatatataacttatacattagtgacatacgccatagttgcatgcattgccatttccattaagttgtcattcaatgcgccaattaatgtcggacaaccatttgcaaataatgtcattgatacaattaagttagctcttgaaagaaactttcataataacctttattttctagttggttggttcctgcttgcttatgctatttcatcattaattttaaattgctttattaaattaacattaaaatctaatgatgataatattaaaacattcatatccattaccacgatttggtttattttgatagcatcatacttaataacatcaaacaaggagaactactggaatcaataccttaatctaacaatacaggtccttatggctttttgttttatgctatttggtaatattaccagaagacataaaagtaaattcaataatgtttatgttgctgttttatcattcttaatagttagcataatgattgcgaataatctttatggcttgcctgtaatggcatggagcatgtacaagccgaatgtgtttttgttttttgcgggtgctctacttgctatttatgtggttatgtttaccgcaaactgcattgcaaggtcctgtgaaaatagcaaactactcctgctatcagcatatagtaaaagcatcatgtcataccatttggtgtttttcctgtttttggatgcggtaagctataaaattttcaactataatattgaactggcaactcctactaagcattactacacagctaactcatgggtgttttatatcaccctaccattaatgctaatacctttattagcatattactttgacaaggctaaagttttcataatggtgaaggttttaccctccaccataaaaagattacaaaaccttatttga

SEQ ID NO: 169689 - DNA, 309 bp, Enterobacter cloacae
atgccacgcacagtagacatacacgccgcctttgttgcggctcctgagccattcattccttcatcttccaacattgttgaaacgcaggaaggctttgatgttattgaaagcgcatcgctttgcaagcgcggagacacattgctcatttggttttgtggccgccagcagcacgcatattgggccggtgatgcactgatcactgatgatggtgaggccatagaaggcgaggcacttgatgatgttcgccttgttggcgtggtcacgcataccattagcccggtatgggtcgacgacaatccggtgatgtga

SEQ ID NO: 169690 - DNA, 720 bp, Enterobacter cloacae
atggcaaaaacactcgccgagattaaggcagactaccaatacaccgacaagcaaactggtgaagtaaaagatcgtacaattaacaccccacattatttccgagacattcccagaatttattctcccaacctccaggatggttacatggacttttgccccaaggcgcaaaagttgtactgctattttcagggatgggaaaattcagggaatttctgttacgaaagtcagacagaacttggaaaggtgatcgatttatccagggagagaacctgcaaactcattcagaagctgcaagatgcagggctaatcacgaaagagaaaaaccctggttatcgttccaaagtttaccgcacgtttccgatcactgatgcgcacattactccaccagaagcactgacagtgcagcctgatatcatttctgacgtagtgcctgaaccagctacggcagaggaaacgcaggatgatgcgacagaaaagtctgagcctttaggactgcctgaaacgattaccgatgaaatgaaaatagacgcaatgtgcgatctattgtccaaaccggaaagtttacggcagcaaaacaggggggacacatttattaactacgctcgccgcgtattgcaccgcaagagtatgaaactaccttccagactcgaagaggaattagaaatgcgatttgaacatcgttatccacacttctatggacgattcggaacaccattttaa

SEQ ID NO: 169691 - DNA, 921 bp, Enterobacter cloacae
atgagcaaggtaagtgtattgatacctgtctataatgttgaaaaatatattgagacagcaataaaaagcattataaatcagacttataaaaatattgaaatagttattgttgatgatgcttctactgatggcacatttgaaatcgtcaataggttgtctttagaatacccaagtgtaaaggtattaagaaataaggaaaattctggtataacaacagctttgaataatggattgccgtattgcactggtgattttattgcaagggctgatggcgatgacattcaacatccagaaagaattgctcggcaggtcgatttcctaaataaaaatgaagaatatggtgttgttggttgttgggtaaagaatattgatgaacagggaaatgaaaccgcccgttgcgaatatccaactgagtatgatgatatcatttcttgcatcaaatacacgtcaccgatccttcatatctggttggctaggaaatcagtctataataagttagggggttatcgaaaaacaaatccagcagaagattatgactttattcttagatgcctagcttacggaattaaagttagtaacatccctttttatggttcatatatcaggcttcgaagcggtagcacaatgactgaatcatcattaaagcaaaaaatcattttcaactatcttaagaaaatgtattcaaaaaacgaaataaataaagaaaccattctaaatggtatgccagatatgcaacattatattatttatcaaaagctgcatactatttcaattcgatatctcaaaaaagcaattgaacaaaagagaacagtagctggaatgacttatttactcttttctctgattagtccatatacagtacaggatatttttcggcgattgatgttcaggcgttatttaaataataaaaaggcagactga

SEQ ID NO: 169692 - DNA, 183 bp, Enterobacter cloacae
atgaaaaagattgcaatcattttgccctcactgagaaacgttggcccgaacaaagtggcattaacaattgtcaaggaaaacttaaattcttccgaattgttttttaaggtcttttatattaaagaacaaatagaactcttcgacaactctatgattttgatgttattcattctcacatgctga

SEQ ID NO: 169693 - DNA, 831 bp, Enterobacter cloacae
atgctgagaccggatataattaacgccatcctgcctttttataaaggtaaaaaaattactacagtacataacattgtaacggatgacttgtattattctcatgggtattttatatccaagctagtttcccgggtttggttcaaaatttggtcaatgctcgataatgctattgttctttcccagtttgctaaaacattttacgtaaataatgggctatcagagaataaagtattaatcatttacaatgggattgagaaagaacatccgcttgaatcaattgatcaaaaagataaagagttgatactaaattttaaagctaatagtaaattaatcgcagcattatgtctcgctaatgcgcgaaaaggcttggaacaagttatcgaagctttagtaagtttacctgaatacaagtttatacttattggtgatggccctgttgttaatgatttacgaaccttagcattagaacgtaaggtttcagaacgttttttagttttaggatatagaaaaaacgcaagaaagtttttgcattatgttgattattttataatgccaagccgctctgaagggtttccactggcattgatagaagctgttgaggccaaaaagaaagttgtttgctcctcccttccgctttttaaagaaatctataataaaaacgaagtttcgttttttgaattggacaatattgccacattggaagaagcggtacggaatgcagatgaaaacgatactgaaagtgcatacaataaaacaaagcaaaactatagtggtgaagcaatgggtaaaaactataggaaatgttacttatctgacaaggaaagcaaatga

SEQ ID NO: 169694 - DNA, 756 bp, Enterobacter cloacae
atgaaaatcttcatttctgttgtttcccataatcacggcaaattaattaagcagctatcgtgtttacaaaaaattgcatgtaaatataatgttgttttgaaagataatgttggggagcaaggccttaagcggtactgtgatgataataacatggcctacattggttacgaccaacaaagaggctttggcgaaaacaacaatatagttcataaattttgcaccgaaaatctagatatgaagtcagatgatatatttattatattgaatccagacgtcgttattacgttagaatcactggatgctttagctactacgattgagcgcgaaaaatataattttgcaactatcaatctatataaagacaaggactttgaaatttgtgatccatgcatccgcaaatttccttcctttaaagattttttatcaagttatttaggttttgaaaataagacagtagtaaataaatcacagattttcgagccaattgaagtcgactgggctgccggctcatttcttgcagttaagtcttcttacttcaataaagtaaatggttttaatcctaaatactttatgtattgtgaggatattgatttttgcatgagaatgaaaagtgcaggagcaaaactaatttttattcctgacattaaagcaatgcatttggcccgacataacaatcgtaaatttctgagcaaacacttttattggcatttacggagcatgtttatctacttgttggaaaaaagaaagtatgcttag

SEQ ID NO: 169695 - DNA, 300 bp, Enterobacter cloacae; identical to SEQ ID NO: 168350

SEQ ID NO: 169696 - DNA, 867 bp, Enterobacter cloacae
atgaaacaagaagttaaagaaaaaaaacagacgatagaactaatcaatgatgattgtttaatcgctttaaagatgcttcaaagcgattcaatagatctgatcgttacatcaccaccttacgcagaccaaaggaaaaaaacctatggcggagtaagtgcagacaaatatgttgagtggttcaccccgatagccaaagaactactgagagtgacaaaatcatcaggctcatttgttctaaacataaaggaaagggcgattaatggcgagcgccatacgtatgtaatagagctaattctaatgatgcgaaaattaggctggttatggacagaggaatacatatggcataaaaaaaatagttacccagggaaatggccaaatcgttttagagactcttgggaaagatgcatccactttacgaaaagtaaaaaattcaatatgtaccaagaggaagtaatggtgcctatgggggattggaaaaactcacgacttaaaaacatgagtgatactgataagaaaagagatgaatcgaaagtggggagtggtttcggtaaaaaaatagaaaactgggtcaccagggatttggcatacccaaccaacgtgctacacatggctacagagtgtggaaaccgcagtcacagcgcagcttttcctgaaagcctacctgaatggttcatcaaacttttcaccacagaaggcgacaccgttctggatccattttccggttctggaaccacattaaaagtggcgaaagcaatgaaaaggaacgctgtaggcattgaaatattagatgaatattgcgagattacggcaaatagagtaggtttgaaaaaatcgtctcaaaaaaaataccggtatacaaatgattga

SEQ ID NO: 169697 - DNA, 759 bp, Enterobacter cloacae
atgattgaatcacggattatttcagattttatagaatcttgcattgatgaagagttccatcaaaaaaaacaagaaaaaataagagcgataaaattatcagatataacaaaaagaaaaaacccatatttatttaaggcgaaggggctaacatcagcaagtgacttaataaagtcaatcatggatgcaacggtctcctctggagaggagaccgtttttggcaatttcatggaaaagattgcaatcttcacatgttcccaagcatttggtggaagaaaatccagtgcggtaggaatagatctcgagttcgaaactgaaagcacaaaatatctaataagcatcaaatctggcccaaactggggtaactcatcacaaaaaaagaaaatgcaagacaacttcattaaggccaaaaaagtcctaggcacatccggtgggatcaattctaaatcaataacttgcattgagggttgttgttatggttatgacgccagacctgaaaagggaacccacataaaactatgcggccaagacttctggacatttatatctaacggaaacaacgaattatatagtgatataattgagcctattggtaagcttgctgacgaaaaaaacaaggaactgatagaactaacaaatgccaaactaaatctttttacggctgagttcatttcagaatattgtaatagtgatggctcaataaattgggctttatttgtagcaagaaactcaggttcaaaatcaagctaccatagcaactaa

SEQ ID NO: 169698 - DNA, 477 bp, Enterobacter cloacae; identical to SEQ ID NO: 156494

SEQ ID NO: 169699 - DNA, 369 bp, Enterobacter cloacae
atgagtaataataagttagctgaagttgaaaattttttgtcctctgcatcagtttttgattttctcaaaacattagatgcagacagcgccttggattctagagatgagccagaattcgatgatgcatggatgaaagagtttaactcattaaaaaatgaaagttttgatgcggatgatattgaacatatcaattccttgcgagaaaaagcatttaagctctcattcagagtaattaataattctgaaatatcatcacgcatatcagatgattttgaattaattgctaaaagcgttgttgttggaaaggataataattgggccatcagttatctatggtcttcgtataaaggtggaaagttcccacaataa

SEQ ID NO: 169700 - DNA, 2142 bp, Enterobacter cloacae
atggcgcgtaacttacaactggcgctgcagctgcttgcccgtgataccggctccaaagtgcttaaacaggcactccagggcatcagccgggataccaaagcggcgcaaaaaaccgatgatgagctggcgaaatcccgtcagcagaactcaaccacagcgattcgtgcctcccgttctctgattgaggaataccgtcgcgccagttcggcgcgagcaactcttggcattcgctcagagcgcgaaatacagcgcgaaatacagcagaccatggcggcctataatcgccttacccgcacaggtatgctgtccgcaaatgagcagaaccgggctttcagggccatgactgacagggtcaaagcgctgcgaactgagcttggcggcgtcaatgactcaatgacgcgcatgcagcgattccgtgctgcaggttcaaccgtggcagcagtagccggtgggttaactgctgcgggtatgattataaaagacccggttcagcgtcagatggccttcgaacgacgtaatgcagaaatagccaacactgcatataacgagctgtctggacctgagcgtattaaaaaaatccccgttatcaataacgctatccgcaatgcggtgcgctacggtggcggtacgcctgaagcagcacaggatacgctgaatgctctgtttgcaggtggtcttgatgaaaagacggctatgaaaatattgcctgatattactcgttatgcttcagcatcaggtgctaacccacaagacctggctaaaattggtatcagcgctataaaaaactttgacattgatccgaaagacttacctactatttatgataagtcgattcgttcaggagaaaatggcaagtatgaacttgccgatatggcgtcatctttatcattaacgctcaccaaagctaagagtatcggtatgtctggtcttggtgattttgataagatattagcattattacaggcaaatgcagaaacagctggtgataacagtgctgcatccactaatgtcaatagtttacttgataaaatcacgagtgctgacattcaaaatactttgaagaattataaattcagagggaaaggtggaaaggcacttggttacattgactatttggctgagcaaaaggcaaatggattaagtacaccagatatcgttatgaatgccgtatcagggattgtatcagcagataaaagagttcaaaaactaaggggcgaggcaaagaaatataaaggcacggataaagaaaacgatatcctcgcagctttggatattgttgtttcttcaattacgtcaaaaataattgctgaccagcaagctagtactgctttgaaaacaaatataatgaagcgtgagtttataaaagaacaaataaaagggactgagaattcagtcggggctggcgctgcatcttttgaagtaatgtcatcaaccaatgattttaaatcgcaacaatttgaatcagagaaaatgttctccgagcaggatgcaatgaaacctattgccgatttatacggtgatttgacgtcaaaactttctgattacgctaaagaatatcctgagctaaccacggctatttctggtgccaccacaggtattaaagccatgactgcagcggcggtagcttttgcagggctaaacttcctgactggtgggggaataaaaatgccaggctctccaggcggtggagtgccgactgcagggggatctgctcttgggcgtgcctggtccgttattcgtggcggagctggcaaggtattagccccactggccctctatcagggtatgcaggatgcgccacttgttcatgttgagcgaggtgatgctgatgcacgtgcgcggcttaaggttgacaactattccagtgagtcagcacgcatgctggatgcagtaaaagcccgccccggattgctggatgtcgtggatgaggtcaaatcatggtggagttctccggccacgatggggcaaaacacaccagcaacaacaggcgtgccgtcttatcttttgccccaacagcaacaaaaatcacaacccattaacctcaccacaaagctggtactggacggacgtgaaattgcatcagctgttaatgaatacaacggcgaacaatccgttcgcggctcaacaggaggcccgcagtga

SEQ ID NO: 169701 - DNA, 231 bp, Enterobacter cloacae
atgaaaacctcgcctcaactggaaactacgccagtcaaagatctcgtagcagccgggcatgcgctggcgaaagaactacattgcgctgagtctgccgcgctggttcgcaatctggctacagcgcttgatgtccagtttgctcgtgccaacgcgctaacggttgttgatgtttgtgaccctaatgtgctggcgcagctgtatgacgcagaacgcgttgccggtaaaggatag

SEQ ID NO: 169702 - DNA, 1689 bp, Enterobacter cloacae
atgagtgaacttactaactcgcaaataataatggaaaagataattaaggaagaggctgtggagcaaggtgcacagttttcagaatattttgaactttacacggcatcacaaatacttaaggattatgacgtaacctattctgatatagaatatagtattgttggggatggtggagatggcggtgtagactcattttatacattcctcaatggagagttaataaaagaagatactgattattcaaaaaccggcaagcacaacaaaattgaagtggttattatacagtcaaagacatcaaaaaaatttggcgaagatgcaattgtaaagtttaatgaggttactagagatttatttaatatatcaacaaatataagtagtgaaagccttaaaagacgttataatgatgatctcaggggaagggttactatttttagggatgtttatagtaacttaatgaaaacttttcctgatttaagtttctcatattactattcaactctaggagaggaagtacatcccaatgttgtcgataaggtaaatcctttaaaagaaactatcctcaaaatgtttacaggatctaagttttcatttgattttgtcggagcaagtaacttagtcgaattaaacagaaaggtaaaaagtacttctagaatgatggagttagcagagtcacccatcgcaacagctagtggtagttatctctgtcttgttaatttgaaaagatattacgatttcatctctgacaatgattctctctcaagaagtatttttgagtctaatgttagggatcataatggagatgttatcgtaaacgttgctattcaagaaacactgacttcaggcaaagaagacttttggtttttgaataatggtgtaacgataattacatcaaaagctgttctatctgggaaaaccttgaccatagaaaatccacaggtagtcaatggattacaaacgtcacacgagatttataactacttttctactttggaagtggccgctcaggaattaaggaatgtattggttcgtgtgatttgtgagagtaatgctgaatctagagataaaataataagagcaaccaatagccaaactagcatcccccctgcgtccttaagaagtgcagatataatacatcgagatatagaagatttcttcaaagccaatggttatttttacgatcgaaggaagaatttatataaaaatgaaggcaagccagcctctcgtattgtatccataccttacttatcacaatgcgtcatcacaacagttctccttcaaccaaataatgcaagggcgagaccttcaactctcataaatgacaacactcgttatgaacaaatatttaataaagaaaacccactttcactctatcttaactcgtatttaatattaaagaaatgtaccgaattattgaagcagaatgaatttaagagtaaaagagatttcaataatgttatttaccatacagcaatggcggctgtattgaaattagccattgctgatggaaaacagaatgatatacctaagtttgttggtggctttgataataatagaattactaagcaattttttgaagggatattcgacctagtttggcgtgaatataagatgttaggtggtgatgacaccacagcaaaaggaactgattttgttactaatattgcaaaagctctcgcaatatcagcttag

SEQ ID NO: 169703 - DNA, 1140 bp, Enterobacter cloacae
atgagcacaacaccaacagaacgtgaatatttcctcgactcgatccgggcatggctgatgctattggggatcccttttcacatatcactgatttactccagccacacctggcatgtgaatagccagatgccctcctggtggctgacgctgtttaatgactttattcacgccttccgtatgcaggtgttttttgtcatctccggctatttctcttacatgctgtttctgcgatacccgcttaaacgctggtggaaggtgcgcgtcgagcgcgtggggatccccatgctgaccgcgattccgctactgacgctgcctcagttcattatgctgcagtacgtcaaaggcaaagcggaaaactggccgaatctgtcactgtatgaaaagtacaatacgctggtctgggagctggtgtctcacctgtggttcctgctggtcctggtggtgctcactacggtgagcctgttcattttcagccgcctgcgtcaccacctgagttcgagagctgacgcctttttcgccaccgttacgctgggcaaactgtcggtgctcttcttgctgttgggtatcgcttacgccgcggtgagacgcatcctgtttatcgtctatccaccgatactgagcgacggcctgtttaattttgtggtgatgcagtcccttttctacattccgttctttttaattggcgcgctggcgtttatttacccgaagctgaaagcgctgtttactaccccgtcaccgtggtgtgctgtgggtgcggccatcgcgttcgcggcctatctgctgaaccagcgctacgggagcggtgacgcctggatgtacgaaacggaaagcgtgatcaccatgctgctgggtttatggatggtgaacgtagtattcgcgctcggccaccgcctgctgaactttaagtccagccgcgtgacctacttcgtgaatgcgtcgctgtttatttatctggtgcatcacccgctcacgctcttcttcggggcttacatcaccccgcatatcgcctctaacacgctgggcttctttaccggtctggtgtttgtcgtggggattgcgatcgtgctctatgaaatccatctgcggatcccgcttctgcgtttcctcttctcaggaaaacctcaggtaaaagcctcataa

SEQ ID NO: 169704 - DNA, 213 bp, Enterobacter cloacae
atggcttactttgataacatcaacacagagcactgcccaaactgtaatgtcaaactgggggaagatggtgaaaacgaatttattacaaatgacagtcgatgctcatcctgtggcgcaccgctaaagatagttagtcatgcgatcgcaagtttcaacgaagcgccctacaccatttatgcaattgaaattgataagagccgcggacggcgctaa

SEQ ID NO: 169705 - DNA, 711 bp, Enterobacter cloacae
atggataatgagtttgagcgttttgtaaaacacgaagcaccgaatatagatttgacatctccagcgatagaaaaaggctactgggcaagagataagctacaagctgttactgttggcgacgataacttagacatcatttatcatgcggtgggtatggcgttgtctcaatgggaaactcttgaaaatgcaatatttaatctctatttgattttttgtgggtctgataatgctacaaccactactgcattaaggcgtgcctttgggacaattgaaagtagcgacgggcgtaggaaggccttagatgaggcagcaagaatatactttggagatcataactatcctcatggggccgcaaagccgtataagcttttatttgaatcacataagaatgcaagtagcagacgtaatgagatagcccatgggatcgctcatggttttacgatagacaataaaaataaaggaaattttctttttcctgcttcgtataactctgggcgtaacgccaccttcctagacagttcatttggggaatctggggggcctttcatgactgagctttatagatatacatctcgtgaaatctatctaattgcacaaaagttcggtgtattaaccgcttttacgtttaattgtttgggtgcggctgggaaagtcgaaggaaggctaaaaatagaattagctcaacttattcaaggaacaacagaaaagtag

SEQ ID NO: 169706 - DNA, 342 bp, Enterobacter cloacae
atgactctgttagagaaacagcagctgtttaccgtcatggtggccaatctgatccactgggctgatgaacacggttatcgtctgacttttggagaggttcagcgaacgccggaatgcgctgcgctgaatgcaaaaaaagggactggtattgctaacagtctgcacacacaacgcctggcagtggatcttaatctgttcgtgaatggtaagtacatgacggacacgaaagattatctgcccctgggcgaatactgggaaacgctgggcggtacgtggggcgggcgcttcaaatcccgtccggacggcaatcacttcagcctggaacataacggggtgcgctga

SEQ ID NO: 169707 - DNA, 2016 bp, Enterobacter cloacae
atgcctaacctatcggaaagcgcatcggcgatcaaacagtgggcatacgcatggaacgcgccgcgacaggcaatcgaaagcccgttccccacatacgaagaattaaagcaacgtgatcgggataatgcggcgttagcgtgcgctcaggatttgctacaaaagcaatctgtgattgttcgtatgtcggtaaacgcggcggccagcaaactggagaaagagcagggaataaagcgtgccaacgcctttttggccaaaacctttctggagcgcattctcccacgcgttaacatcgtttctgagcgctaccacattggcaaaatgaccgctgacaacgttcggctgatgcaccgttttaatcagcttcctgatatgtcgaaggaagatattgatctgctggcgcaggatgtcgcgacgttcatcactatggaaatcagcagcatcaacgatgaaatgccggaagccggtgcgctgaaattactgcacgcactttatgttcgtgcctcggcaattgccaaagcattccgccagtcagcgccagactttgaaaagttaatgcgtcattgtttcgaggagacaaaggcagccgcatcgctcgccaaaatgatgtctgatcagtggtgggcgcgtcgcttgcgccgccatgcggctgagtggcgcgagcatttgcatattgccctgaatcacgtcagcaaaaaggtcagcacttacgccagcaaacagcttatccgtgactggaaagagcagaagcgccgtacgcgggaattcctgaagtcgatggagcttgaggatgaattcggcaaccgaattagcctgatagacaaatactggggcagtgtggctaacccggccattcgtcgtactgaaatgatggtgcgcattcgtgggtttgaaaacgtctgcaatgaactggggtatgtgggggaattttacaccatcaccgcgccatccaaataccatgccaccactattcacgggcaccgtaaccgtaaatgggacgggagcagcccggccgatacgcaggtttatttgcgtaaagtctggggacggatacgggcaaagttgcaccgtaatgatttgcgtgtgttcgggatcagggttgctgagccgcatcacgatggaacgccacactggcacatgcttctgtttatgcgccctgaagaagttgagcaggtgcgcggtattttgcgcgattacgcgatggatgaagaccacgccgagttgattacggataaagcgagaaaggcacgtttccacgccgaaagcatcgatccggaaaaagggtctgccacgggttatgtggccaaatacatttctaaaaatatcgacggatacgcgctggatgaagaactggacgacgaaagcggcaagccgatgaaagaagcggccgctgctgctgctgcgtgggcttcatgctggcgcatccgccagtttcagtttgtcggtggtgctcctgtcaccgtctggcgtgagctacgccggatggccgatcacgatacggccatgggcttaagtgtggagtttgctgccgtgcatgatgcggcggataacggcgactgggcgaaatacatcaatgagcagggtggtccgtttgtcagaagggacgaactgattgcacgcacctggtatgaaacaggccaggaatttaacgcatacggtgaggagatcgtgcgggttaagggggttttctctccggttgttggtgcaggttctccgattctaactcgactcacaaagtggaagattgttccgaagttaaccgccgatcaggcggttgcagttagcggcgcgaatgcgccgcctaggagttctgtcaataactgtacggagggtggaacccggagacggttaaaactggaactgaaccagcgaggttttgccggaacggatgacgaaatcggcattctcaggcgcggcggtggtcttaaatttggccgttctgccctgatttacagacaggggcggttgcaggagaagcggaataatccggaagaggaacaatggccaggctggcagtga

SEQ ID NO: 169708 - DNA, 339 bp, Enterobacter cloacae
atgaagcaccgttacacccgagattgtccccgtcctgattatgatgaaaagatcacgaaatggctgaacacgcttgatattgatgacggaatgatgagctatcccgtggctatttatcacgacgggtacatttaccgcgtgattacaggccacggaatgagtgaatatgtttctatccgtaattttttgggtgagattggactgatcaaccttatagatgatacggccacattccggggttatgatgccgtgatggccattccagatgtaaaagcagcaatggctaaaggcatattcaggatatctgacatccccaaaaataccgctccagctaagtaa

SEQ ID NO: 169709 - DNA, 627 bp, Enterobacter cloacae
atgcgaagtttaaactcactccgcaaaaacatgcaaggtaaaactttcgtgaacctacatattgatttttcccaaggcggtgccgaagttcttaatcgtgttattcaggcttatgggttcagcacaaaactagcgttagccgatcatctcgaaatagctagtagtagtctggcgaatcggtacaagcgtgattttttcccttcagatatcgtcgtgagatgcatggctgaaactggggctacgcttgaatggctggcaaccgggcaaggaaggaagtatgaaaatgaagagatcgacattctgaaaatgccgcggcgcaaaatcgttgacggactaatttatgaagcaggggtgtacatgctggataaggtctctttcttacccggagtacctcttcctgcctcacctatatgtgtggtggaaggtaataaccagtttatcgttgatacatctttcacagaagtttatgacgatcagtggctggtagaggtagaaggtaaaacgagcatccggacacttacacgcataccagttaagaaagtaagagttagcggcgttggtatggcctttgattgtggcattgacgagataaacgtgattgggcgcgttgtactaacgattcattga

SEQ ID NO: 169710 - DNA, 1023 bp, Enterobacter cloacae
atgacagtaagaaaactcagtgacggccaatgggttgcggacttctatacggtgaaccgcagcgagggcaaacaaggcaagcgggtacgtaaaaagttcgcgactaaaggcgaggcgttagcattcgaaaattacactcttcagaaagtggaggaaactccgtggcttggaaaaggtaaggataagcgccgcctctcagatatagttaacttatggtacgaacgccatggggtatctttgcgggatggtcaaaaacgagtacgttccatgctttgggcagctgagtgcatgggctctcctctagctactgaattttccgcccagttgtttacggcttatagggctaaaagacttgatggccattttgcacgaactaagcgtatagcggaggtgtcaccgcgtacaatgaacctggagcacgcatatttccttgcagtctttaatgaattaaaacggcttggagaatgggatgctccgaacccgttagaaaatgttcgccagtttagaactgaagaaagcgaaatggcttaccttacggcagaacagatcagtaagctgttaaatgaatgccgcattagttcctccaaagatctcgaaatggtagtaaagatttgtcttgctacaggcgcacgatggagcgaggctgaaaacctaaagaaaagtcagataacaccgggaagaataacattcataaaaacaaaaggtaagcgtaaccgcaccatcccgttagatcctgaaatcatagcggaattgccaaaaaagaatggctctctgttcaagccatgttataacgctttcagaaaggcaattgagcgaactgggatcgaattgccacctgggcaactgacgcacgttttaagacatacgtttgcctctcattttatgatgaatggaggaaatattttagttttacagaaaatcttagggcatacagacattaagatgacaatgagatactcacacttctctccagatcatttagaggaagctttatatcttaaccctttggccaagacattatga

SEQ ID NO: 169711 - DNA, 744 bp, Enterobacter cloacae
atgaacataaacttaaaatctcaatcatggttgatgctatacacatacattatcgcaaatgggctactttattcatttttattttggcaaggtttcgaaataaacatattgcaatatgtatcgccatatgatcttttaccctcaataatgtttatattgatactccctttattaatagtggggatttacttctcaattttcgctttgacgataccttataacgaaaaaatagataatatttttaatcaaaaacatgctttggcctataaaagaatcaagttcacgttcagactacttatattttcttcagttgcattatacactatttacagcctcttctttaaagaggggtttgatagacaactttctatagtgatgattattacatacatccttatctggcctatacaaaagcgaacaacattattcgcagataaaggaaaactaagagatttatatattggaacggcaatcatgttacctttattactatacatgttttctcaccttagagtagaggcaataaaaaaaggttggtattcatatattgttgaatctgattcggattgtttaaagtctaatggtgacaagtttagatttatttcaagtataggcgacaaagcatttgcctattctttgagagataattccttatgcgtattcaaatataactaccttcacctaaaagctgaacatgcgttgggagaacctgaaaccaaacaactacagccgaacacgatataa

SEQ ID NO: 169712 - DNA, 573 bp, Enterobacter cloacae
atggaagaacgaaaagcaacagaacttgcttttgatgaagagagaaaagaaaaatttattcagcgtttacgttcgctgattggtgcccgaagcgtgcgttcagcagcaacagattggggcatgtctttttcaacacttaacaactacctcacgagaggaacagaaccgtcctttgcagccatgcaactgatcgcatctaaggagcaggtaactctggattggctggcgttcgggaatgacaggagtgattccaatatgaatcagtcggtgattctggacgaggcgcacaggagttctgctaacttagcgcaaagcacctggagcatgattttcgaaacgctaaccccagaagagcaaaaagaaattttagatttttgcttaaaagagggggctaggagtatggttggattagtcgcgagcgcagcagctacagaccgaaattttatgagcttatccgcagcagacaaagaacgccttttaagacttaatgagcaactgaaaaaagggccatctgaaggtgatagcggcgtagccgaagcggacctacaaagtgataccaagaaggtcggctga

SEQ ID NO: 169713 - DNA, 231 bp, Enterobacter cloacae
atggaaagaaatgaagtcattcccgcacggggctggcacaacgtggacattgtcggtgagcttcataagcgcaagctgaccttacgtggactctccgtcagcgttggcctgaagccagacacactgaaaaatgcactggcgcggccctacccaaaaggcgagcgcatcatcgccgatgctctcaatgtagatcccgcattaatctggccagaccgttacaacaaggactag

SEQ ID NO: 169714 - DNA, 2079 bp, Enterobacter cloacae
atgtacgtgaccatcagtgagctggctggtcttcccggactgccagcaacccagcaagggctgagatacagcctgaaaaaaatagcggggaacaccccggagctcgtccgcaagcgtgcaggtaccaaggcgtttgaataccacatcgattgcctgccgcaggacgtgcagaaagtcctgcgcgcccgtcaggtgaaaaccatgatggccacgcaaccagtggacgatgcggctgtggctgtcacccctaaagccaaagctgaggatgaaggaaaaatcgcggtataccgcaaatgccctgcactgatggaagagaaactgggctcactgacatcggcacagaaacagactgctgatgcacgaatggcgctggtcactgaagtgatccgcctgggtcagttaccgggtttcacccgtgcgaaagcactgcgcgaaatcgtgcggcaggctcagtctggtgagcttccacagcgactgtctgacgcagctgctgcagcaaatgccaaaaaagggtcatcacgctcactgagcgaaatatccctcaagcgctggctggctgattacaacaaagcaaatacgcctgcagagcggttaatgctgcttgcgcctggcaaacgcaaggcggtaaagccagaggaaattaagtggttgccagagttccttcgtttttaccgccgtcccgacgggcgcggcatccaggaagcctatgatgattttgctctcgactgggcgcagcggtttcatgacgacgtgctgatggccagtgccatcccgtcttacgatcaggtgtgctatgccatggctaaattaccaattgtggtcaaacaaaaaggtcgggtgacagggagcgagttccggcagtacgaaggctttgtacgccgtgactgggagtccctgccagtaaactacgtctggattggggatggtcacgggatgaagatgaaagtggcccacccggaccatggcaaccccttctctccggaggtaactttcatcatggacggatgctgtcgttatatcgtcggctggagtcttgcgctatcggaaagtgttattgcggttgcggatgccatgcgccacggcattaagaataacggcaagccgtttctgtactactcggataacggtggcggtgagaccaacaacacttttgatgccgatatcacgggtattcttccccgcctcggtatcgatcaccgtctgggcatcccagagaacccacagggccgcggcatcatcgagcgcctcaaccgcacactggccatgcgtatttcccgtcagttcgctacctattacggaaccggcgcggaccgtagcaccgtccggcgcaccacaaaggcactgatgtccgctaccaatgcagtggccaaaggtaaggagttgtcagttaaacagcagcagactctgcgtgacctgccttcatgggatgcgctgattgctgagattgagagcggcgttgagtggtacaacaaccgaccgcatgagtcgctgccaaaacgtggcaatggtgaacatttcacccccgctcagtttcgacgctacaagcaggaaaaagaaacaactgaaattgaatggttgtccgatctcgagctacgcgaaatgttcatgccgcagattgagcgtacagtcagtcgctgtgaggttcgcctgtttaacaatatttattactcagccgaactgaaccacgaacacggcaataaagtcctggtcaattacgacatccatgatgccacccgcgtcattattcgccgcatggatgggtcattcatttgcgaagctgtctgggatggcaataaacgccaggcattcccggtcaccgctgagtaccaccaacgccagcaacgcatcaaaggtatgcgcgagcgcggagaggagaaagtcaggctggctgaggccgagaacgtccacacgctgccagctccagaagaaaatgactggataagtggcaatgtctaccgcccgcgcatggccgcgccagccgcactcgccgaagcggaagaggctgaatatattgatgatgaatacctgaataattcactggatatgctggagcagaataagcgtaaaaacgttatttaa

SEQ ID NO: 169715 - DNA, 948 bp, Enterobacter cloacae
atgtctgatgtgaatatctctgatattcgcggggttctgcgcaacctcgtggaagaaaaagggctgacgtttaataaagtagccaaagaaacggggctgtcctccggcaccctcagcagctttatgaatggcaaatatgccggtgataacgatcgtgtcgaagaggccctgcagcgctgggtcagcaagcagttcgccgccgctgagttcccggagcctccgcgctttattgagacgccgacggtaaaacagatctggaccgcgtttcgttatgcgcatctgacagagtgcattggcgttatctgtggtaacccgggggtgggcaaatccgaagcggcccgtgaatactgccgggccaatgacaatgtgtggatgataactgtcacaccagcctgtgccagcgtactggaatgcctgacggagctggcatatgaagtcggtatgaacgatgccccacgccgcaaaggtccgcttgcccgtgctttgcgccgccgccttgatggtacgcagggccttatcattattgatgaagctgatcacctcggagccgaagcacttgaggagctgcgccttttacaggaagccacccgtgtcgggctcgtactgatgggcaaccatcgcgtctactccaatatgaccggcggcaatcgtacagttgaattcgcccgtctgttctcccgcatcgccaagcgcgtggccatcaataaaaccaagaaagcggatgtcgcggccattgctgatgcctggcaaatcaagggcgagaaagagcgccagttgctgcagcagattgcccagaaacccggggcactccgcatcctgagccactcgctgcgccttgccgccatgacggcacacggtgccggggaagaagtaaacgaagcctacatcctgaaagccttccgcgatctggatttggacgttgatatttctacgttactgaggggttaa

SEQ ID NO: 169716 - DNA, 240 bp, Enterobacter cloacae
atgtttcctgaactgatttcgacacacgtgcagcaggcaaaggccacagaagccattctcaatcggaaagggtgtctggtgaccggctttcgccagacccgcacccgcccggtcctggaggtctcatgccctcccgctgagctgctgcacagcgctgtgcgtattgttgagcgcagcaatagtggctcccgctccatctgggtaaccagcttcaacggttgccggattatctggaggtaa

SEQ ID NO: 169717 - DNA, 288 bp, Enterobacter cloacae
atgggtagagcagaacgtcgtagctggaccgcgtatgaactctcggtaattgagaagcatgccgggaaattatctttgcaacagattgctgagcgtctcggccgtagtccggcatcagtcagttcaatggccagtcgtatggcgctgtcgctggctattgatccagttgatacgcatgacgcctggctgtgctgtgagctttataaagaaggtttatccattgcagtcattgccgaaaaaatggaattaagccgccgtattgtttcaaacatcgtatttcgtggataa

SEQ ID NO: 169718 - DNA, 258 bp, Enterobacter cloacae
atggcaaaagtaatttttgaatttaaaagtgatttcaccaagcgcgtagataaaggcgtaatggacggattttcggcatccgttgaagtggaatttgatgacgataaaaaaacatctgcaggtcttctggcgctggttatgggcgatattcgcaaagagcttatccagatgggcatggatgagctcgtgaaaagactgcacgaaaacggtatgccagcagagcacggtgtttatgccggtgaggccactcagcattaa

SEQ ID NO: 169719 - DNA, 618 bp, Enterobacter cloacae
atgaacaatacagaaagcactccagcgggttaccgcaccaatgcgcaggggcatcttgttcccgagtcgcaaatcaaaccactcgacaagttgcgtgacgaagtggtcatgaacatcatcgaagctgcgcgtcagcagcgccagttgctggttgaattcaagttgggatccatgcagaaaatcactgacttcatcgacctgtcctcttccgagtacggcgtggagttcggcggtaccaaaggcaacgtatcactggtcagcttcgatggccgttacaagctggttcgcgctgtgggtgagcatcgcgtttttgatgagcgcattcaggctgcgaaaaagctgattgatgactgcattggtgagtggtctggcggcgcggatgaaaagattatggcgctggttgatcatgccttccgcgtcaataagcagggcaaaatcgacattaatcaggttctgggtctgcggcagctggatattaacgacgcaaaatggaatgaggcaatggacgctattgccgatgccattcaggttaccggcaccagccagtatttgcggatgtacgaacgtcagagtgatggcagttataaacagctgtcgctggatttagccaaactttaa

SEQ ID NO: 169720 - DNA, 480 bp, Enterobacter cloacae
atgaataaaaacaccatttacgattctgctttcgggctctgggggtatgaccgtcaggtgctggccaccgccgaagagtgcagcgaactggccgccagttgcacccgcttcattaaccacaaatcgaatgccgcccgtgtggccgaagaagctgctgacgtggaaattatgattgaacagctgcgccacaacggtatgaacgacatgattgaaaagagtaaggcccgcgcactgacccggcttgcgcagcgtgttggtgttgaaactcccccggtcaccagcgccaccccgtacgtctcgacgctactgaaagatgggctggagcagtttgagatggccgaggcgctgtatctcgatcgtgaaaccagcaatcgtctcgcagcagcgggtctgcgccgctgcattggcctgctgatgcacgccgcacagttgatgattcgggaacagcaacaggctgagcagcggagggatggaaaatga

SEQ ID NO: 169721 - DNA, 243 bp, Enterobacter cloacae
atgattatctggagacgcgttccgcgttcagtgatctggctgcttctcaatcctcatatactggcaattgttctgttgagtgcggtgctttcacttatggctgcaattagctacagagtcgggcagcacctttgccgtctctcgaaccgtgttcgctgctggaacaccgacagcgataacaggtttctgacatggccaacctggtgtggcagtctgattgactggtgtaaggtggaaaaatga

SEQ ID NO: 169722 - DNA, 549 bp, Enterobacter cloacae
atgagagctaatactatcaaacttatccacgtagcccgtcgctccttggggctggatgatgaaacctaccgcgccatgctggccagtatcgttcctggcaaatccagctgccgcgatatgtcgcctcccgaactgcagaaggttattaaagcgatggaggccagagggttcaaagtcaaacctgcaagcaggccacggcggatgtctaaaccgtctgcagtcagcacgaaaatccgcgcagtctggagtacgatgtttgctgagggttttattcgtgacggcagtgatgcagcgcttgatcgcttcgtcaaacgccagaccagtcagatgaatggcggtcagggggttgccagcctggagtggttgcggggcgagatggaagttgcgtttcttgagagtctcaagcaatggcacatccgcgcgataaaaaagactctttcagatcgtgggttgtccctaccagccagcctgcgttctggcggtgaggtacgggattacgacaccatttgcagtatgtacactgaaatgacgaaagggcggaagcaatga

SEQ ID NO: 169723 - DNA, 393 bp, Enterobacter cloacae
atgaataacgatctctttggtgatgttcgtgatgacagcattcttgagcatcttgatgatgaggttgagagctcgcggttcccgtcaatactctcagagttgaatgcgctgttccgcagcgaactgatgcgattgggttacgatccgaaacactcgattgagctggtagtggcagtcagcagcaaaatgggtggcatgcagttttatttgccacggggtcaggttcttgagcatgtagttcgggacatgcgcatctggcatgattttaagggggataacatccaggaattagttgaacgctaccgcgttacatacaaaacggtgtataaagctattaaacgaatgcgtaggttagaattgagtaagaggcaatattctctggatatggagtaa

SEQ ID NO: 169724 - DNA, 324 bp, Enterobacter cloacae
atgggcggtggagtgttgattgacgttgttgtcattatctgtgttttttgggttttttttgatgcaagcaaccacaatatagggagctatgttgttgcggatagcattcaaaaggggtacagaaagggattacatccagtagcgtgggccattttaagttttcttatccttccttttttcttctatctggtgaaaaggaaatctcttttagatgctgctaaagaaaacccagcagttacagataaaagccttagctttattgttttgctgttacttgcggctgcgtgggttctatatagctatcgcgagatattatttaactaa

SEQ ID NO: 169725 - DNA, 582 bp, Enterobacter cloacae
atgacgacaccactgctttccccttcctttcaacacgcactcgacttcgttcttgccaaagaaggcggctatgtcaacgaccccaccgacaaaggtggtgaaactaaattcggtatttccgacaagcgcgatggtattgccgatggcaaaaccgacgtgaatggtgacggcaagcctgatacggccattaaagacctgactcctgagcaggctgctcaaatctacttccgcgactactggcaggcagcgtactgcaccgactggcctgatggcatttccctcttcgtctttgactcgtccgtgcagcatggcgtgaaagccgcaattcgtcagctccagtcggcagcaggcgtgaccgccgatggcattgtggggccgaacaccacccgggctgtcatttgcgctgacccggaatggctgttaaaccggtgcttcctgcgccgttcccgcttctacgccgacatcatcaaatcaaatgcttcacagggtaagtacctcagtggatggtttaaccgtcttgatgaactggcgaacgcctgtcaggaagttatcggcggttcagtttctgttacccggagctga

SEQ ID NO: 169726 - DNA, 219 bp, Enterobacter cloacae
atgggcaaaggctgggaaggttcaatgcgccaggggcggcgtgaccgcctgcgtcaggaagtgctgcaccgggtggcaaacgggccacctcctgttccggttgattacaccggccacgatggaacgcacgccagtttctatcgcaaaggctgggactccgttgatatcagagacatcgtctggcagtgccagcgttataaggaaaaacactgtgtttaa

SEQ ID NO: 169727 - DNA, 408 bp, Enterobacter cloacae
gtgtttaaatcgtttgatacgacctggttaaaacaggcattactccgcgtttgtcagtccggctggaccatcctggtgctggcaggcatctcaatgtttctgtgtagtttccacggacgacctgccttcatggtgtggtggctggcattctccggggtggtactgctggggttcagtatcttcctgggtaaccttccatatcgtctgattcaggcagagcgtcatctcaatcgttacgcttatttctggtcgtgggttatctgggcgggcggcttcatttgccttttacttagttcactatatgcaacacccgctatccttttacttctttttccggctggtgcttttcttggcgtcctcttctgtttgtgggtttcgcgtaaggggctgctcgcatggatccagtaa

SEQ ID NO: 169728 - DNA, 606 bp, Enterobacter cloacae
atggatccagtaaccctcaccaccatcgcttccgtgctgctcaaagctggtccctctctcgttcgtaccgttggcggctggtttggcggtgatgccgccaggactgcagattccgtcgccggcattgttgaaaccgttaatggagccatcaacccccaggaccagcagcgggtgcttgagcagaagctggcccagttgccacccgagcagttcgtccagcttgaatccctgagagtccagctggaacagtatcagcttgagcgtcagaaggcgctgctggcagaccagcaggccgcacaccacgaacagcaggaaaccatccgcaacggtgacaacgccaccgacgaatatgtccgccagacccggccacgtatggcgcgactgtcgctctacagcagcattgcttatgtgatgctgatgtcgctggggcagcaggctggcgctattgcagccgggtttggtcatgttttttccatgccagcccctgactgggatatctccctgatgctggcgacaccggcgctgggatatctcggtttcaggacactggacggctttgcccgatacagcaaatccagtaagcacaaggcggtgatgcccaaatga

SEQ ID NO: 169729 - DNA, 231 bp, Enterobacter cloacae
atgacagattcctttgatcacgccagcaacctcgaaaccgaagaacgacagcgcgtgttaaacagccatttaaaccgggttaaagagcagcctgacgaacccggtttctgtaacgactgcggtaatgacattccggccgacaggttggctgcctgccccgatgcggtgacctgtttcacctgtcaggacatcagagaaaaaagggggaagcgtggactgggaagtcgttaa

SEQ ID NO: 169730 - DNA, 303 bp, Enterobacter cloacae
gtggactgggaagtcgttaaaggtaactgggcgatcatctgggcactgttcatgtcaggcgtgaacctgctccatcttctgctggcgaaaacctatgcccgccgtgaggagatggagaaagtcagcggccggctgaacattcttgaaaaagctgttgagggtatgccaacccgtcaggaactgcacaacctgcagcttgatatgagcaatttgcgtggtgagatacgtgaattctccggcacgctcagacaggcatcccgcatcagcgatttacttctggaaaatgaactgaaggacaaatag

SEQ ID NO: 169731 - DNA, 288 bp, Enterobacter cloacae
atgcgtgatttactcgaccaggaccagcgtctggtccttttgcgatctcttcttgactgtggcgacagtgccaatgagtcaatcctgcagacctgtctgcagacatatggccataaggtttcccgcgataccgttcgcacccagcttgcctggcttcgtgagcagggcctggttacgctgagcgatgtctcgggctgctatgtggcggaaatcaccggccgtggtgatgaggtggccagcggtcttgctaccattcccggtgttaaaaaaccacggccacgggggtaa

SEQ ID NO: 169732 - DNA, 276 bp, Enterobacter cloacae
atgacaaagcccaagccactgacccggggagaacgagaggttatccgcaaacttgccacggtgattgtctgcgctgacgttgaggtcaacatgatcgccaaattttatgaagagaaactggggaagccctacgatcgcaacgcgcccgacagctatctcaataccttcctgaacagcgacccggaatgtaaacggcttaaccaattgctgaagcgtgatattgaaacctgccgcaacgacctcgcagaaggtctggggagggagcttggcaaatga

SEQ ID NO: 169733 - DNA, 1593 bp, Enterobacter cloacae
atgacctatacccagcaggaacagttacgtaatcagtctgcggccgcgattatttccggccgttttgacgcagatcaggtactgctgccttatcagcgccggtggattgcggatgatgcccagctcaagattgcggagaaatcgcgccgtaccggtctgacctgggcagaggcggctgatgcggcactgaatggctccctttctgccagtgctggcggtagcgatactttttacgtcggcaccaccaaggatatggcgcgagagtttatcgatgcttgtgcgatgtgggcaaaggcctacggtctggcagcctctgataccggtgaagaagtgcttaacgatgatgacaaagatatcctggtctacgttatcaactttgccagcggcttcaaaatcaaggcgctgtcctccaacccgtcgaacctgcgtggtatgcagggcaacgtcatcattgatgaagccggtttccagaaagaccttgctgcggtactcaaagcggcactggcgctcaccatgtggggggcaaaagtccgccttatctccacccacaacggtattgataacctgttcaacaccctgatacaggacagccgcgccggtaaaaaacgctattccgttcaccgggtcgatatcgaaacggcgattaatgaggggctctaccggcgcatttgccaggtaaaaaaagacacctggtctgcggagaaagaagcggaatggctgactaacctgctgagtgatacggccaccgaggaagatgcccgggaagaatattactgtgagccgaagaacggcggtggcacgtatctgccacgctcgatacgtgaacgagcggctcgcggctccggccccgttctgcgcttcaccggaacggctgcgttcaatgccacgcccgaagggattcgtgcgagagagatgcaggagtggattgagaaggccattcagcctgagctggataagcttccgcaaaatctccgacactgcctcggagaagacttcgcccgctccggccacttgacggtttacgccccgatgacggtcaatgatgacaccacccgtatcgtgccgttcctggtggaactggccaacgtgccctacaagcagcaggagcaggtgctgttttatatctgcgatcgccttccccgcagggatggcatcaagctcgatggccgtgggaacggtaactatctggccgagcaggctgctgaacgttatggcgatgaggttgaagtggtcatgccttccgttggccactatcgggagaacatgccgcgctttaaatcggcctttgaagacgacgaaatggtgctgcctaagcatgaagatgttatcagcgacctcgggcaaatcgtcatccagcgcggtacgccgggaattgatgaccgggagaataccggcagtgatggccacaagcgccacggtgacagcgcctatgccatcttcctggcgttcctggccagtaaagaagagtgccgtcggtatgagctgcaccgtctcaataaaacccgggataccagacaccgtccggacggcgatgacgatcgccgtcagatgcatctgacccggggtcttaaaaatcagcggggattactctga

SEQ ID NO: 169734 - DNA, 1575 bp, Enterobacter cloacae
atgcttaaacaacttgccggcgcggttcgccgccttctgcaccccgcgacaggggatgctgttgtcgtcaatgacactgatataacagaggctgaggcgcgcggccgcagtatgagcgtccgccgtccttcatcgggggtcagcgtggccagcaccttatccccgagccgtctggcgggaatactgcgcaatgccgccgacggaaatgcccgtgattacttcatcctggcagaagagatggaggagcgggacctccattacgccagtgtgcttcgtacccgcaaactgacggtggcgggaattgtgccaacggtggtcgccgccagtgatgatgacaacgacgtgcagctcgctgacgcagtacgccacctgatggagcagccgcaggtgcctgagctgctcttcgacctgcttgacgggctgggcaaaggcgtcagtgtctgtgaaattctgtggaatacgcgggaggcgatgtggaagccccgtgattatgagtgggtggaccagcgtttcctgaagccagacctcgataccctgcgcgagttccggcttattaccgagaaggagcctgtcgagggtgagccactgaatccgggcaagtacattgttcatcagccccgcctgaagtctggcctgccgctgcgcaacgggctggcccgtctggttgccgtgatgtacatgctgaagtcattcaccgtgcgggactggtgggcgtttggcgagaaatttggtctgcctatggtcgtcggacgatacggtaacaatgccagccctgagcaaatccgcacgctcatagatgccattgcctcactggcgtctgatgccggctgcgccattcctgagagcatgaagctcgacatggtggagacggcgagccgtaccggcggtggcgcactgttcaaagagatggccgactggtgtgatgcccagaccagtaaagcggtgctgggccagaccatgaccaccgatgacggtagttcccgggcacaggccgatgtgcatgacagggtgcgcatggacattgcgcgttgggatgcgcggcaactggcggacacgctcaatgagtttctggtacgccccttcatccagttcaactatggtccccaggaaaactacccgcgtatcgagctgcgactcagcgaacctgaagacctgaaggcattcgtggatgcactgaccccgctgattgaccgggggatgaaggttcaggagtcggaaattcgtgacaagtttggtctggcagagccggaagccggtgcaacggttctggcaccgtcaagtacctttaccgcgttcgcctctgcaacggctttgaatcgcgagcaaattgccctcaaccgcagccaggaagatgatattgatgctctggtggccgaaggcctcaaagactgggcgcgtaccggtgatgccttcaccagtccggtgctgcaactggtgaacgaggtggacacttttgatgagttccttgcccgcctgccggagctgcagcagtcactgaagccggatgagttcgtgcagcagctggcgctgctgagttttaaagcccgtgcactgggagatgttaacgatggctga

SEQ ID NO: 169735 - DNA, 852 bp, Enterobacter cloacae
atggctgaaccgtccattgccccgaaggaagcactcgcctggctgaagtccaaaaacctgaagccggggtttgattatcgcgatgtctggcgtgacgagcagagcgtcggctttaccgtggcaaagatgacccagctcgatttgctgcaggatgtgaagacgatcctggaggaggcgctggagaacgggcagacctttgcgcagtttcgtgaaacgctcaaacctctgttggtgaaacgtgggtggtgggggcagcagatgatggatgacccgctgacgcaggaaacccgccaggtgcagctcggcagcgacaggcgtctgcggaccatttatgacaccaacatgcgcacggctcgcagcgcgggtcagtgggatcgtatcgagcgtaccaaacgcgccatgccctatctgctttacacgctgggcccgtcgcgcgagcaccggcacgaacacctgcaatgggctgacctctgcctgccggtcgatgatcctttctgggccacgcacattggccccaatggctggggttgtaagtgcggggtacgacaggtcagcaagtacgagtaccagcaactgcagcagaatggcgtgacacgcaccgtgcagcagctcgatgacaacggcaatccgacaggccatgtcacgcgcaactctgtgccggtgcgtaccgtggcaccggcagtcaaacgggtgaaatggctgaacaaacgcaccggtgaagaagagatggtgcctgagggtatcgacccgggctgggactataatcccggcactggccgccgggtggagcttgagcgccagctgcagatgaaacaacaggcctttgacacaggtgagcaagcgaagcggtaa

SEQ ID NO: 169736 - DNA, 972 bp, Enterobacter cloacae
atgagcaaatcgctcccgcaaatcgaacttctggcgctgtgcttcgaactgccatcggctgacgatggtgcgccattgcctgagtggctgccaatgataccggcgggcacgttcgccggccgcgatggtcgctcctgggtgaacaaccagcccgaagcagttatcagcgccaccctgagctatccaaagcttccgtttgatatggaacacgccacagagctgaaaggcccaaagggcgaagaagctcctgcgtatgcctggcttgacgactatcgcgtccgcgatgacggcgtcattgaagctcacgtggaatggacgcccgatggtgaagcgctggtccgtggcaagaagtaccgctattacagccctgcatttggatataccgccgacggtcaggtgacccgcatttccagcgcgggcctgaccaacaaacccaaccttgattttcctgcccttaactcggagaaccacgagatgaccctacctgtccagattgtgacggtgctgggactcgctgctgctgcgtctgtcgatgacgcggtaaaagccatccagcaaattaaagaccgcgaaacggtggcgctgaaccgcgccgaaaacccggacctgtcgaagtttattcctgtcgagacgcaccagctggcgctcaaccgtgccgagagcgcggaaggcaaactgaaagtgctggacgataaggctgcagttgctctggtggatgccgccattgccgacggcaaggtcgctccggccaaccgcgagatgtacctcgccacctgtcgcagtgaggcgggtcgtgagcagttcgccagcttcgtgaagactgccccggtactggtcagtgcagacccgactaagggcaaggacgacaaaggcaacgtcaccctgaatgaagccgagattgccatgtgccgttccatgggggtcacccaggaagagtttctcgccgcccgtaataaagaaggagtccgttaa

SEQ ID NO: 169737 - DNA, 897 bp, Enterobacter cloacae
atggccatcacgatcgatgcaagcattctcaatgccctcagcacgtccctgagcgctgcttttacgcgtggcgtggggcgtatcaatcctcagttccgctcggtagcaacggtggtgccgagcagtggcgcgtccaacacctatggctggctcgatgatttcccgggaattaaagaatgggtctccacccgtcagcttctgacgttaaaagagatgggttacagcattaccaacaagacctgggaaagctccatcaaggtcaagcgtgaaaaaatcgaagatgaccagcttggtcagtactccgtcattgccgagcagtttggccgcagcgtcaccatgttcccggactcgctggtctttaagttgctgtgcgacggtttcaccaccacctgtttcgacgggcagtacttcttcgacagcgatcaccctgtcggtactggcacggccagcaacgttgtcggcacgccggcgacagacaccggtgaaccttggttccttgtggatgccactcaggcattactgccaatcatcttccaggaccgtcgcccgtttgatttcaaggcgctcgatgacctggacaatgaacacacgttcaccaataacgagttcctgttcggcaccgatggccgctgcaatgtgggctacggcttctggcagaccgctgtgggctccaaagccgcactgacaacggcgaactatgaagcggcagtctcggcgatgctcggtctgaccaaatccaacggtgaaccactgggtgtctctccgacgctgctggttgtcggtaagggtaaccgtgctgcggcgaaaaaactgattgaagccgtcaacaacgacgccggcgcatccaacatctattacaaggatgtcgatgttctggtcagcccttacgtcaaataa

SEQ ID NO: 169738 - DNA, 477 bp, Enterobacter cloacae
gtgagtggaaagaaaacaaaggcagagggtcagcaagtcactgaaaacagcactggcgcggcaccatcgccggaagtggcaccggttgttgttactgacaatccgggacatgagtcgccagtcgtcctgccagggcattaccttccggtgggttcacaacccgtcagcgtcgggggcatccagcctgatgtaagcgagccggcagggtccgacccgctggtgcccgacactgatgatgtggtggccctggaggttcgtgccgtccgtgataccggcttttatcgctgtgggcgcttctggcctcgtgagccagtgcatgtgtttgccagcgacgacccggaggcggataacgcagccaacaatgcccacctgggcatccaggctgactgttttatcagccatgaagatgctgcacgtctgaagctggaaccgatgctggttgtcaccgtacatgagacggtagcggagaaaccgtaa

SEQ ID NO: 169739 - DNA, 543 bp, Enterobacter cloacae
atggcgatttcggttgaggtcatgggtgctgaaaagctggcgcaaatccgcctggctatcgagaaactctcagacagctcactgcaggaagagctgctggagagcatcggggcgattgtggaatcccagacccgccggcgaatcagtgatgagaagaccagcccggccggtgaaaaatggcaggactggtctgaagattaccgcaaaacccggcacggcaaccagagcctgctgcagggcgacggtgggcttatggacagcatccagcacatcgtcgaacgtggccgcgttcgtgtcggttcgccgttgggttacgcgggtgttcaccaggacggctttgccggcagcgtttccgtcagtgctcataagcgcctcatcactcaggcgtttggccgtgccctgaagcacggtgtctggcagtccgtcggggcccacaaacgcctgatggatatgccgcagcgcgagtatctcgggctgtcttctgaaaactctgaagagctgatgcacgtcatcggcgacttctggcagggagtacttccatga

SEQ ID NO: 169740 - DNA, 603 bp, Enterobacter cloacae
atgaaccagcgtcccccgctgctgacgacaggcagcaccattgcggcggctgaaaacattgtggcctggctcaagcctgcgctacagggcgataacccggaccaggtgaaactcatcgagcgccatatcggccagttcaacaccccaaatgaggtgaagacttacctgtccgatcgtgatggctgcattcgcattgcggctttgcgtatccgtaacatccgccagcgtgctggcggcaccattggcgatgtgacctgggcggcctacatcatggccactgactcctgggcgcatccccgcgatacccgctgtgaagtgctggtcggcaagttggcccgccgtattgcctcccgggaggcggcatccggcatgaaggccgagcgggctgccagcaccatcagtgctgacaacatttactccggtggccttaacgagctggggctgaccatgtgggcggtgacctgggagcaggagttccggctggatgaagaaatcgatattaatgcgctgccggacttcctgcgactgggcgcaacgctcgcggtcaatggcggagaaaccgaaattgaaggcgtgattaacgtgagggaacagaacccatga

SEQ ID NO: 169741 - DNA, 201 bp, Enterobacter cloacae
atgatcaaactgattaagcccgcccgcgaagggttacgggtccgcaaatccaatggcgttcacctgaagcctgagggtgaaaacctgccaatgagcgcctggtggcaccgccgtcaggcagaaggtgatgtgactgtcaccgatatcagtgctgagccggtaacggctgagtcccagaaacgtaaagccggggagaaataa

SEQ ID NO: 169742 - DNA, 1479 bp, Enterobacter cloacae
atgtcacttggcagcattccggatgatatccgcgtcccgctggtatacatcgacatcgacaattcacaggccatgagcagcgcgccggcgcagtcccgtaaagtgatcgtgattgggcatcagggcccggccggcacagccacagcgctgacccaacaccgaatcaccagcgatggtatggcggaaacgctgtatggcaaaggctctcagctcgctgaaatgctgaagatccaccgcaaggcaaacagctataccgagacctgggctatgggcctcgcagacctgacaactggcgcggccgcaaaagcaacgctggcagtggtcggcactgcgaccgcagccggaacggtggcgttactggtgaacggtgtatcggttcaggtgggtgttgagaaaggtgatgatcgtgatgacgtcgcaacggccattatcgaagcggtgatcaaactgccttccactcaggtagcagccgcgctcaaggccaccacgacggacacggttgagctgactgccaactggaaaggtgtctgcactaacggcatggatgtgcgactgaattactatcccggcgagcagctgcccgcgggcattaatatcaccctgactggctttaccggcggaacgggaaccccggatatcacggctgtcgtcgcggcgctcggtgatgactggtacaccgatattgagtttgcctttaacgacacccagagcctcgacaaaatgcgcgatgagctggttgttcgctggggaccactgaagatgattgaggcccagctttgggcgggctatcgcggaacgcacgctgagagcggtacgttcggtgacgcccgtaatgactggctgatttcctgcatgtccacgaacctggcaccacagccacactggctctgggctgcatcctacggcggtatcgcatcctactatctggccatcgacccggcccgcccgctgcagacgctggttctgccaggcattctcccgccggcgaaagaagttcgctgggatatgcaggagcgcaacctgctgctgcatgacggcatggccacgcactttgttgacgccggcggcaacgtttgtattgaacgtgaaatcaccatgttccgggtaaatcagtacggcgatccggatacgtcataccttgatgtgcagtcgccggcaacgctcggccgcatccgatacatcatcaagaaccgcttctccagtcgctatccgcgtcacaagctggccggtgatgatgtgctggaactgctcgacccgggccagcccgtcatgacgccgaaaattgcccgcgcggagttgctggatattgcgctgaccgaactggtgccggcaggtctggtggaggattttgaagactataaagaaacgctggacgtcgatatcgatggcagcgatgccaaccgcctgaacttcgtggcgcacccgaacctggtcaatcagctccgcgtgctggccggtctcattcagttcaaacagtaa

SEQ ID NO: 169743 - DNA, 384 bp, Enterobacter cloacae
atggcacagatgagcgtcaaactgatccacggttttgtcacgggcaaaggtacggaagatgagactcgccacaccagtgttaccttccgcgaactgacgtcagaggatgtcattaattcccagctggcagcggagcgtgtggttatcggtgaaaatggcaaggccgtcgcttactgctctgaggtgcttatgggacttgagatgctgcgccgtcagattctgagtgttggcacgattcctgggccgctgtctgtcaaacaactgtattccttccatcctgaggatctggagttactcacagaaaaagcgggtgcaatggatgacttactggcggagaccggcaagcgggggcgacctgatgccgctggcgacggcgctcagtag

SEQ ID NO: 169744 - DNA, 1788 bp, Enterobacter cloacae
atggcaagccgcctcaccactgaaatcctcattaacctggccgggaacctgacggccaaggcccgccagtacggtgccaatatgtccgagttcgcccgccgcaatgaacgggccatgtccgtcgttaaggccaccaccgccgctgcaggacgtggccttgatgcgctgggtaatcgctatacaggcatgattgccggttttgcgggcggagccatgctgcgtgaatttgcccagacagatcgtcgcatcacgcgcatgggccttgcagcagaaaaaacgcgtgccgaaatggcgcaaatttttagcggtattcaggattcggctatcaaattccgggttgatgatagcgaggtcaccagtgctgttgaaaaaattggtactgtcaccggtgatattgattttggtgtcaagaataaagacaaccttgctgcttcaatagcagcctcaggtggcactggggagtccattggggggttgttcgctcaatttccaaaatttcaggtgacgagtgaaaaacaaacacttgaggcgatggacaccctgaataaactgggaaaggaaggtgcatttgagttaaaagatatcgctgaaaaaggggttcgcgcattttcaatgtattctgctgcgggcggtaaaggtgtaaagggtattaaggatgtcggtgttgcaatggaatctgcaattgatgccaccggcgatcgtgatacggctgccactgctgttgaaaatcttatccgtgatttgcaagcaccgaaagttgttaaggagttggggcgtaatggtattaacgtcttcggtaatgatgggaaaatgcgctcacttcctcaattaatggaggaagtagctaagcgttctggtaataaaggagccaaagaacaaaataaacgtctggtcgaagccggttttaatcaggacagtattcttttactaagtagtgtgacaactggtaaaggtgctgaaaatcttaagcgatataacggcgttgtagctgatggttcaggtattttatctgatgccaaatatgctgctcaggatttcacgtccgccatgaccagcctgaatgtgacttggaaaaaattcaccaacagtaatctggcaaagcccgtgcaggaattggctgatgctttgaattctgttgaccaggaaacagtccagcgctggctggaaattggcaaaaatatcactattgcagttggcggtattattgcggcacgcaaagcctttcagttagggaaaggcgctctggatatactgggtgtaggtaaaggcaaaggtataccaaaaggtgtttcagatgtgtttggttcaggagtcatgcccgtatatgttgtgaatatgggaaaaggagggatgggtggttctgaaaatggccccgatttgcctgatgtcccagataaaaaaccaccatcaatacattccgggttggtgacttctactattgcaactgctagcgaaattgcatcaatagttcatttccctgaatctgatgaccaaaaaaatgaattaattcgcaagattcaggaaaataataataggagcaccatgtggaatgatgtcaaagactggtttacgacagctggcaatgatccacaaatcgccaacccacaaccttgggcaagcctgcaaccacagaaccagccccccgcttatcccgccgttcctcagtccctgaagggtgagattcgcgtggtcgttgaaggtgatgcccgggtgaaaagcgtaaaaatggaccagccaggcatcactctcagcgcccagtccggcgtctctaacgtggagcagaactga

SEQ ID NO: 169745 - DNA, 1269 bp, Enterobacter cloacae
atggcaacaggtgaatgggaatccctgcgcgaagcatcgtttcgcaatgtaactttttttctggttgaggatgagggcaccagcggccgtcgtgcgatcccccgcgcctatcccaaaaaagaaacgggctggactgaagataatggtgccgtgctgacccagcagcaaatcaacggcaaactcctcggcaagaactttcaaaagcagttagaagcgcttttaagggcgcttaatacagcggggccaggcgaactggttcatccgtggtttggcatacagaaggttcaggtgggcaaggtttcccaccggctgagcactgaagaaggcggtattgcctatatcagctttgaggtattcgaggcgggcgaacgcctgttcccggcccccaaagaaaacaccagcctgacttccctcagtgccgccgatgccgtgaaagaggcgctggccaatggtgattactttgctgctctcgacgggctgggtgacatgaccgacacccttcttgatgacatgcaggggctggtaatgaacctgccgacgatcccctcagggctgactgactgggtggaccgtgcgagtcgtttcaaggacctcgcgggtgtcatcatcgcaaaacccggcgagctggttcgtcagttcaccagtctggccagcagtatccgggatatcgtgagtgagccgccatggtcactacgggtttatgatcagctcaaaagcaaatgggacggagagcgtgcggctgaggctgcgactaaaaacctgccgggcgacatgactgtcatcagcagttccccttcaaacggagtccagggtattgccagcagtgtgccggcaacggtcattgcaccatcccccgcattgcaggctaacatcaccgactttcgtcagatggtgatcgtcacgtcggtagtggctcaggctgaagcggtggccacaatggactttgccacatcaacagaagcaacagaagcaggtgacaaactggcgcagcagctggctgagcaggctgtgacagccgttgagaacggacagcgtgaactgtggcgtactttgcgcgatctacgttttgctgtagtgaatgatgtgcgggttcgtggtgcgcagctgcctgacattcgccagttacacaccactgtgacaacgacagccgcattactggcatggcgagaaactggcgatacagagacccgcgaagcaattgtctctcgtaaccggctgcgtgacccgtccttcattctgccatctacccccattgaggttattgagtaa

SEQ ID NO: 169746 - DNA, 1104 bp, Enterobacter cloacae
atggataattcgcagacaccggaagcggtggtgcttaccgtagccggtcagcagtgggatggctggacggacatgtcggtcaccagttcgctggacgcgatagccggtgagtttgatctgaccatcaccacacagtggtctgaagcggccccgcgaaccatcaaggaaggcttaccctgctccgtgaccattggcgctgataaggtgctaaacggctacatcgacgattttattccgagctatgatgccgaaaacgtctccatcagggtgatgggacgtgacaagaccggtgacctggtggacagctcggtagtgcataagtccgggcagtggaaaggcatgcgcctcgagcagctggcggctgaaattgcgaagccctatggcatcaccgtcatcaacgagactgacaccggcgaggccttcccgagcgtggtgctggaacagggggaaacgggctttgagctgctagacaggctggcaaagcagcgtggtgtactactcacatcgaatgccgacggtaatctggttatcactcgtgcgtcgaaaaaacgcgcctccgtggcgctggtcctcggtgagaacatcctcgccgcccgtgggcgcttcagctggcgggagcgtgccagccagtacatcgtcaaaggctcatcgagcgccggcggtgcagcatgggatgaccagcctgcaaaggtcatcggcggccgtcagatcagcatcgatgacgaggagattagccgctaccgtccgaagatactggtgaatgaagacagtctgacggtaggcggtgccagcacgcgtggtgactggtataaagcccgcatgatgggtgaagccaatacaaccgaaatcaccgtcgccggctggcgcgagaacggcgatactgggccgctctggaagacaaaccttctgactgatattcgtgacccgattcaaaacctcgacaccacctggctaatcaagtcagtgacgtttaccgagggcgatggtggtcgcatcgctgtactcgcgcttgtacctccggagtcgctcgaccttcctcaggctcaggctaaatccaggggcaagaaagccaaaaaagcaaaggtgaccgcaacatgggactga

SEQ ID NO: 169747 - DNA, 453 bp, Enterobacter cloacae
atgactatcggactgagctggcaaaatctcttatcacgcggtgatatcaccatccaacatgacggcctgtcgctcgacgacgggcttgtcaccttagtccttatctgtcttttcaccgatgcccgtgctgatgtcgatgatgaacttcctgacggttcaggcgaccttcgcggctggcccggtgacaccttcagcgattccccgtggggctcaaagctctggctacttgagcgcgagaaactgactgagtcagttcgtctgcgcgtcgaggattatgcccgcctgtccatgcagccactacttcgcgcgggttatgttcgcactgcagatgtctcggccaccatcgcggccgctgaccgcattaactttactgtggccctgactcgccctgataaatccctgctcaccattcaactgagccgccgctgggaggccaccgccaatgccgtataa

SEQ ID NO: 169748 - DNA, 1077 bp, Enterobacter cloacae
atgccgtataacgtaccgacattacgtaaactgatcgccgacggtgaaagggatattgagattgagcttaatattcctttattgccgccagtgggtgtcgaaaaggccattaatgtttcggtcagcagtcaggtgcgcgatttatatgaccaccagagctggattgccgaccagataattccgtcaccgaaatcagacgaccagaccattattgatacggctgcatccgaaggggttattcgcaaacagccgacatttgccaccggtcctgtcaccttcaccagtgcggccgcgttgccggttgataccgaaatgcagactgcaggcggtattgtctatcacgctgtcagttcatcccagccagtggccggggctgttaccgtgcaggtgcaggcggctgaagccggtgttgccggcaatcttcctgccggtgaggtactgacgctgctgtcacccctcgcgggaacggatagtaacggtattgtggccagcgccggtatcacgggcggggcagatatcgaacccattgacgagctgctggaccgtctgctgtttcgaaagcgtaaccctcccgtgggcggtgctgtccatgactacgttctctgggcgcgtgagctgcccggagttagtcgcgcctgggcctttgatgtatggcacggctccggcacagttggccttgcgtgggtttatgacgatcgcgccatcatcacgccgactgctgccgacagaacaactatggagacgtacctgttccgccacgctgacccggccacggggaactatgtcggtaagcccggtggtattgaagtctggtcggtggtgctgacgctgaaaccggtggctatgtccatcaaaattgcaccggacaacgactcaacacgcagtactgttcaggtcagcctggcggctttgcagaaaaccctgtctcccggccagaagctgcaggtttcctcccttcgcacggcaatagggtcatctgccggcgtcacagactacacactgtcggtcacggctgatgtaccggctacaaccgaagagcttattacgattggggcgattacatggctcacagcgtag

SEQ ID NO: 169749 - DNA, 576 bp, Enterobacter cloacae
atggctcacagcgtagacgactggctccatgccctgcagcaggtcttacctcgtggcaaagcctggccgcgcgagataaacgcagatttaaccaaatttttacgggcattagcacggcgtttaagccaggtagagacatcgggtgatgagctgctgtctgagatgcgccctgaaaccacctttttgcttcttcctgactgggaggcctatctcggcctgccagaatgcgaactgccgaacggcaccgtcgaagaccgccgcgcggccgttgtggagaagtaccatcgcaagggtggcctggctccctggcagattgaggatgtggcgaaggcgctgggttttaccgtaaccgtgcgggtgattctccctcaccactgcctgcgtgattgcatgtacccgctgtatcccgcgcgttaccgctggctgctacaggtggatgtccgggatattcagggcggcagattcacatgtatggataatgttatgacgccgctgttgactgaccgtgcccgcaatcttgaatgcgtgctgtcgaaataccggctggcaggcactaactatgaatacttttattaa

SEQ ID NO: 169750 - DNA, 588 bp, Enterobacter cloacae
atgtttcatgtcgataataattcagccgttccggtgatgcccgcagtaaagcctgtggtcagtgctgtgacgtccttctttaccgaaggcgggaacggcgttcctccaacttatccggggcctgactggttcaatattatccagagtgaactgttggccgttctggccgctgcgggtatcaccccagacaaagccagcaatgtgcaactccttgcggcgatgagagcgctcttcctcgatacatctcagaacggcgctgatattcaggacaaagcactctttctcaaaaatcttggttttgtaggatcgttaacttcacctggttatgcggttattccgctagggacgaaaaagctggtgattcagtggggatcggtaactgtaccgactgccgggtcagcctctgccacttatcaactggcgcttaacgcgggtctggcacagttctgtacgccggttgatgtttcgtcaataaataactaccgtgtgggtgtggccacttcaacaaatacgagtatcaccctggcatcaaccaacacgcaaagtgttaccggtgttatgtggctatcaattgggacgattaactga

SEQ ID NO: 169751 - DNA, 423 bp, Enterobacter cloacae
atgtttatattcagtgcaagtgaaaatatgttttacagcaaacttgatgagccatcatgtgaacgcgcgggtacgtggccagaagatgcagtagatgttgatgatgatgtgttcctgatgttcagcgggacgcctccaattgggaagcgtcgtggggttgttaatggcatgcctgcctgggttgatgtaccaccaccaacaacagagcagttcgtttcgcaagctgaactaaagcgacagaagttaattgaagaggcgatgcagtcaatcagtgtcatccagttgaagttgcaggccggaagaaagctaaccccggcagagacggaaaaacttaacagcacgctggactatatcgacgcggtgacgacaatagataccgctaccgcgccagatattaaatggcctgaacgtccggcggtgtag

SEQ ID NO: 169752 - DNA, 570 bp, Enterobacter cloacae
atgattattggatatgcacgcgtaagctcaaaccaccaggataccgagatgcagatgctcgcacttcaggcagccggctgtgaacaaattttcgaagagaaggccagcggccgtaacaccaaacgtcgcatcctgcgccatgtagtagcgatgctgcaaccgggtgatgagctggtactctggaagcttgaccgcattggtcgtgacgttcttcatgcgctggtcacgtttcaggagttgcattcacgtaacgtaaacatccgctctatcactgatggcgtggacctcaagtcagcatcggggcgctacaatttccgcaatattctgtcggcggcgcaatatgagtccgatctcaatagtgagagaacgctggcaggtctggctgtcgcacgctccaagggccgctatggtggccgtaggccgacattcactgacgagcattgggataaatttgggactgcgctgaagtcaggcaggactcacagggaggtatcgaaagaattcggtgtggggctgtcaacgttgtataaaaaatttccggggaacagctgttcaacttcggtcatgtga

SEQ ID NO: 169753 - DNA, 1107 bp, Enterobacter cloacae
atgtctgcaggaactatcaccctgacaaacgggtccgctattgttggcggttccggaacctcattcgcaacagaactcgccgcaggtgactttattgtctccactgtgggcggcgttgattatacgctgcccgttaaatcggttgagagtaatgcgcaacttacgctggtcagcaactttaccgggccaacgcaatccggggcggcctggtcagctgttccccgcgtggcactcaacatggtcactgccgcgctggtggcgcaaagtgctgaagccctgcgtggactgaattacgacaaacagaactggcaaagcattttttctggaaccggaaatgtaacggtaacccttccggatggaacgacgtggacggggccagcctggaatagcattaccacatccgttgcaggcaaggcggcaaaaggtgcaaacaatgacataacctcgctcagcggactcactacagcgctgtctgtagctcagggtggtaccggttcgacaaccgcatcaggtgctcgcacaaaccttggtttaggaaacagcgcaactagggacgttggaacaacttcaggtacggttgctgccggggatgatgcaagactttcaaagctaacggtggttacatcacctgcaggtttacaggttattggagctaggcttgatgctccggcaggaatagcctgtcatggaggggcaaactctaatgcaaccgtagatgtattttccatttactggacagcagcggctggcccgcacctatatatcaatacctcagatttaggtcagtttcagctgaacacatcagatgagcgcctcaaagaaaaggttagggatattactgatgaaagctgtctagaacgagtcattaagcaaaacattgttgaatatcaatggaaagataaagaaatgcgcggagatcaaacccatcgaggatttatcgcgcaacaagttggtgagattgatccaatgctcattactggttctgaagattcgcaatatgggttggatctaattgctcttttggctgatgcctatggtgcaatcaagggaatgaagaagcagattgatgagctttcggaggagattgcgaacatgaagatagggtag

SEQ ID NO: 169754 - DNA, 855 bp, Enterobacter cloacae
atgaataaatatagaatattgattactttgtcactcattggaactattcttgtaggatgtgataattcaaaaaatgatactaataaacaacaattagccaacgatattgtcaattccatggtgacagttaaaggggggcggtttcagatgggggattttgggccgcttgttggcgaaaaactaccttttagtcctggattggataataaaccattgcattgggtcgaactttctgattttaaaataacaaaaaacaaagttacctggagagagtttaatgtttggttgagtttaaataaaaaagaatataataaatactataaaaaaataaagggtagaaaggttgaggatgaatatgataaaaaaattctacgcaatattggtgataattaccctgcatcagtgagttggaatgacgctagcgctttctgtaaatggatggggaaagtatcaggaaaatctattactttacctaccgaggctcaatgggaatatgcagctcgtagccgaggtcagttttttcagtttgctaatagtgacaatcaatataatcctgacgatccagaggataaacttaacttcactcatgacatggctcctgtcggttcgtatcctcccaatcccttaggtttatatgacatgatggggaatggaaatgaatgggtgaatgactggtatgctgaatattattataaaaactcacctgaaaaaaatccgcaaggaccagatgaaggtgaaaaaaaagtaattcgaggttatttgggctccatgtttggattgtatgatattacacgagggaaaagcgaacctgattatgaaggtccaggtaatggttttcgttgtgtagagaattaa

SEQ ID NO: 169755 - DNA, 1875 bp, Enterobacter cloacae
atggcaaaagatagttctgcgtggcgtggtagttggggaggtctcggctttaccgcgatcatcgctgctatactggcatgggccatctggtcgcatggggatgcaattggcctgaacagcgaaggattaaaaacactgggtattgtcggggcgatgatcctgttgttgttaattcgtcatggcagggttatcggattagcgctcaaacaacgctggtcacgttttcaggctgaacgtaagaaaggactgccaaccagtgaaggtcgcgttgagcagaccctgccgcgcaacgtcacggtcgacaccatccgtgaagccatgcgtaacctctatggccatcgctggggacgtaaaactcgcatcctgctgataaccggtacggccgctgaagtggaacaactgactccgggccttacaactcagctctggcaggaggaccgcggcacactgttgctgtggggcggtggcctcaatacgccagcggacagtgcctggctgaccgcgctgcgcaaactgcgtcgccgtccggtggatgggctggtttgggtcacctcggcctttgaccagctctcagcaccagggctggagccgccgctgccggtaccgtctgaaagcaccatggattccctgtctcacgccatcagcgcgcgtatggaaacgcttggctggaaacttcctttctacgtctggtccctgcacccgcgcgccggtaagccggaagggcgcattacgcaggcgaccggttgtctgttgcctgccgggtgtcataccgaagggctggcagagcaactctcagccctgacaccgggtctgacttcactgggcctgcagcaaacctgcggtgaagtgaaacacaacttcctgctgacgcttgccgaccagctcatccgtgagccacaaagtgtgaccgcaccgctgtcggtgatgctcaatccgtatcgcccgctgccgctggccggtgtggtgttcagtcagccttcagccggtgcagaacgcgctgtgccgcaccactggggcatggataagcgctgggatgttctgcctgaatcagtccggacgcttcctgccgggctgcgtcctcgcaagcccggtattccatggcgcaaggtaatggcatctgctgctgcgcttacgatggtgagctgggctatgtggatgagcatcgcttatgtcaccaaccgcagccagattgttggtgcgaatgcccaggccgcacttgccgccagacagaatcagccgctggagctgcgcctgcacgcgctgtctgaactccagaaaacgctggcccgtctgcagtaccgttctgagcatggtgtgccgtggtacgaaaaggccgggctgagccagaataacgccctgctggccgcactctggccacgctatcaggacagcgcgttgccgctgttgcgggatgcggctgcagaccatctgcagaagcaggtcattgcctttaacgcgctgcctccggatagcccgctgcgcgagcagagggcaaaagcaacctatgaccatctgaaactttacctgatgctggcgcgtcctgagcatatggatggtgactggtttagcacggtgctgcttcaggactggccgaagcgtgacggtgtgaaggacggtatctggctaggcgtggccccgtctctgctgtcgttctatggtgaacaactggtcacacatcctgagtggaaactgcgagctgatgaaaacatggtcagccaggcgcgttccctgctggttcgcctgatgggggtgcgtaatagcgaatcgactctgtaccagaaaatgctttcacaggtggcacatctgtatgtggatatgcgtctcgaagatatgaccggcgatactgatgcagcccgactgttcagcaccacttag

SEQ ID NO: 169756 - DNA, 765 bp, Enterobacter cloacae
atgaccagagtagcgattgtgaccgcatcggattccgggatcggtaaaaccacggccctgatgctggcagagcgcgggtttgatattggcgtcacctggcactcggatgagaaaggggcgctggaaacctgccgtgaagtcgaagcgcaggggcagcgcgcggaggctgtccatcttgatctaagcaccctgccggaaggcgctgaggcaatagagacgctgattgcgcgctttggccggctggacgtgctggtcaataatgcaggggcgatgaccaaagcgccgttcctcgagatgccgtttgacgactggcggaatattttcaccgtcgacgtggacggggcgtttctctgttcacagatagccgcaaggcagatggtgaagcaggggaaaggggggcggattgtgaacatcacctcggtgcatgaacacacgcctctgccgcaagcgagtgcctacacggcggcaaaacatgcgctcggcggcttaaccaaatccatggcgatggagctggtgaagcacaacattctggtgaacgccgtcgcgccgggtgccattgccacgccgatgaacgacatggacgacagcgaagtgaaggaaggctccatgccggaaatcccgctggcaaggccgggccacaccaaagagattgccagcctggtggcgtggctgtgtgacagcgacgccagctatacaacagggcaatcgtttatcgtcgacgggggctttatgctggcgaacccgcagtttaagccggagggatag

SEQ ID NO: 169757 - DNA, 132 bp, Enterobacter cloacae
gtgattgcgccctggctgcataatctcgaccagcacctgaagcactgggcgtggttgattctggtggttgtggcggtgattgcggtgcgactgtggctgaagcaccgtgaaaagacgcgggatgaggagtga

SEQ ID NO: 169758 - DNA, 789 bp, Enterobacter cloacae
atgaataatgacaatattcgtcaatccatgcataaccaaataaaaaatttagcaagacaaattcttgatataaataatcgagtggctgaaaaaagagcagacattgagtctggtgacacgaatttatttttcaggaatatgtttggtgataattacgtcttgattacaaaggtaatgcaatcattacagacaacctttggaatggcattttatgagcaagcatgcgcaatattaggacgacatgtaggttatgaagttagaaaccaatttatactaaccgggaatatatcaatccctgtatcctcttatattgaaagattattaaacaattataattatattccaaaccgcgcacatgagcttgcagaattagatcaactatcacaattattaccagatcctcaaagatatcctgatagtattgttgatgtttttataaaaaaacctaatggcgatgaaatatacattgacataaccacagtaaaaccaaataaaaaagaatttagagcaatgaaaaggaaatcattagaatggtatgcacttcgtaaaagcacagctaacaatgtgaatgttaagccatatattgcaataccttacaatcctgaatctctaactacaaataattacactaggcacgcggctcagtatgacaggcaagatctgcttgtaggagatgagttgtggaaattagcatcgaatggtatttttggcttaaatgatatgaatagaatatttcaagaattaggtgaagaaactcgaatggtcataaattccgcattacaaaggtag

SEQ ID NO: 169759 - DNA, 1266 bp, Enterobacter cloacae
atgagtgatgtccaattgatagatttaaacaatcaaaaagattttttctcacttgaagtcttagcagatattttatcagaatcgaaaaaaactttagaaagttgggttcgaaaaggggcattaaatggtgtcagatgccctgatacaaataaagtaatggttcataaaaaagaagttgaacactttgaggaagttcaaaaattactagcaagtaaatgggatgaagaactactcattaaaccatctcgagaatacaagctcgttgagttatttgctggggcaggaggacttgctattggtttagagaaggctggattgaaatcgatattactaaatgaaatcgataaagcagcttgtcaaaccttgcggtttaatcgtcctgagtggaatatcatagaaggtgatatctcccaagtggatttttcttgtgttactgatgatgttgatcttttaactggtggttttccttgccaggcattctcttatgcgggaaaaaaattagggtttgaagatactcgcgggacactattttttgaattcgctagagctataaaagaattatcacctaaggttttcatggcggagaacgttcgtggtttattaacgcacgacgatggcagaactttaaattctattaaagaagttatatctgaacttggatatgagttagttgagccaaaagtattaaaggccatgttctataaagtacctcaaaaaagagaacgattgatattagttgggattcgtaaagatttggctggtaaagctatatttaaatggccttcaggttattctaaagtattaactctacgtgatgcattttttgctggtgatctttacccaacagatgtacctgtctctgccgggcaattatatccgaaacggaagaaagaaataatggatcatgtccctgctgggggatactggcgcgacctgagtgacgaacttcaacgcgaatacatgcaagcaagttattttctcggtggtggaaagactggaatggcgcgtcgtttgtcattagatgagccaagcctcaccttaaccacttctcctgcgcagaaacagacagaaagatgccaccctactgaaacaagaccgcttcagatccgagaatatgccagaatccaaacatttcccgatgattgggaattccaaggttctgttggggcaatctatcgccaaattggaaatgcagttcctgttaatatggctgctgcattggggcgatcccttgttcgactccttaatgacattgaatcaatctaa

SEQ ID NO: 169760 - DNA, 213 bp, Enterobacter cloacae
atgtcgggcccgggtcattgccgtggccacgtaactacgtgggcggtttacaacctcaaccgtaatttttctcccctggatcctgatggtgtaaaacgtctgtttgtcgctgcgaccatgctcgccatatttctcaaaatggcatttgagcgcggcggcgcatgctggcccgccgatgctgtctcccttgctacggttaatcagacgcactga

SEQ ID NO: 169761 - DNA, 1905 bp, Enterobacter cloacae
atgtctgttgagttaaaagtatttggtggtgcttacttcccaaaagataaagcattaaaaaaacaccccgatttaaaaccgcttgccacagcagttaatgcggcaacaaaagccatcgctgaagccgttattttcggcaagctggcggcagaacatcctgaacatattgatgattactttaaggtgaaaatctgggagcaccgagaaggtattccctgccctgatcttgatgttttctcacctgagtttttcgacagcgtggcagtatggaatgtgaacgctggcgaaccagctgcggcgccacagccagaggctgacgctaaggaagaatgggacgacaacgaggcagtggaagaaattaaaaccgttgcacggctcgaccaggcatcgcgcgctgcttgtctggcactgttcggcccggtccctggaatcactacggcgcagtacggccagatcgtagacctgattaacgatgacgctggcagttttacccgcgaactggcagaagcacttgcaaaagagacccgcgcgctggcgctggcgccggaacggcaagagcagttgctcgcctgggtacgtgaaaacacaaaagattctgcacagtggccggacatcaaaaagcagatcgctaaatggattgataccccagttgataagcgacctctggctgatagcacaaactcagaagaaaaccgtacagacaccggctccacgctgggcggtggtattaagacagaccgcagcccggacctggttcataacctctctacgctgcgtatcgaagtggctgttgccattctgagcatgtacgacgagatcgacatttactggatcccgaataaatacatgattccagcgaaagccatggccgaagcagaacaggatccccgcttcacagcatggtggaaaaaactgcgtagcaccccaagcattctggactattcccgcgcggccataatcgctttgattaaatccgccccggaagacctctggatcgatcctgtcgcattacgtgagtatatcaaccgcgaactggttgaatgtgaccatgcgaaccctgaccagaaaatggtagagatcgcctgccgccctaaacctcgcactaatgctgagaaaaaagaaaatgatgaaaccgaatcgactgtaccggtcaaaactgagctaccagcagtttgcccggcaaaagctgcgcagctcgacaaagaactcaacgaggcattcgcacagagctcagcctcagagaagcaagcaagtgaacagccacgtgtggagaacctgggcggcggcgtcttctctgttgatgctctgataaataccccctcctcaaatgaagtcgaaaaacaggaagtgccaccagcgctaagtgttcgcgagattgaaatcgcccatgcattacacgagctgatgtccgggcgcacaaacatcggtgaccaggatgatatcgaaaatctcatcaccaccacaggtaaagacatcaagcatattttcccgttgctgattgcagatatcaccacgactgaactctgtctgtcgcctgatttcagtgatgaagaagtacaggacgttgctactacgattcttgagcagtggtctgacgatatcagcgttcgtcagaaaatagcgcttgatgcgatcgtggaataccgccgcccggcaccaccaaaatctgtcgcgctcgatccgccggcagttactgcaaagccggatgccgagccagaaccggtggctgaaacaaacgcgctgctttcattggttacctaccagcaacagctgaccattgcagcgttgcaggggttatgttccaacccggcatattgcaatcagtatgaggaattaccggctatggccgccgggcttgcccgcagcgtgatcaaccatcaggaaggtctcagtgcgtctgattaa

SEQ ID NO: 169762 - DNA, 123 bp, Enterobacter cloacae
atgctgaagaacaggccgtacagcatgaacagcaccgtcgccatcaccgttttaccggtgatttcaaacggcgtgccgacgaagttggcaatcgccagcagggtcaccgggaacgccgcatag

SEQ ID NO: 169763 - DNA, 219 bp, Enterobacter cloacae
atgatccccgggaagaagcccgccagcgcctgggagaccttcctgaagaaggtaaaaccggtatacaccgttccttcggagcgcacgccggtgcgccactcgccgtactccacggtatcggacaccagcgcccagttcaggctgttcacgaacgcggagccgaaaaaggccaggcaggagaacgccacaaagctcaccgagccgccgccgaagaagtag

SEQ ID NO: 169764 - DNA, 585 bp, Enterobacter cloacae
atgttcatttatacaggagtgtctgaccgctcagacaatggcgtcacggcagacgcgggaaattttcggtacagcgtggagatacccacatcaaaaattagcgcaacacgcttcctgctttcccctgcctcaaggagtcgcccggcctgcgcccattgttgcactgtcagttttggccgcctgccaccgatacgcccttgctgcctggccgctgccagcccggcgcgggtacgctcaacaattagctcacgttccatttcggccagggcgcccataacgtggaaaaagaaacgccccatcgcggttgacgtatcaatactatccgtcagactgcgaaaatttacgcctcgactgcgaaggtcttcaatcagggtaacaagatgccgcatgctcctgccaagcctgtccagcttccagacaaccagcgtgtcaccttctgacagcgtgcgcagcaccttctttagcccaggccgatctgctgttttgccgctgattttatcctcaaaaatcagctcacatcctgcgcactcaagagcatttcgctgtaaagccgtgttctggtcatttgttgataccctcacataa

SEQ ID NO: 169765 - DNA, 180 bp, Enterobacter cloacae
atgctccataaagcaatcataaacgagattgccattttcatcaaaataaaatggatgtttaaagtaatcccatttttcagaggtgtctattccgataaaccagccagtatctatattatgctgtgtatgatcatatgtaccatcgtacagaccattacgtttacggtcatatttggctga

SEQ ID NO: 169766 - DNA, 504 bp, Enterobacter cloacae
atggcctcaccgggggaacaggatgcacacacccgacacgtcggaacggcgtggcgccatcagagcgacggcatcagccggcgcggtgaaggcgttccggacggcacggccggagaagccgcagcctttgaccttcgccatcagaccctagcgttagcccgaaaccgcttgcgggttcggcggagcccggcgggtgcgcagcagccgccctggcggagtggggctcgacgaccggacagcagcgctggcggggagccgaagggggccagaagtgggattctggtgttttcagaggatttgctgatcgggtttcagagccgccacgccacgccacgccacgccacgccacgccacgccacgccacgccacgccacgcaggaccgtattcgtgacaatttgccctcacaatgccattcctctgcatttctcctgacttacaccaggggcgggagggggcagcgccgcaggcgctggccttgccgccccgtcagcccgaagggatga

SEQ ID NO: 169767 - DNA, 1212 bp, Enterobacter cloacae
atgaaaacatctaaagagcttgatactaacttagacgttcttttcaataccatcagaagaaagaccagtattagaccaccgattgagattgataaaaactcgaccttaatagaggattttgctcagaaatgtaataaattcagggcatgtctagatgactacattgaagataataatgacgacttatccacaaaactccgtgaaatttataattcaattgaggaaatgcaatacggtattgttcaatgtataacagagttcctttccggtgacataaaggctgcctatgattcatttgaaaggatgcttgagcctgaatccataattgagcatttagaaaacatttgtataccgttatcagatttatgtaatgaggacgcaccgttatacagagttaggaaatctgacaccccactttcaacacgcagggatatgtttcatatcccctttactgacaggcatttagttagggcccaaagatactctgtggcagggttaccctgtttatatttaggcagttcgctgtatatttgctggcgcgaaatggacaagcctgactttaatagattatatatatcagcatttaaaacttctgaagatgatgattctatggtgatgaatctaggccctgattttttatatcgaagaaggtctatattggatcctacacgcggtaataaatttgattttgaaactaaactttcttatttagcattgtggcctttgattatagcttgtaattatattaaaaagcatggggatgcaacattcatccaagaatatataataccaaatttactaatgcagtggattagtcgcaacagttacgagactattgttggtatcgcatatcgctcaactaaattaccggcttatgcaaccggaacaaggggcattaacgtcgtatttcctccaaagataaaatatcagcaaatggtcagtaacgagttttgcccaaaattggcgaaaacatttaaaatgacactccccgtatcgtggcaggtactaaagaccctggaatatatccctgaaacacctgttcaatccagtcaagagtcgttgagtagacggctgaggagaaggaaaaacaatgaattaactggcagtattgatgacgaaattttgcgcatctatcatttaactgacttttataaattcgaggtctgcttggatgaaatacaagtgtatgagcatattaaaacatcaaaataa

SEQ ID NO: 169768 - DNA, 612 bp, Enterobacter cloacae
atgtgtaaagtgggcaggcgtggcggggctacgagcgcgcgttcatgccttgacacatcagataggaatgcattaaaccatacctacactcttgagggggattttatggcttctgaacagaatgaattagaatcttttactcgtcgccgtggtttgtggtcagttagcggggttccgcacaaaggatggttctgcattggtgtagaggatttaggggagccgattcaactatgtgatatgtgtgaaacttcaatggttcgctttgtgcactacatgaagcatcctaattatctttgcgaattagctgtggggtgtatatgtgcagggaatatggaggcggattgtaaagcagcagaattgcgcgaagtaaacatgaaaaaaagagctggcaagcgcaaaagatggcttactagacaatggaagttatcaaagaagggcaatccttttctcaaatgtgatggttatattatttctgtttataaaatgcaaagtggttggggttgctttacggaaaatataatcacaaaagagaaaagcttttcacgaaaagcttatgattctattgacgaggcaaaactagctggtttcgatctgatatctaaaattatttag

SEQ ID NO: 169769 - DNA, 690 bp, Enterobacter cloacae
atggagattaaaaaagaaaggtttgatattcctctcactactatagtattgggtttgttgttttgtgctgtttatttatttaagattggtgaatcagttttctatgactatccatcttattatatttatttgagtttatcggatgttataaatgtagcattaaaagctgttttgctatacatgatcttatgggctatctatatagcattcatgtcttgggagattgcaggtattagcttcttaattggtgcatgctgttcagttcttttaaaactttatgccatgtggcgtctttacaaaaatggtgaagactcactgttggtgtatataaataaagggatggtgcctttactattctctttgctaggttattttcttagcaagagttttgtaaagggaagtgctggggttatctttataccaatttttggtgtttttgcttttattgtttttttggctttcaatttctttataggacttaactaccatagttttgtccctaacagtacttggcagacggaggatcataaagttcttgttgggacatacaaagatagcctgttgtttagagcttgcgtgaatgggaagtcatatttctttctagaggaaagtaaagaccaaaaacttgagatgtttgatatagatacttcaggtgtgttgacgctgagatgtatgccaaaaaataagtag

SEQ ID NO: 169770 - DNA, 735 bp, Enterobacter cloacae
atgggtaataaaatcattacgttgtccggcgcggcgacggatgttctgtatgcgctgttttttcgtggtgcgttgcagggtggcgatctgccatctaaatctggcgctgctgagcttcgagaactggggtttgctgaaagtcgccataccgctacgaaatatcaagagaaaaacttttttacattcctgaccgctgaagggcaggagtttgccattaagcacctggtgaatacgaactttggtgtgcctgctggtggttacatcggcagccctatagatgtactggatgaaatcgcagatcttccccttcacaaaatcagtagtgattacgctatccaaaaaaaaatagcagatgcactcgatactgcgctggctcgccattatgagccgtttggcaacacagaacctgaaaaaactgcggtggtcttcctggagcatcgttgggtagcgattcagggtggctacactccagacgaaatgcgcgatgcagtggaactcatccggcgcctaagaaagcagaaaaccgacgaaaaggcgatggcagaatcatctccatttgccatgaatgacggccaggtgtttatcaaggatgccgtcatcggtaacgcaattaagagcagcgcgaagctatccccagaaatggaaaaagcgatctcagatgctgtatctgcggaactgaaaaagaatcttcagccaggcggtacgatctggacttcattgaagcgtggattctga

SEQ ID NO: 169771 - DNA, 1647 bp, Enterobacter cloacae
atgcacgtagcgaaaaagatctgtttgattgggcatgagtgcgggtcatataaagggcaaggaggtatagctacatacattgaactcaccgcgaaaggattcgcaaaacttggtttagaagttcatgttatttacatccatggatccggggtagactgcgatgatgtaaagtcatggaagataaaaaatgatcctagcctttataaaatatcacttgaagtagacaaggttttagaagaaataaaaccggactttgtagagtgtacagactttatagggatgatgagttatacgctttcaaagcgagcgatcagaggtttagattataaatgcatttttataactaatcatcacacggggattaaagaagtctgggaatggggaacacagcttaaatttaatgagacagcaaagtcatggatgaagtctttatatatagctgaaagaacacaatctcttttatcagatgcaaacttctcgacatcaaattttctagccagttatttagatgcaaaccatattgaatcatatcaagtatcgccgtcttattatgaaatgaatgataattttggtgaaacaaataaaaatcactatgattctaatttattacgtatcatatcgcttggcagattcgagttaagaaaaaaacaagagcttcttattaaagctacttgtgaacttcttgatgaaggctatgatattgaaacaactttgattgggaatagtggcggtgatttatatacgcatcaggactatatggaatattgctatagcctgattcccacagagtataagcataagtttcatttttatgacttcatgccatataagttgcttcagaagaaatataccgaatatgatttgtttgtaatcccatctccatatgagaattttccaaatacagctcttgaagctatcaactatggagttacagttgtcggaagtaaatccagtggcgtagctgatatgataggggaggatttatccgattactgcttcttgcctaattcagtttctgatattaaaagagtgattttaaaatataaccagttagatgctgaagaaagggcgactctacgtttgaaacaacgtcagtccttaaaaaatcttacttgctttgaaaagagtatacaagaacgctttgaaaagtatcaagctgtagatgagctacgtagtgaaaaaaatattgatgataaagatatattgattgtatatcaggacaaaaatgggctcatcaataaagtagagtattgctcagaaatttattactcccttgggagcaaatggaaagactttatcagagaaattaaatatattgtcttgacctccgaggaatatcaatttaacaagatagagaactactatccggcacccggaatcatatcctgtttttcatcatatgatccttatggaacggttagagaaatacaacaggctgaaaaaggatattcatctttaacattatgtgtagagacaatcccatataatgaaggtgattcaatatctgaatatatcgctcaagttttactttcaacaagcgatgtcatattcttcattgatgaagaaaagaaagtagaacaaggcatcagtatcgatatcaaatacgcgattgataaaattaagtttaattattctggtgaaaaatga

SEQ ID NO: 169772 - DNA, 315 bp, Enterobacter cloacae
atgcacacacgaaacgtcaacgtcaaaaccgccgctcaggaatcttctaggaagatagggggaaaaaccgtgtcgtacacgatcctcgtcgctgagacgaaaaaaaactcagcggaggaaccggacgttctggagttcagcagcctggctgagctgaagaaactgcgcagacgctgccccgaaacgatgcgctgcacctatttctacgccctcagcagcggcgtcgataaacagttccgccatatccatgtggctgaatctgaccacttcaaacagtttgtgcgcctgatcatgcgcgcaggtatcgacatttaa

SEQ ID NO: 169773 - DNA, 207 bp, Enterobacter cloacae; identical to SEQ ID NO: 133396

SEQ ID NO: 169774 - DNA, 462 bp, Enterobacter cloacae
atgaacgttaatcctccgaccgctgcaccaatggcctttttcgttccgtctcataacgccgtttatgaccgcgcaacacagctggacgggcagtgggtgactcagcgtgaagcgaaaacgctggaatcccttcgccgtctctatccggatgctgagctgatctccgcgactctggtacaggaaaagctgaatgacggctatcgccgtccctgggtggaaatcaccgaggcccggtatatcgaccagctggaaacgttgccgccagtggactggtgcagggggtatggcggggagtcgttcaaatcgatggagtttacgggcggggatgtgaccgcgatttttgtccggtatggcgcgcgtttctttgagtgccatgacctgcacacccgccatcaccgggagctgattggcgacgtgatcacacgtttctgtctcgatgcgccgctgaattccgcgcattaa

SEQ ID NO: 169775 - DNA, 201 bp, Enterobacter cloacae
gtgaaatttgacccgcaaactgtcgcacaggcgaaggcatttgtaaatgccctccgcgccggaaaacgcgcgcgcgtacccgcgctgcgcttctcacagtggcagccgttcctgtccgtggtaaatgccgaaacgggctacgccaccgatgctgactgtggtctggctgtcagcgtctacccggcgcttggactggcttaa

SEQ ID NO: 169776 - DNA, 792 bp, Enterobacter cloacae
atgtcacaactgagttttgaatccctgttcctggcagaccaggctgatccgcagccgcaggcttccgcacgggcccggatgctgtcgccagctgaggcgcgtaaacagttcgccagtgtgttccgtcagacggcgaaaaatatgcgccgttccgaagtcttcagtgatttcatcaccctggccgccagcgagctggatatggcccgtattcgctcgccggagaacatcgaaaacagccgccgcatctgcgaacggtatcagccggacgatctgaacgccatgaagcagctgttctgcctgttggtggaggggctggcgggagacattcatgatttcctcggcgctctgtatatggagcaggagctgggcgctgacgaaatggggcagtatttctcgccgtcctccatctcccgcctgatggccggattactcatgcccggcgctcaggagacgataaagcgtgaggggtggatgacgctcgatgagcctgcctgtggtagcgccggaatggtcattgcctttgcatactggatggctgaagcgggatataacccttcacaacagctgtatgccacctgcaccgacatcgatccaatggtggctgatatagcctttatccagctggctctgctgggtattcccgcgaaagtcgtgaccggtaatacgctgaccctgaaagcgaaccgagtgcgttacacccccgtgtattacttcaatgactggcagggccgtctggcatttcgcagtcgtctggatgcaatgaaaaactttctggccaccgtggccgcctga

SEQ ID NO: 169777 - DNA, 153 bp, Enterobacter cloacae
atgacaagcaacacactgaacgctgttccggcgaccgtgctggagaacatggcagaacgcttcaacggccagcctgaaccgctaaaaatccgcagcaacgacgatcacgctgcactggctgcagatgtgctcttgcccgaaaaaccgggctga

SEQ ID NO: 169778 - DNA, 270 bp, Enterobacter cloacae
ttgaagaatatcagcttaaagatcggagataacgttgacgtcctttacgatgcggaaactgacacatggatgataaaaaaagaggtagaaggctataagatctcaggtaagacaggtgcaccgacgggcctcattcgctacacgctaaaggaagggcataagaaattcactaatacgcgcgaatccctgccagtaagaaaagatagcaatgatgaaagcatcgtatttatgggggataaaatgacatttaagctgaaggaaggcgaatga

SEQ ID NO: 169779 - DNA, 297 bp, Enterobacter cloacae
atgatggtgagcactctaatctgggaagaacaagccgttagtgaccgtactgactactttgaatggctttacaaacagaacccaagtgctgctgaagaagcagatcagcacatagaggataccgtcgatctgctaattcaaaacccttttcttggaaggagcgatgaatatgtccgaggggttagagtgcttataatcagaggcttgtcattaaacgtgtattaccaagaaagtaatggaacgataagggttctacgcatcctccatcagtctagaaatatcgcaaagctaatttga

SEQ ID NO: 169780 - DNA, 285 bp, Enterobacter cloacae
atggatacaaaatttcatttcagacttgatgagaacatcaagatcagggctcaaaaggctgcagaagctcgcgggaaaactctaagtgaggcttgcagagactttgctgaacagcttgcaagagaggtggagcccctaagccaacacgagagatggctgaaaaagcaggtggaaatgtcagtagcgaaagtaaatgccggagaggcgaaatttacttccaatgaggaagttaagcgggtagtcgcctccagaaaagaagaaataagagcgaagtacaagcgttag

SEQ ID NO: 169781 - DNA, 435 bp, Enterobacter cloacae
atgaaatcagtttactcaccatccgaacacgtaatatataacgccgctttttatgacgattataagcgcgcagggacctggccggctgatgggatcgaagtaagcgacgaagatgccattacgtttaatggcagcaatgagcctactggtaaaatgctggattaccagaacggtacactttgctgggttgatcgtcctgcgccagaactgaccaaggagcaacttattgccattgcagagagtaagcgggaatcactgattgaccaggcaatgcagtcaatcagtgtaatccagttgaagttgcaggccggaagaaagctaaccacggcagagacggaaaaacttaacagcacgctggactatatcgacgcggtgacggcaatagatacctctaccgcgccagatattaaatggcctgagcgtccggtggcgtag

SEQ ID NO: 169782 - DNA, 1083 bp, Enterobacter cloacae
atgagtcagcaggatgccgccaaagagcaggccaacacccgcaaaaatgtgcgcgtcgtttccattttcaccgccgcggctatcggcattgtcggggtactggtgatcctttatgcctggcagctgcccccgtttacgcgtcatgcccagtttaccgataacgcctacgtgcgcggccagaccacgttcatcagtccgcaggtaaacggctacattaccgaggtccatgttcaggatttcgcgcaggttaaaaaaggcgagctgctgttgcagatagatgaccgcatctatcgccagcgcgtccatcaggcagaggcgcagctggcaatgaaaattgcagccctgaataacaacctgcaacagcgcaaaagcgcggaagcggtgattgccaaaaacgaggcggcgctgaaaaacgcccgtgcccaaagtctgaaaacccaggcggatttgaaacgcgtgaaagagctgaccgcggacggctccctctccattcgcgagcgcgattcggcgctggccagtgccgcccaggggagcgctgatatcgaccaggcgaaagcaacgcttgagatgtcgcgtcaggatttacaaacggtcatcgtcaatcgcggttcgctggaagcggacgttgagaatgcgaaagccgcgctggagctggcgcagatcgatctgcaaaacacccgcattgtcgcgccgcgtgacggtcagctcgggcagattgcggtgcgtctgggggcgtacgtcaccgccgggacgcaccttaccacgctggtcccgccgcagcactgggtgatcgccaacatcaaagagacgcagctggcgaatttacgcgtcggacagccggtgaaattcaccgtcgatgccttaaacgataaagcctatcaggggcgcgtggagagcatatccccggccacaggggtcgagttcagcgctatcaccccggataacgccacgggcaactttgttaaaatcgcccagcgcatcccggtacgcattgaggtactcggtgagccggaggcgtaccggttgctgcgtcctggcatgtcggtgcaggtgaccatcgacacgcgggaggcgaaacaatga

SEQ ID NO: 169783 - DNA, 456 bp, Enterobacter cloacae
atgaggtatattatttttcttttttacatttttacaaatactgcattaggttgtgataataaacttttagatgttaactttgcagaaggtatttctgcgaaggttttgctgaaaaataatgattcgttgttaatgtcgattttaaatgatggtaagattattagcacagaagaaatagatgtttcatctgagaaaaaaaatcatgttacactcgaagattataatcgtgatggttataaagacttcagtgtatggcatttagatgaaggaatgggtacgtataaaatttatagattatttatcttttctccacctgagggaaaattcaaagagataaagcctggatgcggcgatgactttgttaatattcggattgatggtgacaatttaattaacacgttttatgatggtaacgctccgaaatcatgcgctatgccaattgacgctcttaagtga

SEQ ID NO: 169784 - DNA, 1317 bp, Enterobacter cloacae
atgtttatttttattgccttcgttcgtattgtttcagtttgttttaatggttatcatgcctttagtgtaactattggtgtaactattatggccaatgacaaattatcagacatgaaactgcgcgccttaatgcgggctgatgtcacaaaaccgaaaaccatcgctgatggtgcaggtctgtccatacgtgtgaccccttcacagaaacagactggcaatgatgacaagcgaccgactaataaccttttatggctattccgttacaggaaccctcataaaagcactaacccattaacacttgtgctgggccgctaccctgatttgtcgttatctgccgcacgtgcacagagagacaagtgtaagtcttggcttgctgacaatcttgacccgaaagatcaatacaaacttacatcgacagaaacattgaatcccgtgacagtaaggcaggctttgcagtactggatagacaactatgctgttcataaccgggcaaactatcaaaggcaccgtgctcaattagataagcatattttcccattcataggcgatatgccgttatcgctatgtgataccaagcattggctttcctgctttgatcgggcgaagaaaagtgctccggttgctgctggatatgttttccagatgtgtaaacaggctcttaaattttgccgtgttcgtcgatatgcgtttagcaatgcgttggatgatttggcgataccagatgttggtaagaaacaggggaaaggtgaccgtgttcattctgaatcggagataagagatatttggttcgctgtcaattctgaggactttttctccccttattactctgcattgataaaaattttggttgtctttggtgctcgtactcacgaggttcgtttatcagcgatcaaagaatgggacacgaaaacatggatttggactgttccaaaagaacactccaagagcggcgacaaaatagtccgacctatacctgaagcactaaggccgtttcttgttggactcctggaacgtaacgaggctagtggtttattgcttggagaggaaaaaaaaccggaaacagtcagccaatacggtaggtctatatacaagcgttttgctcattcggagccatggactctgcatgatttcagaagaacattttcaacgacattaaatgatatgggagttgcgccgcatgttgttgaacagttgctcggtcacacgctgggtggtgtgctggcaatttacaatcggagtcagtatctgcccgaaaagttagacgccctaaataaatgggttgataaactttcagatttacaaaaaattacaaattga

SEQ ID NO: 169785 - DNA, 180 bp, Enterobacter cloacae
atggaaatgttaacaacaaagcaagtctgcgcattaactactcttagccgtgtgaccatttggcgctatgaagtgtcaggaatgtttcctgcacgtgttcagttaggtccaaaaagagtggcgtggcataaggccgaagtagaggcctggatgaaaagccgccagccagtacagcgctga

SEQ ID NO: 169786 - DNA, 282 bp, Enterobacter cloacae
atgaaacaagtcaccactgccgaagcaatccgtaattataacggcctgttgcgtaatcccttacgccagttaactgttggcgaactcaccgcccagcgcatggcggctgcacaatcattgttgcaagcgtgcatccgcgaaggtgtaaaccgcccgtggactattgtttcacgtcatgccgctatggctgatagcctggtgccgttccgtatcagcgattctgaatcatgggcgatgtatctggagttaaaacgcggggtgcgaaatgagaaacgcgcctaa

SEQ ID NO: 169787 - DNA, 1692 bp, Enterobacter cloacae
atgagaaacgcgcctaacgtcaagctattaccgaaagacccttttacggaagccattatttttgctggtgctgacgcctggagtcacgccaaaggctgggaggaaggcttggggaaacagattgctggtgatgacacaccgccagtttatctaggcccaaaacaactggcagatctcaatagcctacgaatcattgatgatggccgtatttctgctcgtgtttaccttgctggtgatatcgagccaatcatgattaacgccatagcggaaaaactggcgctggctggcgtgcaggacgcgaagttatacaaagggatcccagacaaggagccagagaactggagcaactatttaaccaggattcgtgacgaccaccagcgtggtgaaagtctggttgaaatgctgtcagaaccggttcaatgccttccgttagacaagccattgccaacgccaggggttatctaccatccggatcacatagactggaaacgcgataaagttacgcaggaatgggttttccataaagcgaaaggtacggcggaaaatttatcaaggcttctcaaagcatatggtgttcgcgttcggtacaacgagttatcacgcgatgttgagattagcgtgaacggcagcctgccagccggagacctggcgcggaacgtgtccctgtctaagattgaggacatttgccgcatcaacgattacccatacacagcagcagccagccacctagataacctggcgtcagcagattcatacaatcccgcgttggattgggtgaaatcgcaaccctgggacggcaccagccgcctgcgcgaactgtttgactgccttacgttggccgaccaggataagacagaaattagctggacgttgttccgcaagtggttctttggtgctgccgccctgctgagtggcaaaaccaacaagtttgaacacgtcctgattctggttgaccctatgggtggccttggcaaaacgcggttctttaacaccctttgccctaaagactttcaggctgacggcgtgacccttaacccggatgacaaagacagcgttttgcaggtagtcagtaaatggctggtggaacttggcgagataggcgcgacgtttagcaaatcggatattgaaagtcttaaagcgtttttgagtaaagacaaagacgaactgcgcccggcctatgccagggctgctaatcgttaccaacgccgcactgctttctttggcagcgttaacaacgtgcaatttctgatggatgacacgaacaaccgccgcttctggcctatccaagtggctgcggtgaactaccagcatagtattgacgttcagcaagtatgggcagaagcgctggcgcgcattaacgctggtgaaacatggcacttagatcagcaggaaaaccgtgttattggtgagcataacgacgcgttccgcagcaaggatcgtatcgaagaaatgatactggcatcatatgacccaagcgcgcagccaggccgctacgtatcagccagtgacgtgttgaatgaaattggtgtgctgaatccaaagcagaccgatacccgcaaggcatcagcactactccgtaaaatgttcgctcataagattagccgtggcttgacggtttatcatatgccgagcgctaaaggctttcgccatttggtttcggttaatactgaatataaagaaggcccattctga

SEQ ID NO: 169788 - DNA, 222 bp, Enterobacter cloacae
atgagataccaagctgaaattacaattttttgcgaaggcagagatccgtttagtattctttttaacgagaaatttgacagcaagatagaggcgtttaaccacggccagaagcaaatcactgacttcaccagtaagaccgaaaaacgtgtgctgcatatagactgcgatgtggttgaagtgcctgaaattggtaacgctgagatattgccgtttaaaaaataa

SEQ ID NO: 169789 - DNA, 168 bp, Enterobacter cloacae
atgagcaaagaaaacgcagcacgtcagcatgtgactgttcgtctggcacctgaactggtgcgccaggtggaacgtgaaagaacaaaactggagcgcagaacaggcatccgcccgtctcgcagccaggtacttgaaaaattccttaacatcgggttgaacggcaaataa

SEQ ID NO: 169790 - DNA, 333 bp, Enterobacter cloacae
atgaaaactgaaaacctttacgaacgaatgaccgaagaagcccgcctgttggcgagcgaaaccaagcgattccagattgtatccgcgaaaaaccctatctgccgcgaggccgccgaactgctggcgagtatcaaaaaccgtttgaacgccttcgagcatatgaccgaagaatccagccaggcgatgcgcagcgccgccgaaagccacagcgccaccctggagcgaccggaacgccagattaaaacgtcaccgcgcgcaagggccatcagccctggtgaacgcgcaaagcgccaggctgtgaagcgcggcgcacttctgttccggggcgtctga

SEQ ID NO: 169791 - DNA, 210 bp, Enterobacter cloacae
atggcatcaaatgacattttcagcgcgctggtggaagccatcggcgtagctgacaacatcctgcaacagaacaagaacctgaccgcgcaggatcgccagaaaatgacggccatcaaaaatgcgctgttatcctggaagggcacggcatttggcttgcgagattacgccattggcggcggaaccgcagcgacagcaagcgacaaaaaatag

SEQ ID NO: 169792 - DNA, 213 bp, Enterobacter cloacae
atgatgacgcgcatgaatcccaatccaagcgatgaccaggccacagtgtgggattcatgtgtatccgcagtcctgcgcaaaatgcccgtatgtacaacgcaggaggaaaaagcacaacacatagaactgcgccgtaatgaagccttgcaactggccgctgccgccctgcgggctgctggcgaatactccctggcagaaaacctactcgattaa

SEQ ID NO: 169793 - DNA, 456 bp, Enterobacter cloacae; identical to SEQ ID NO: 25798

SEQ ID NO: 169794 - DNA, 369 bp, Enterobacter cloacae
atgcatgttcacttggtctttgtaacaaaattccgccgcaacgtctttaccaaagaagtgctggatgatctaaaaatcttttttgaaaaggtctgtcttgattttgaatcagagttggttgagttcgatggtgaggatgatcatgtgcatttactggtgaattatccgcccaaagtggcggtatcggcattggtgaatagtttgaaaggcgtttcgagccggatgatccgaaaaaagaattacccttcgatcaaaaagaaactctggggcggagcgctttggtctcccagttattttgcgggcagttgtggtggtgcaccaattgagatcatccggcagtatattgagcagcaacaaactccgacgtag

SEQ ID NO: 169795 - DNA, 1206 bp, Enterobacter cloacae
atgcaacgactgcaagcctacaaattcgaactgatcgtcactggagaacaacagcgccagatgcgccgtttttccggtgcttgccggtttgtttttaacaaggcgctggcgttgcaaaaagagcggcatgaacagggtgaaaagaaactctccgcttttgaattgaacaacctgttaccacaatggaaggcagtgccagaaacacaatggctgtctgactcaccttctcaaacactgcaacagtcgctgaaagatttagatcgggcgtacaaaaacttctttgccaaacgtgctgattttccccgtttcaaaaagaaaggttctggtgatagtttccgttacccgcagggcatcaagctggagcagggaaataatcgtatatttctgcccaaaatcggctggtgccgttaccgtaacagtcggacggtagaaggtaatattaaaaacgtcacgatcagtctgtcgtgcggtaaatggtttgcagctattcagactgaacatgacgctgctattcctacaccgagcggcgatatgataggtattgatgtgggtattgctcggttcgccaccttgtctgacggttcattctatgaaccccgcaacagcttcaaaacgctggaaagtgccttgcgtaaagcgcagcaggccatgagtcgcaaggtaaaattcagcaacaactggaaaaaggctaaagctaaagtccagcgtgtccatgcaaaaatcggcaacagccgccgtgactacctgcataaaacttcaagcgacattagcaaaaaacacgcgatagtctgtattgaagatttgcaggtcaaaaacatgtcaaaatcagcgtcaggaaccgcagagcaacaggggcggaatgtcagagcaaagtcaggactgaataaagccatccttgatcaaggctggtttgagtttcgtcgccagctcgattacaagctggcatggaatggcggccacctgatcgccgttccgccgaacaacaccagccggacatgcccatgctgtggtcatatatcgaaagagaaccgtaagactcaagcccgctttgcctgtgtggaatgtggttttgaagagaatgccgatgtggtcggcgcgatcaacgtattaagggcggggcacgcccgattagcctgtgaagtgagtggtgcaataatgccaccagcagcaggaacccaccgaagcgagtcaggcgtttacgcttaa

SEQ ID NO: 169796 - DNA, 1212 bp, Enterobacter cloacae
atgccagtatcagaccagtttatcgaccagttgttagctgactataaatcccctgaagacctgctgggtgaacaaggtctcctcaaacagctcaccaaaaagcttgccgaacgtgcgcttgaagccgagatggagcagcatcttggttatgccaaacatgataccgccggtaaaaataccggtaactcccgtaacggtaaaagccgtaaaacgattcgtagtatccatggcgacatcgatattgaaactccgcgtgaccgcaacggcagttttgagccgcagctgattaaaaaaggtgaaaaacagctgggcggctttgatgagcgcattgtctcgttgtacgcacgaggcatgtcgacccgcgacattcaggctcatttcgaagatgtatatggtgtagaggtctcacccacctttatctcccaagtaaccaacgccgtgctggacgaagtcagagcctggcaacaacggccgttagcaccggtttatcccatcgtatatctggactgtttagtggttcgcagccgcgaaaccggcagcgtacagaacaaatctgtttacctggcactgggggtcaactgcgacggtgaaaaagagctcttgggtctgtggttagcgcaaactgaaggtgccaaattctggctgtcggtgatgaatgaactgaaaaaccgaggactggacgatatctttatcgcctgtgtcgatggcctcaagggcttcccggacgccattgaagcggtgtatccaaacactcaggtccaactgtgcatcgtgcatcaaatccgcaacagcctgcgttttgtcagttggaaagagcgtaaagccgtcgcggccgacctgaaaaccatctacggcgcagccaccttaaagcaggcagaacaagcccttgagcagttcgcagaaacctgggactcccagcatccgagcatcagtaaatcctggcgcgacaattggacacggctgagcgtgttctttgattatccgccgcaaatccgtaaggtgatttacaccaccaacgcgattgaatcgctcaatgccagcctgcgtcaggtcaccaagaccagacggtcattccccaatgatgattcagtgctgaagttgctgtatctggctttacaccaaatcgccaaaaagtggacaatgccgctgcgtgattggaagcctgcaatgacgcagtttatgatcatgtacggtgaccgtatctcgttatga

SEQ ID NO: 169797 - DNA, 186 bp, Enterobacter cloacae
atgaaacgaacatccatcgcattagttgtcatggccgggaccttggcgtcggtgaagtcgtgggacatcgcagaaattcccccttccctatataccggaaatagctacccggttagtggtgggaagactggcattgccgcggcacgcagagccgccaagaaacgcaggagagcacgaaatggctga

SEQ ID NO: 169798 - DNA, 237 bp, Enterobacter cloacae
atgctttcaaaattaaaactggagaattttaaatccttttgttccatgcaagagatagaattcgcacctataacactgatttttgggcaaaattcttctgggaaaagctccataatacaagctattcttggtttaaaacaatcattagctaatgcctcaggaactgctaattttgtttcttgcggtaaaaatgttgatttaggcggttttttagggaaggtgcgaacaagttcctga

SEQ ID NO: 169799 - DNA, 630 bp, Enterobacter cloacae
gtgttcggtgaccagactcatgcagcgagcgttattggttatgccgcatctcttgacttcgaccgtcaggaaggccgcgtaccattcaagttccgctcactcggtggcctgctaccagaagttaccacgtcagcaaattacgatgcgctgattgccaacggatacaacttctacggcgcgtacacggcgaataactacgatacccgttactgggctgatggcaccattaccggtgatttcaagtggtttgactctttctgcttccagatttggcttaatgccaacctgatgcaggatgctatcgagctgttccagtccaaccgcagcattccgtacaacgcacgcggtaaggcaatcatcgaggcgtcattctcagacacgctgaatcagggcatcacctttggcggtatccgcaccggagtaacgctgtcaagctctcagatttcagagattcagaacgctgtaggcgctgacatctctccatcgctgattgccaagggttactacctgtatatcgcagacgccactcctacgcagcgccaggagcgcacaagcccgagcatgaccctgtggtactgcgatggtggttgcgtacagaaaatcactcttgcaagcattgaggtgcaataa

SEQ ID NO: 169800 - DNA, 2196 bp, Enterobacter cloacae
atgtcatttactgatacggcaaatgcgaaaaaatatgcctcaatcgcagagactgctgctgcccaggcaaaattatatgcaggtgaactcgaatctgctccggattatgcggcacaggctgcagcatctgcttcagctgccgcatcatcagctcaagaagctatcgcggctgagtctgtagtaagtaacctggcaatatctgccagtgaatcagcaacaagtgctgctgcttcagcagcacaggctggtaatgcagcagcggccgctgtaggtcaatgtttaagggtgccaacaggggaaagcattagcgttcttcctgcccaatcaagtcgacaggataccttcctgacatttgattcatcaggtaattcagcattactggcgaaaggtggcgttgctatccttgattcaggtgggaaaatacccgtatcgatgatcccagcggttgcgttatcggagatttttgtcgtcaacagtcaggtggcaatgctggccctgaatgttcagccaggtgatatcgcaaagcgtactgacattggtctctcctttgcgctggcttcacttcctgccagtacgctatctaactgggttcagctgaacgatgacgtccttgctcagcttggtttaagcacaggagcaactgaggttggagcggtagatgatctatctaatccaaccactgtacagggagctttaaatttaaaagcaccgataaccgccctttcagctaaggtgaactcaagcgatctgtctgccaacaccggcgctactcttgttggtacatcagcaggaattaccgtcgagcaggcaattcagaacgcaaagcacgcaatctatttcaatgcggccgattacaaaacatcatccaatacatggtctgatgcgatcaatgccacaatacaggctgcaaaaatatcatctgctgcttcgaatacagtatttattcctgcagcatcagccaaatattttgtaaaagatatcctcgtggacagtccagtaaacgtgattggagcagggaagcttaacacaacactagcgccacttaatgatggcgatacctgtttcagggttacgcatgaatttgcaaggctggctgactttacaatacagtcgactatagcaaactcagcatcaactggtattcgcattgaggcccccctggtaactgtcgagcgctgcacattcgcattcctgaaatattgcattgactcaccaattgggtttggtgctggtgagcttgatttcaggtttaataggtttgcatcaagcacatatggtgtggttcttggtggcggtcaaataaatacacggtttgtccagaatacattcaatgcttgcaagtgtggattattaataacagaggattcctctagtgttcttaagacaatagagggagttgagttgctgggtgatagattctacgcctgcggtgataatactttggatacggcggctattgagattgttaactgtagatggatatggctaactgacgttatgtcagacttagctgccgggatagcactgcgtgccacaaatacaagatatttaaggctgacgaatggatactatagcagcaacggtagtggaaataagtcatgcgtggttattcaaggagtgtcaccagaatttacggcaagcggaacatttttttcagatagtagaaactttggtcttgaaattataaaggcaggtggtggagttccatcaagaccaaagcttataaattgtgtgttccagaataatgatatagcaacaggccagcaaggagatttagttgtcgactctgtaataggagttgaggctatggattgtacttttctagctaacaagcctactggtatatctgtaattaataatcagaccggaggatcaagcattatcactaggaactgtttgttttacgggcaggtttttcttggtgattcaaattgcaaattctaccattatgattctcctacgcaccctgacaagcaaaacggagttgcaacaataccaaatggttccagctctattactgcaacaaacggtataatcagccttgtttcagggagatccatatcggtcatggcgacacctactagtcaagtatcggcgcttagtgcagggatttcaggggttaatctgcaattcactagatctggaacatctggagatttgcagttatcatataacgccatcctaattcaaagctag

SEQ ID NO: 169801 - DNA, 1110 bp, Enterobacter cloacae
atgaaaacagaaggtaaaattaaaatagcacatgtcgttgttgcctcagagcttgctggagctcagcagatagcacttgacatactaagcaatattagtaatgaaaatgtagaaaaatatattatatgtggtgagctacacagcagaagtgcagattttatcagcttatttgaaaatgcaaatgtttcaataatatcagttccagagcttaagagaaatatagggaaaagcgacatagctgcattctcaatcctatataaaatattcaaagaatataaatttgacattgtgcacacaaactcaacaaagccagcaatagtagccagaacagcagcaaaaattgcaggaattaaaaaagtaatccatactgttcatggaatagcatttcacaaaaaagtatctcagccgttgcgtacaatgtattgggctatagaatatttttcagcgttatttggtgactttaacatttcagtaaacaactactacaaaaggttttatcctcttataaaaacaccagtaattcataatggaataaatttcaataatttccacctcaataaatatgagaaagactttataaactttgcattcatggctagattggatgatcaaaagaatccacttgagtttttgatggctgccaaattagcaattaaaacatacaaagggaaccaaaaaataaggttcactcttgctggtgatggcccattaatgagtgattgccttgaatacattaattcaaatggcatggatcaacatgtagatgttaaagggtgggtaagtaataaaagtgatttttacaatggcattgatgtgttgtgccaaccttcggaatgggaagcttttggtttggtttttgttgaggctgcatattttgaggttccttctattggtaaggcagttgaaggcgtgccagaggtaattgattcatctcgtactggatttacctacaatggaggagagaaagatatgtgtgatctaatgctaaggtatattgaaaacccatcactgataaaagagcatggcaaggccgcgaagaataatgcattggagaaattttctatagagatcatggttaaaaaatataaagaaatttatgacctctcatag

SEQ ID NO: 169802 - DNA, 168 bp, Enterobacter cloacae
atgagctatatagagaaaaaagacccatcaaatgaagatgaccgtgagttgtttgctcacgccataagcgaggccttgagggaggtgactatgcgcatagggaaggaaaatgataggctggttgcgattgccaatgctcagtttaagtttcagaaaaagaaaatctaa

SEQ ID NO: 169803 - DNA, 174 bp, Enterobacter cloacae
atgagtgaagtcacctatacaggacgcaagacatacagctttcagttacgcctacctgaatgcatgaaagaagaaattcgcaagcttgcagagatggatggaatctctattaattccgcaattgtgcagcgcctagcgaagagtctgcgcaaggaaagggttaatgcacagtaa

SEQ ID NO: 169804 - DNA, 972 bp, Enterobacter cloacae
atgaagagtttagctaaatctactgtaaattgcaccaacagcatcgtcatttctgacatcaaaatccacatggatgcagaagggcgttactcgctcaatgacctgcataaggcagctgacaaagagcacaggcatctgcctaactattggatggacctgcagcaaaccaaagaattaattgaggaaattttaaataccggaaatccggtatttaaacctactacctcaaagaaggggcgttacggcggcacctacgtctgcaaggagttggtttactcctacgccatgtggatcagtgcagctttcgctctgaaggttatccgcgcatatgacgcgctggtaaccggtaatgcaaatgaagctgttcgcattgctaagactaccgtcagcgaaagaacgcctttacgcgatgctgttaacatgctggtaggaaagaaaggcctgcgttatgacgatgcatacaacatggttcatcaacggtttggcattgacagcattgatgagctttctctcgaccaaatcccgcaagctgtagagtatgtccatcgtatagttcttgatggtgaatttatcggcaaggcggaagtggtgtcacgcgcaattccagttgggaactataacttccctgttgaaactgccgacccccataatcgtaaattcggtaatgactggatcactcctagggtaatacttgatgaaatgaacagagctcctgagcttgagcttctcgaggcacttgaaagtgatggctatgacgttacgggcgctaaaattcggatccatgcaatgtatggaattgttaaacagcacatggaaatgcaaaaagacatctcagaaatgcgcagatacctgtcaaccatgaaagatattgtggaataccaaaccaccgaaaggggaatgaacgtcagctttaccgggaaagatagaggcggcgcttggggtgggtatattcagcggcgactaccaaactaa

SEQ ID NO: 169805 - DNA, 162 bp, Enterobacter cloacae
atgatcactctatttcttatcgcctatgcgttcatggccgggatgaccactgaatacacgcataccagacagaaagaacttggctataaaaccaacctcaaatggatatcacttttcgctggcatcgcctggccatacacaatctggagaatttcacgatga

SEQ ID NO: 169806 - DNA, 192 bp, Enterobacter cloacae
atggacgttaaaaactctcttgagcgccttaaaaagctgaatgaagaaaacagaataccagtgagagtatctcgcggccttcttaagtcagcgctgatggaaattgaaatgcagagcaaactgcacggcgaatcctttgcgaccaggatggtactcggccagcttaaagatgcactggggataaaatcatga

SEQ ID NO: 169807 - DNA, 621 bp, Enterobacter cloacae
atggctaatggcaaaacgcctaagcctaagacctgtccaatctgctctaccgaatacatcccgcgaagttctctccagaaagtctgccacaactacaaatgcgccattgcgttcaataagcaacgcgatgcggaaattgctgcgcgtgaacagcgtaaaagagagcgtgagcaaagcgctgacttgaggcagagaagggaggctttaaagaccagatcggactggaacaaagaggctcaggcagcggtaaataagttcatcttctggcgtgactacggaaagccatgcatatcctgcgagaggccgctcaattacggagtaagaggtggtgcagtggatgccagtcactacaggtcaagaggtgcagcaccgtggcttaggtttaacgtatttaacaacaactccagctgcgtcaaatgtaatcgtgacctgtctggaaaccccatcccatatcgaataaatctcatcaaaaagtacggactggacattgtcgagcgaattgagcacgacaacaaaaccagaaaattcgatatcgactacctgaagcgagttaagtcaattttcacgcgccgggctcgtcattacgaaaaactccgtaagagatatagcgaggcagcatga

SEQ ID NO: 169808 - DNA, 255 bp, Enterobacter cloacae
gtgaaatttaatatcaacaactacgtaatggttaaattaactgactctggaagaaatgagttgcagaggcagcatgatgatctcgttaaaacaaccgggtacacaggcgcttaccagccaccaaaaaccgatagcgatggctactcaagattccagttgtgggatttgatggctacattcgggcatatgatttttaacggctgcaatcctcctttcgaaactgaaatcttcataggtgaaaaaacggagaattaa

SEQ ID NO: 169809 - DNA, 177 bp, Enterobacter cloacae
atgcttagccaatcagaagcccaatcctacgagcagcagagcatacgtcgaacgttgtgcgcaggctgtacgaaagagctatcagtagatgagactcacgtttgtgaggaatgctcggcgatggcaatagcgtatcgcgaccctaacggatttatgacggaggaagatgaatcgtga

SEQ ID NO: 169810 - DNA, 378 bp, Enterobacter cloacae
atggactattcacagttaacagattttgaaattaacaagcgcatcgctaaggctaccggcacgcaaattgaggaaacctatcagttcgtaaatggcggtgaagacattgcagaccatatgagcggcatagtgctgatgcgcaagataaccagcaaccgcaagcactggaagttgtatgacccatgcaacgacccagcagatgcatggccgattatcaccgcaaacaaaatcagcatttacgcaatgagtgaggctgatgcacgtggaaaatggggagttgaagcattttaccacaatgaggcatatcactttaacgacaacccactccgcgctgccatgattgtcttcctcatgatgcaggacgccaaaaatgcttag

SEQ ID NO: 169811 - DNA, 228 bp, Enterobacter cloacae
atgaatcttatcgaagattaccagggtcgacttgacgaccttcttaccgatgcatcaatggatgacatcgaccccattgacctcttagtcaactcaatcgccgattatctggaaggcgagcttgaggatgaagaagacaaaacgctttgcgtcgacttcggcggaaagagcctgattatcagcatcgtcagcaatgacgaacagtcagttaccgagagggtgcattga

SEQ ID NO: 169812 - DNA, 186 bp, Enterobacter cloacae
atgagcgagaaagtacaaatcgaatttattttggagctttgcaggcagtccagagaaagaaataagccagacctgcataaggcgtgggaagcgcagcaggaagcttaccgtcgcgctataggtggaaatctttatacctatggaacccatccatatcggagcggatatagcctttacacatactga

SEQ ID NO: 169813 - DNA, 261 bp, Enterobacter cloacae
atgaaaagttacataacgattcatagttgtattatcggaagtggcgatgattttgagatcgactacagctctgactgtatgcatttcgaaaaaagagataaggcaatcaagcatggactaaaaaatcagggtggcgatgatttcaacgttggtgttgttgatgacggaaggcttgtatcgctcgattggatgaatgaggttgtatcttcagatcctgatgagttacataaaattgagcttgcaatcggactaaacgattaa

SEQ ID NO: 169814 - DNA, 219 bp, Enterobacter cloacae
atgagtaaacagcatcgtgttactcctctcgataaagccctctcagctgccggatgcagtcagaaagagttagcagaacgagtaggtgtaaccccgcaggcaatcagcctgttgaaaaagcgcggtggcacattgcctgtccagcgcgccaagatttgggtggaagccaccggccttagcctggaagaacttttcccacagctttacaaagcagcataa

SEQ ID NO: 169815 - DNA, 627 bp, Enterobacter cloacae
atgctggagacttccccgcagacaattaacaactggcttaaacgaaattcgatgagtcgtgactcagctcaaagtcttagtgaaagtacgggttattcactcgactggctgttaaacggatctggacaaccgaaacttgagggtagtaactttgtcgaatcgcgcctgaaactcacggagtgggatgatgagcttcgtgatagcggcgatttcgtggaggtacctctcttgagtgtaagattgtccgcaggaggaggagcatatgaggtcgatgaggatgaggtttacgctttacctttccgtaccaatacgcttagaagattaggaataaaagttgatgatgcgagagttgtcacggtagtaggtgacagcatggaacctaaactttcagatggtgataaagtcgcaataaacttagcagatcggcatatcagagatggcaagatgtacgccattagaatgggtgaaatccagcgcgttaagacattaatttcaaggccggacggtggaatcatagtgcggtcgtacaaccaggcatacgaagacgaactaataacgaaagagcagctggccaacgaagacatggttgtcataggccgagtttggtggatttcttcactcgtttaa

SEQ ID NO: 169816 - DNA, 348 bp, Enterobacter cloacae
atgaaagagtttaagggtacgccgggaccatgggtagttgacgttagaggtggctgcgttgctgtatatcctgatggagagcaatgggaaacgccaggttgtcactacgatgataagcgaaacattgcttacagcaacaaaggcgcagaatacgacgcagttgttggttactggaatatggataagaagactattagtgattatacgctgatagcagcagctcccgatttgctcgaagctctgcaaaaaatgcttcgtgctggtcagaagcaaaactggaatgagcgctacgaatcagagatgaacgcggctcgcgcagccatcagcaaggctctgggggaggagtga

SEQ ID NO: 169817 - DNA, 186 bp, Enterobacter cloacae
atgaaggtaaaaataacaaagtcgaactgtacattattcaggcctggagatgaggcgataatcagtaaccataacggaagggaaaggatttggtccgagcgacttaacttgtgggaatggctctcatgggtggaagaaatgttttctgttgaatatgagaaagtacctgaaccgccaagcgaatag

SEQ ID NO: 169818 - DNA, 822 bp, Enterobacter cloacae
atgaaacctggcgtctattatggaatgtcgaatgaagactaccatgctgacgaggctataggctcaacaacagtcaaagcaatcagcgtcagccctgccaaccacttcttcaacaaattcactggcagtaaatcagcgcacattggaagtgcgattcatgcggcgctgcttgagcctgatttgtacgataagcaatacacgctgcgccaggatataagctcaaggaactctaaagagtacaaggagctcgcatccagattagctcctgaatatatcctcatagggggcgaggtcgacactgttagtaggatggcttggtcatcaaggatgaacgatgactttatggactacatgaacaccaaaggtaactctgaagtatctatgtttgctgagtgtccagaaacgggcctgatgctgaaatgccgcttcgacaggctatctgacactctagcctaccctctcgacgttaagagttgcagagacgcctctgagcgcggatttagcaatgctttcggtcagtacaaataccacattcaggcagccttctatctctacgttcttaagctcgcaacaggtatcgaatacagccagtttgccttcttcgctatcgagaactcacctccatatcgcaactgtatgtactacatcggcgaggaatcactggagcttggttatcgagaaatgttcgccgcattagacaagctcgtggcatgcaaagaaaacgaagcactgaagtacgaagggattgtacttccatccaacgaaattaacgttccggcctatttgctggataacgaatacgatgacgaggtaattctctaa

SEQ ID NO: 169819 - DNA, 567 bp, Enterobacter cloacae
atggacctttcacgcacaatcattccaaagtccgaccaaattaactttgaagatgttcagactcaaagcatcacggcggtaattaaagctgtcagggctggcaattcagagcagccagtattcattgatcttgagggttacgatggccgcccgtacaagccatctaaatcaatgcgtcgcgtgttaataggcggatggggtgcagatggtcattcgtgggttggtcgctctcttacgctcgttggtgacgcctcagtacgattcggcggtgttgcggtaggcggcatcaagatttatgcgatgagcgacgttgaggctgatttctcaatgatgctgtcagtgtcgcgcggaaagcgccaggagcatcggattcgcaaacttgaggtgaagccacaggcaacaccggaagcagctctgaagtggttctccgataacgtattaagcatggatgccacaaagcttgaagttgcatataaccgcacgaagggagttatcggtagcaacaatgagcttctcgctcagctcgatgaaattcacaatctgcgcaaggcagatttggagaaatag

SEQ ID NO: 169820 - DNA, 279 bp, Enterobacter cloacae
atgacatacctcctgtgggaatcatgggaggaggacttcttgcgcgaagttgctaccaccatggagccaaagctaattgcggaaaagcttgagcgctcagaaatgtcgatatggagcaaagccggaagattaggcgtgaagttaatctccagccatgacaagccatggagcaaaaaggaattagctctcttttcatcgcactctccaaatgaaatcgcagaagtcacctcccgttcaatctattcagtcagagcaaaattatcgaggcttacatcatga

SEQ ID NO: 169821 - DNA, 315 bp, Enterobacter cloacae
atgattccttttgtatcagacttcgtcacccactttaataatgcccgcgcctgtgtaaaacaaatcagaaatggggaatgggtgctggaatataaccccataagtagaacgcaccacactgccagtaggaatggctatcgcctttggctgtctaacggaccatttttctgtgaggtcgatgaattcgaaggggaaagatgttcttacgcattcgggttgcttttcaggcactacgtatggtttgcagctgctagaagcttaaagattaaagctgattcaagcagcaaagctacaaagcatcacccactgctttaa

SEQ ID NO: 169822 - DNA, 1002 bp, Enterobacter cloacae
atgggcggagagacctcttcaatacagcatgttgcaaataagataacccaagatatttttaaaattttcaaatggcaacgagctactagtcaagatatgaactgggattgcgacctagaggctcatgacaaaaaaacacatcctagcgatgtggtgttttactataccgatccttatgaagaagagattgtgtacttgaacacagacctcaaaagctatgctcaaagtagtatcggcaaagggatggtagaaggtgcactttcttctttagctctcgctacagaatgcgccaacattagccaacagtggtgtaaacgatatgtgcgggatgagtcattaggttacaaagttcgaggtttattatttctctataatcatgacaacctttatgacaaggatttttactcatccgtgatgaagaaagtcgatcctgaaataataaaatgccccccaaacataaaattacaccttttagatccattcaaaatatccgatatgataaatatagcatcagatattaaaatgcttattggtaccggggctttacctcaaccagatttgtactatttctattacccagacttagcactaactaggataaaacatcctatcaacaataagactgcagctactgttgaggtcttaacatcaccattcataataataaagcatgaagaattcgattggatgggtgaaaaagaagatagtggttacgtaatttattataatcaaccagggaatagtgaagatgagttcatctatttccttgacatgctttctaattatcaaatactgactgatgcaaaaagaataaaaattagacattgtcatataaatccgcatgaagactccattcatcactttgaaagagcaaagcaaaaatatagtgcccattggctatcaggcgaaagtgaacgtttgttttcaaaagttgcattcgaaaaaacagctgcaatggtaattcaatatagtcttgaagctataggcatggagcaacgttaa

SEQ ID NO: 169823 - DNA, 1080 bp, Enterobacter cloacae
atgaataacatgaatatttatttcgcaactgacaaaaatatatatgatgcacttcatcataaacgaattaccatcgcaagattacgcgagatattattacggaaaggtattattgttgctcaagacttaacaaaggaggaattaattgaagaggtttgcaaactacctcagggatatagtgatctagattctattaaggaacttgtacaaacttatgataaaagagagagtataactagcgtcaagcttcaagcatcatcctctcagacggaattaaaaacagcagcagagttagttaaaagaaaattagccactggctctggtgaaacagtaaaaatcactgcgaaaaaagatgggtctttagcaatcgaggtaaactaccaagaagtagacttgtccagaacagcattgcgtcagatagacaaccgaaacatcaagattgatcttactgtaaataacgataatgttgatattcgtatgcctcagaaccaaaaggctaaagatgtaataacactattacaaaaagagttgtcaaagattaaatccgttgatgttgaaaagtttgaaatttctttagaagcgattcccacaccagcgctaagaagtcagttttttcaagaggttatgggcggcttgagtggatatgaaattgacgacgttactaatgtagagcttaaccgttcaacaagcaaaggtgatgacgaggaagaagaagaaatcgagacaggattcgtaaaaaaagcggttctaaaaggtgattctgttaatagttctgctattttcacccaactacacaacaaaggatactatattggaagaattgcttggtctgctaaacctaaaaacggaataggagacagaattttggttgaagctttctttaaggattcagaaaattgctctgatttttcctatcaaattaaaggaatcaataaccaaaaaggtagtggatacaatgttactattcgtgcagcaaatgaagttgaaaagaagaaaatcagcctactaattgaacagtcagcagcagacgcctataatatcgtgacgggtaaaaaggtggaagagcatgaaaaaatttaa

SEQ ID NO: 169824 - DNA, 678 bp, Enterobacter cloacae
atgaaaaaatttaaatggattaaactcaacaatcgtttcactactagtgaaacagttgaaaaactcatgcgtgatccttttactgaagagaaagggaaagggtttatatttgataaatcacgaacatctcattttcacgctcgcttcatcgaaaagataattagcgaagatagaataagtaatctatacggcaacagtaccgctgttgaacgcattgaatatagagtaacatctttcagttttgacgaacaatacaccccagttttacttattgataatccaccgagaacacttaaaccatttgctcaggcactggtaaaaaaccttggtcttggtaccagcttagaagagattgagattgacccgttcatatggttcagttctttaaacacagagttgacacttaatatagtgcaactagatgtatctcaaattcaagttgctgaatttgctcttgccaagatgcaaattaatagtaccagcgatcttaaaaaatatttcaaagatgagcttattcacaaaaaaatgagacttgatcgattgacatgtactattcatgaccaagaatttagcggtaaattaaaactcttccgaaatggtatggctcaaatcgaagcacgagcggaaaaagagttaaccaaaagactatttgacagtttaatgaatatctacatgtaa

SEQ ID NO: 169825 - DNA, 297 bp, Enterobacter cloacae
atggaacacgaatacaaagaactaaacacactgcgtagcattagaaatgcttttgggcatagttggaatggtgttagcttcgcaacacccaaaatacaaaatcaactggagcagctaccttggcttggacccaaagatgttcctaatactcccaaaacaaaattcatgttctttgtttcaatactgcttgccgatttgatgcaccgtaaacaactagtggaaagagataaggtgacctctaaagtatggggtcacactgcgcgcggtaatttggtcggaaagactacaaattgttaa

SEQ ID NO: 169826 - DNA, 210 bp, Enterobacter cloacae
atgcaaatcgatgaatggatttgttgtgccaaagtcattgctttctacagtttccgcaccgttaaatacaggctctccctccccaagagtaaacgatatattattctcacaatttggacatgcaaattggaacggttgtatgtctcgattagacatacctattcttgtatcaatgaccgtgtcacatacaaggcatttaaattgctgtaa

SEQ ID NO: 169827 - DNA, 228 bp, Enterobacter cloacae
atggatactacattcattgctgagcctatagtgagcattgacgagaggttgttaggcgttgagcttctcactcgcttcattgcctcagatggacgcccccttcaccctgaattcgtaatttcatcttgggatttagataggaagcggcttttcccctatacgaacaatgtggaaacattgccactatgcaaacgtggttcgaacgaaagaatctattttgtacactga

SEQ ID NO: 169828 - DNA, 162 bp, Enterobacter cloacae
atgatcaccatgaaggtagtcgcacaaaagcggtggtgggtaagcccattactgtccgtgcttaaggcatttgtctatgcacgcatcgttaaagagaaacatattgagccgctaactgatttcattgccagattcggcttcaaattcagaacagagaaataa

SEQ ID NO: 169829 - DNA, 354 bp, Enterobacter cloacae
atgaccgtttctcagactagaaaaaatagtacaccaattaaagtttattgtttgccagatgaaaaagcgcaaatccaggaaaatgcagaagcatctggcttaagtgtagcgagtttcattcgtaaagtagcaatgggttatcaggttgagtctattgtagatattaaacaggttatagaactcagccgggtaaatgctgatcttggtcgacttggtgggttactcaaattgtggctcgctaatgaccctcgcacggttaatttttcacccacactgataaaaacgttgcttgagaaaatagaattaactagatatgagctaagaattattatggatagaatattggataaataa

SEQ ID NO: 169830 - DNA, 174 bp, Enterobacter cloacae
atgaaagataaaattttggttatttttattctaatcattccattgattctatgctcttgcgataaaaaagatgaagattgtttatcgacgccagagaataaattgaacgaacataaatacgataaatgtgccctgcgcagtaataacaatcctagccctaagcgagaatggtaa

SEQ ID NO: 169831 - DNA, 1395 bp, Enterobacter cloacae
atgagaatagtaagcaaactcacttttttcggcataatttttttgttttctgtaaatgcttatgctggtcaattagatagtagcggattacttgatacgttattagataagtttcagcaagtagccagcacatggtcattagtaattggtgattatgcaaattggctcttctgggggctggtattaataagtatggtttggacatttggtacgttggcgatgcaaggggaaggtttaaccagtgcacttgcagagatagttcgtttttttgccgtgattggttttttttattatcttttaatcaacggcccagccatatcacaatctataattaactcaatgagacaacttgcagcaaatgctttaggaacaagtactggtatttcaccctccagcatagttgatatggcttttgtgatattaacaaaggtcagttcagcagcatcaatttggtctccaatgatttcgaccattatgataaccgtcgcgataatagtattagtagtaatggcacttatcgcgataaatatgctaataatgttagtttctgcatgggtgttgtgttatgcaggagttattttgcttgggtttggtggctcaaaatggacttctgatatagcaataaattacttacgcacagtattatcgattggtgttcagttatttacgatgacattaattattgggattgggcaatcatttatagatcagtatttttctattattaaaaatgatattcctgatcttaatagtcttattgttttacttctggcgtcaattattcttttagtattgacgaataaattaccgttgttgttatcaggagttgtaggaggagcgtccttacaagggatcggtggttttggagcaggtatgattactggcgctgctactactgcaatcagtggcgctggggcaatggcaatgagcgctacagctcaagtcagtggtggtgcttccgctctaaaagcagcatttgaatctgcacaagcggcgatggccgaagaatctggttctggtgatagaggtggttcaggtggaggatttggcagcggggaagataccggttccgtagatacttctggaggacaaccatcaggcggttccggtggttcttctgcagggagcaatgcaggtagcttcagcggaggaagccaagggtttgcttcatcattctcacgagctggccgcatggcttctcacatggcgagcggactgtctaatggagctgcggagtatcagatgatgaagggaagtactaattctatccgaacacaacagaccgttggtggggaaatagcgaatcaaatacgtaaacacacagccgatcgtcagagtaaccacgaacaggatgagtttgagggtgatagtttaactggcagtaaaaaatcttga

SEQ ID NO: 169832 - DNA, 213 bp, Enterobacter cloacae; identical to SEQ ID NO: 32517

SEQ ID NO: 169833 - DNA, 369 bp, Enterobacter cloacae; identical to SEQ ID NO: 24296

SEQ ID NO: 169834 - DNA, 477 bp, Enterobacter cloacae
gtgcagcacagtgatcgccggattgccctccaagatgccttcgtacttggcgtggcgcagttcatcgacgcgggcctgctgctgggccagcagcgccgtgcgctggatggtcggcgtggtagcggcgatgccgccatcgaacgggctttcccggcgcagatgggcgatatgggcggcgcggatcatgatcttggacggcacacaaccgacattgacgcaggtgccgccgatggtgccgcgctcgatcagcgtgacacgtgcgccttgctcgacggccttcagcgccgctgccatcgcggccccgccgctgccgatgacggcgatatgcaatgcgccgctgctacccgtcttgtcgtttctgcccagcagatcgcgcatcttgtcgagcaggccggcgcggttgtccgtcggtggcgcatcggcaagcgttgcctcgtagcccagtccggccacggcggtagtcagcgcatccgatga

SEQ ID NO: 169835 - DNA, 294 bp, Enterobacter cloacae
atgaggacgataaatgctgcaccttcaactgtcggagagattttatacgaagaattcttgaaaccgttggatatgcctcccgcaagacttgctgaactgatggatacaacatatgaaaaaatttgggaaataattaaaaacgagcgagatataactcttgaagaagctactcaactctcgataattttcaacacagatgcatctttttggatgaaactgcaagagctatataagacatggtttaataaacaaaagaaagggtattcaattagattacttaatcgtaatacataa

SEQ ID NO: 169836 - DNA, 126 bp, Enterobacter cloacae
atgcgttacgccgctttccagcgcagcgaactgcgccagcctaacgacagggctggcactttgatgattgcgatttcagaagccatgttgcatgattcccattttgataatgtctgcaatcattag

SEQ ID NO: 169837 - DNA, 717 bp, Enterobacter cloacae
ttgaaaattaaattaaaagaatttttattaaccattggattaatcgcagcggtaataatagcctcatatcctgcatataaattctatatgattttccataattatgaatattctacaaagaatcaagattgggcgaacgttggttcatttttcgggggtgtttacagtgctatattttcatttataagtgttatacttttagcggttacattgcttcttacaaagaagtacaataatcagcagttacaaattttacttacatcgcaaagaaaagatattttttgttctctttttgacaagttgactcaaaaaatgaatgcaatcaatttttttgaaatgggaatacagaacgaggaagattacttcagttattgtgaatttcacctttttcgtgatttagcaagcataaaaaaccaaaatggggaaatgatacacgctggaattattatcgaattaagccgcaacattttagctagcgactggtttgaaaacacaaaaccttattatgatgtagttttaattacagcagagatacttagtatcctcgacagttcccctgaagacgacaagcggttttttctagcttacatggaagccaactcttctactaaacgcttatattggttattttgctttatgtatgactacgatgttagatatgctgatatcctgattcggaacaccagagcgctccgcatccccaaagggtatgtataa

SEQ ID NO: 169838 - DNA, 675 bp, Enterobacter cloacae
atggacaaagtgaataccgtatcgatactactaatttcgttgtcgctagccttgatagctatttttttgggtattggttcggtatcaggatctataccgataggaaactctggggtttcgcttcaggcaaccaaaacctttccacttattctgatcatcttctggttgtttgtttggcagcgctttactgtcctttctttacacgagaacagacctactatcgacagattgattgtggataaagtcaacacatccaatttggtacacagtgttttcagtgctcaaaaattcggctttctaggtgcttatgccgtatgtaaatggggatggaacgacccatccatacccaaaggtgcgcccggaaactatattcactacgaacgcggattattggttcgtagattcaaactatcattccttggcaatgactctgcagggactgcgaagtatgtgcattttggccccaaagccagcaacatcgagaatggtaaatttacgcctctaaaccttggttactggaagtgcctattctttgaagcaaaatttcttacgacaagactctttgacaccccattagttggacaacattacttacctcactcttttgcttggatcgctgttttagtgcttagttttaaaagtttaagacatttactagcccaaatttttcagtaa

SEQ ID NO: 169839 - DNA, 219 bp, Enterobacter cloacae
atggctatggaaattaaggcgctggagcagcgtattcgcgtcctgtttagccaaagcataccgccccttttgagggtagatacccgtctgatgatgggtcatcgtatgcgcgtgactgctcaaccagaggctgaactcgtgtggcatggggttacatcgcgcagacgacttaccacctggatttctgatgcaaggctgaagtctgatgtgaaaaggtaa

SEQ ID NO: 169840 - DNA, 147 bp, Enterobacter cloacae
atggctatcgggaacagacagattcaagaggaatcacccaaagaagagttagatcgcttgctggatgagcttgcattcacccaggagcaacgagagtttattgaatccatgcggcaagtggatgtggacgataacgaccaggagtaa

SEQ ID NO: 169841 - DNA, 333 bp, Enterobacter cloacae
atgagtcttaaactcttaagagaatccgttgaaaggcgcaaaccgatttcattccaatataacaagcctggaaaagttgctggtgagagagttggaaatgtccatgcaatctttatcatgcgccgtaaaagcgatggtgtagaaacaactaagttgcatatcgtccaaactgctggcgtaacagatactgttccaaattttcctgaatttagaacgtttgatattgagacaatatccaatgttgtaattcttgaggaagagcctgagtttccaatcaatgaaaaatataatcctgagtatgacggatatcaaaacgtcatagctaaggtgtaa

SEQ ID NO: 169842 - DNA, 1014 bp, Enterobacter cloacae
atgagcctaagccattcacatctcatcggcagtgatggcgttaatgacctggtattgaatatatcaggtcttaatacgcaagctaaaggtgttgaagacatttctgcatgcttctttgcacattgttccaatacaggtgcaccacgctttacatgcaaactaaatattcaaagtctgcaacaacttcacaagtatctatccagttacagcgtgatatctgatgaaacatcattaaccactggtaggtttgttgaagtaaaagataattacaatgagataatcaacattctcgaacatgctgataatcactcattggttatggcgttgcaacatctcgtgagcaataaattaactaacaacgatatcaatacaattcttggtcggaaagaggcgctcgcagagtatgaagaaatgctgaaaaatgcagagaatcatacagaacctgactggcagaaattttttgagcgtaatgaatggatattcggttatggattgaagtataaatatctcaaaattttacaacgagaagctcatatatcaaagactgatttgaatggtggcaatgatgtcattgcggattttttaatgtcagattctcgatatacgaaaattgttgaactgaaaactcccacgacaaaacttttcacaaagagacaaggtcgttctgatacatggttcctgtcaagtgagttaactgatgcagtcagtcaaattttagctcaaaaggcaaactgggaaatcgaaagccagacgagaaactatacttccaacggggatttgattcatgaggagtctttcgatacggagtgtattctgattattggttcattatcttccattgatggttctgctaaggaaagacttattaagagaaagactctcgaactctacaggcgaaatctaaagcatatcgacattctcttctatgatgagttattagaacgttctcgatatattgttcgcagtgctgaaatcatagaggataaattagcgagcacattgaatctaccgtaa

SEQ ID NO: 169843 - DNA, 195 bp, Enterobacter cloacae
atgaaacgcttgcttgtgctgacgctaacagtaatgccagtcctggcgaatgccggacagataaccctgattctcagtgacgaacaggagacagacaacgcgagggtgtgcatatatgaaaatgccaccagaacagagacagtaatgcttccaccgtccaagcagtgtaaatataccgtaacattcgagcagtga

SEQ ID NO: 169844 - DNA, 153 bp, Enterobacter cloacae
atgttcaaacacatgtttataaatgccaacattatgattttgttcaagatattctcaacggaaggatttttcgatcaggaggtggccttgcaggtcgttaagcggtggacacaaccgcgccatttaccacacacaagtcagttctatttttga

SEQ ID NO: 169845 - DNA, 864 bp, Enterobacter cloacae
atggaacgtaaagataatttaaatatgctgtattccaaagtttttagaagaactttttttaactctttggcaaagggtaaagatataaatagtgcttttggtgagtttgatgattatctttcgaattcgattgatttgactgtaagagatttctttatactcatgtataacttgctgaaaaatgagtatcggaacgagtatgtttataaaacagctattgttaataaaatagtttttggtcgacatagtccaagaacaagttctacatctatagagcttccaatcaacaactcaatagttgacgtagcggtttttaatgggtgttcgactgcatatgagattaaaacagaatatgattcacctaagcgcctctctactcaggctgttgattatcttgatgtttttgagaaggtttatattgtaactcaccccaagcatactgaaaaatatatatcactaaatctaccaaatattggtgtgatatcgttaagcaccaaagataccttacgagttgaaaaggaggctgtatcgaatctagagaatatcaaattagataaattattcaatgttcttagaaaggatgagtatatcagtataatcgaagattatacgtcaacaaaaatatccatgccgaatggattggtctataaattttgtaaagaaatctttgtttctatggagcataatatagctaacaaatattttattaatgctttgaaaaaaagaacaactgataaggaatttattgattatatatactctctccctgcctgcttgcgggctttgggttatgcgactccattatctaagaaacagaaggattatattgttaatatcatggattttaagctaggaatttattaa

SEQ ID NO: 169846 - DNA, 237 bp, Enterobacter cloacae
atgggtgatggcttccggatgaccggcggcaaacgtgcgcgctatcgttcgcccgcatgcgtcatagcgatactgcgaggttacgccatcgagccccacctcttccagcagcagcgagtcgggcccccagcggaactgataggcttcgccattttcattttccagggcaatcagtcgcccgcggctgtcccagcggcgacggacctcttcaccctgagtattacgcgtagcggttaa

SEQ ID NO: 169847 - DNA, 1200 bp, Enterobacter cloacae
atgactgagaccttatctttcagcgcccgggtgctgggtatgctttacggtgtggcattcggtgatgcgttgggtgcgccggtcgagaaactctctgctcgccaaattcaggaacaatatggccgggtaagctctatccatcagcgctggcaccgtatgagtgaaccctctgcgcgacgtaataaccgcatccgcggcaacggcatcatcaccgatgacacgctgatgactctctgtctgatggaggtttatgacgatctgggccgccatattgatgcatgggatatggcagagtcattcgtacgtaaaattgcctgggagcctcgctgggtaccggaactgaatcgggaagcactggttattgaacgcctgttttatcccgaaaagtggattttccaccgcctgcaactggcggcgtgcgatccccgccaggggggggttggtaatatggttaactgcggcgcggcaatgtatatcgctcccgtgggtgccatcaatgcctgcaaccctgtcgctgcctatcatgaagccattaattttacccagggacaccagcagagctacggtctggaagctgccggagtctttgccgcctgcgtttcagcggcatttattccggggattactctggatgccatcattgatatcgcactgcagcttgcaaaagacggcacccggaacgccatcgcggccgccattgatgttgcctgcaactaccgcggcaagaagtgggattatccgcttgttgtcgatgagctgcatgaagcgcttaagccgtggtcccctatgggtgatgatttaatgcacggcccggaaaaagcgggcgtaccaacaatggcctaccagccctctcgcctgatgtcgattgaagaactgccgatggcgctggctttctgcctgctccgtgagggcgcgttccggggtgcagtagaggattcaatcaactccggacgcgatacggactcaatcggggtaatgagtggcgccatcctgggagcgctgcacggcagcgcgattatcgaaacggacgtactgactgccattgaagatgctaaccaccttgatcttcgcgctgccgcgctgcgcttcaccgaaacagcgcagtgtattatccagaaagatctctacgcggcggcggaataccgtcagcacgttatgccgtttttgcaaccggctcacaccgccgggcgaggagagtaa

SEQ ID NO: 169848 - DNA, 1413 bp, Enterobacter cloacae
atgaacgtatttaagacattagcctactcactgattgccgcgtgtctattttgccaggccgcccaggcgaaaccggtgacgcttcgcgttgtagaaaaagatttgctcaccacgaaccgggaagatgtagagcatattcatcggatagaacaggcgctggcgcgccaggggcacgatatcaaaattgagatcgtcaacctctcctcctccggctattccgatgtcctgaacgtcatgctgctgtccggaaccatccctgatctgatctattttaacggaagcgatcagaaaatggtggaacagggcatccttgaagactggcgtccctggattgctaaaacgcactatctaaaggaggcactgtggccgcacaacacgttgcgactgcaaaaccatccgacgctgctttacgtttacccactgcgggcgcgtcaacccgttattcgtgaagactggctgcagaagagtgggttcaggacgtcacctcacacgctggatgattatgtgaagctgtttagcgccatccacaacggtgacttcaatggcgacggaaagtcagacacggcaggtatcacttccgaaaaagatttgcgcgatctggatggttttttaaatccggcgttcggtatccacacaacatggcttaaggacgaaaaggatcaatggatcaacgcgcaaattagcccgcaggagcgggaaaaactgaagttttaccactcgctttatgaaaaagggctgctctcttctcagtacatcaccactaactgggagttaaaagaggatcagttttataccggaaaagtgggtgttgtctcggtctcgtctccgggtaacgtaggggtatatcaggagaaaatgcgccaggttcatcctgatgcctcccttgtccttctcgacccgcctaaaggtgcgggtggacaaggtctggcggccgtcgatgtctccatggagacccgtggttttgcgatgtcgacgctatcaaagcataaaaaggaggtcatgatcctgcttgatttcctggcaagccccgaggggcaaatgatggagcaaatgggttttgagggaactcactacattcgtgaaggtgggtcgataaaagtaacgtcgaaaatcaatgcatggtatccgcgatttatgtatgccgccaactggacaccaccggttgagtggcgttcgcccgcaatgcgccggtatatcgaaaattcacagcgctattttacggcggataacgcctttattttcccatcgacctttgctgccgccttagattccacaagcagcatttataacgaatgggcctataaatttgtctcgggtaaagccacattcgacatgtgggataggtatgttgatgcctggaaatcggccgggggtaacgccatgactcactatgcacaggaaaaattaaaatga

SEQ ID NO: 169849 - DNA, 3693 bp, Enterobacter cloacae
atgaataccaataacatcaaaaaatacgctccacaggcccgtaaccagtttcgcgatgcagtgatccagaagctaaccacgctggggatttccgccgataaaaaaggcaatctgcagattgcggatgccgaagtcatcggtgagaccgtgcgctatggccaattcgactacccgaaatccaccctcacccgccgcgatcgtctggtaaaacgcgcccgcgagcagggctttgacgtactggttgagcactgtgcctacacctggttcaaccgcctgtgcgccattcgttatatggaaatccacggttatcttgaccacggtttccgcatgctctcgcatccggataacccaatcggctttgaagtgctggaccatgtgccggaagtggcagaagcgctgctgccggagaaaaaagggctgctggtcgagatgaagctttccggcaaccaggacgaagccatctaccgtgaactgctgctggcccagtgccacgccctgcaccgtgcgatgccgttcctgtttgaagcagtcgatgatgaagctgaacttctgctgccggataacctgacccgcaccgactccattctgcgcggtctggtggacggtattccacctgaagactgggatgacgttgaggttatcggctggctgtatcagttttatatctccgagaaaaaagaggccgttattggcaaggtggtaaagagcgaagatattcctgccgccacccagctgtttaccccaaactggattgtgcagtacctggtgcagaactccgtcggtcgccagtggttgcagacctacccggactcgccgctgaaaggcaaaatggactactacattgagccagccgaacagactccagaagtgcaggcacagctggcagccattacgcctgccagcattgaaccagaaagcatcaaggtgctcgacccagcctgcggctcagggcatattctgattgaagcctataacgtgctgaaaaatatctacgaagagcgcggctatcgcgcccgcgatattccacagctgattctggaaaataatatttttggtctcgacattgacgaccgcgcggcccagctttccagttttgcattattaatgatggcacgtcaggatgaccgccggatatttacccgcgacgtgcgcctgaatattgtctccctgcaggggagcctgcatctggatattgctaagctgtggcagcagctgaacttccaccagcagaaccagaccggcagcatgggggatatgtttgccgaaaataccgtattgctccataccgacagcgccgaatatcagctgctgatgcgcacgttgaaacgctttgtgaacgccaaaacgctgggctcgttgattcaggtgccgcaggaagaggaagcggaactgaaggcatttctcgatgcgctgtatcgcctggaacaggaaggagatttccagcagaaggctgcggcgaaagcgtttattccgtatattcagcaggcatggatcctggcgcaacggtatgatgcggtggtggcaaatccgccgtatatgggtagtaactggatgaacgaaatgctcaaagtttatgccaaacgttacttccctaatagtaaatctgacttatttagtatgtttatagaacagtctttttttatggttaaaaaaggaggaaacgcaggtcttatagtcatggaagcatggatgtttcttgcttcatatgagaaattgaggattgacatcattaataataaaaatatccatgatttaatccacatgccatatgaaggaaaaggaaaaacaccactcggtatcaactttggtacatctgcagttatttttgaaaactcatatattaaacataaaaaaactcatttttcttgcatcagatattatgaaatcgatgagtcgggaattccacataatttccccaccatgaatttaaaaaataaagtagttagtctagcctcgtttaatgaattacctaataaaacttttgcatattggacaagcgatgatttaattaatgttttcataaaaaatagaagaactgttggtgatatagcaaacccaaaccaagcattagttacaggcaacactgaagaatatattagaaaatggtatgaggtttcaataaacaagattggtttcaattgtcaatcacgtattgaggctaaaaatactttacgtaagtggttcccatataataaaggaggtgacttcagaaactggtatggtaactttgaacacgttgttaattgggaaaatgacggttttgaattacaaaatacccttcacccctcaggaaatagaatctgggcacataactttgtgctggatagcatatttaaagaatcgattgtatggagtaaaatcacttcaggaaaaccatgtttccgttattctcccaaaggatttctttttgatgatgcctcaggtgtttgtacatttaatgaaggtacaaaagaatttttaattggattactctgcagcaacataaatacatcattacaagagatgatcaatccaacattgaatatccaacctgctaacattagagacattcccatcccaaaagatatttcttcatttcctaaaaatactgtaactaaacttttagagattcataaacaggattgggattcatatgaaacgtcttgggacatgaagaaagttcatattttttctattttatcggacaacaatctacttagcgatatctactgtaatcttttaaatgaatgggaggagttatataaaacaactcttgaactagaattagataataacaaaaatatattaaattgttataacattaccaatgaaagtgacaatgataatatcatcacatcatatatttctttaacatgcaatccaaattatagatatcgaaatgagcaagcgcagaaccgaaaaggtcgccttcaatctgataccctctctgaacttataagttactccatcggctgccaaatgggccgttactctctcgatcgcgaaggcctggtctacgcccacgaaggcaataaaggatttgccgaactggtcgccgaaggcgcatacaaaacctttccggccgataaagacggcatcctgcctctgatggatgacgagtggtttgacgacgacgtcacctctcgcgtcaaagagtttgtccgcaccgtctggggcgaagaacatttgcaggaaaacctcgattttattgctgaaagcctctgtttatacgcgataaaaccaaaaaaaggcgaatctgcgctggataccatccgtcgctatctttccacccagttctggaaagatcatatgaagatgtataaaaaacgcccgatctactggctgtttagctccggtaaagagaaagcgtttgagtgcctggtttatctgcatcgctacaacgacgcgacgctggcgagaatgcgtaccgaatatgtggtgccgctgctggcacgctatcaggccaatatcgatcgcctgaacgaactggtcgatggtgcctccggcggcgaagcgacgcgtctgaagcgcgatcgcgacaatctgagcaaaaaattcaacgaactgcgcagcttcgacgatcgccttcgccactatgctgatatgagaatcagtattgatctcgacgacggcgttaaggttaactacggtaaatttggcgatctgctggcggatgtgaaagccattaccggcaatgcgcctgaggtgatttaa

SEQ ID NO: 169850 - DNA, 594 bp, Enterobacter cloacae
atgataaaccttctcccaatagggaaaataatctcaataatcgccgttatctatgcgactgcctgctgtctgattttatggggcgtatatgatgaaaacacaactttcgtgacagctctatctgttgcatctggaggttcgtttcttcttaacactattttgatatcaatttttttctttggatggcgaaagttatggcaatggttccctaagctaaatgatctactcttccctgatttgaacggaacctgggatatggttattcattgggaatgggaagataaaaaaggtacatcccacgcacaagcaactataaggcaggattttcttagaattggaatggatgtcgaagctgaagactccgattctcagacgttagtggctaagcctaaaaaggataccgaaacggggcgaccagcactctactacgtttttttaacaacccccaagcataaggcaggttttgttgcacaagattcttacagaggcacagctattctcaagctaaaccttaatggtaaagaagtgctaaatgggaactacttcacaagccgtaaaacagtaggtcattacgagctgacacgcattgactaa

SEQ ID NO: 169851 - DNA, 1227 bp, Enterobacter cloacae
atgtacaatgaagaaacaaaagattttgcgaagaagcaagagcaaaaactgattgaggcgctgggacacagccgtgagcatactgatgccagcactgaagtccgaagcagagatgattaccagagagactatgcacgaattctttactcatcctcattccgacggcttcaggggaaaatgcaactttttgaagttgatcctgaaaaatttaaccgaaaccgcttaacccacagccttgaggtcgctcagatagcacgcagtattgcatcggatcttgaactgcaatatcccgtggttgttgagctggcagccctagcccatgatattgggaaccccccattcgggcactcaggcgaaaaaatgcttaacagtttatccgctaaaatcggcggatatgaaggaaacgcccaggcgcttcgtatcttgagaaaactcgagaaaaaatatgccggctgtgcaggcttagatctcacctaccgcagcttactgtctgtcatcaaatatccaaatacgaaatccacttcaaataaattcatttatgatgatgactataccttctatcagcggttgctggaagataagcaactagatatgaaggcaggtgaaaaaaccattgatgcgcagatcatggatctggccgatgaaattgcatatgcagcgcatgacctggaagatgcattgagcagaaacatggtgactatcgaagatattgaatatgaatttcttaagtcaccagactacaacgttgctttagaacacttcagtgagattgtcagcacgtctaagaaaactgcatctgaggcaaaattactgaagtcgtcagaggaatttgccataatttttcgtaaagagctgacgtccaacatcgttaaccgtctggtcatggatattggcgttgttgaaagtgacaattgttacgaagagctggggtacaaaacgttacagaaacttgctgaaggccttaaaaaactgctcttcaaagtcattatgcgtaaaaggaacatactgacttacgagtttaaaggaaataagatcatcagtgatttatatgagttttataatgccggtgacaactataagtttctgtcacctgagcttaagtcttcgttatctggtacagatccgtctcagctcgaaactaaaaaagcgcgggctgtggttgattacatttcaggcatgatggacacattcgccatcaaggaatgggaaactcattgtaagaaataa

SEQ ID NO: 169852 - DNA, 141 bp, Enterobacter cloacae
atgacggcatacggaacggagtttttctcaataaacaatgtgaaccgattcaggatcctccagaacgttatcgaccgtcatctcacatatatgtctagacaacaactcacttttcctgatgcggagggtatacagatataa

SEQ ID NO: 169853 - DNA, 600 bp, Enterobacter cloacae
atggcgttttttggagatactccagattatgtttttgataacgctttttgtcatggtttggatgaggcaacatcactactcacatctatgatagccgagataaaagagtatgggataagtggtaacttcattgaaacaaagaatgaaccagtcgatattgttcaattaatctgtcatcaattccataaagttgcaagacaacttcaacagcgtcacgctgacaggcaaactattgaaataaatgatgaatatgatgttcaggatttgtttcatgcgctgttaaagatacactttgacgatgtcagacctgaagaatatacgccaagctatgctggttcttcgacgcgtgttgattttcttcttaaaaatgaaaaaataattattgaattaaaaaagacaagaaaaggcctgaaacaaaaagaagtaggagagcaattaattattgatattgcacactatcaaactcatccagattgtaagacactaatatgctttgtttatgatcctgaagggcgaatagcgaacccaataggtgtcgagaatgatttagaacgctgtacaaatgccattaatgttaaagttataatctcaccaaaataa

SEQ ID NO: 169854 - DNA, 132 bp, Enterobacter cloacae
gtgactatacatgacgtcgggatgttcaccgtgaaagaaatcaaccgcctcaaaatccttcaggatgtcatagaacgtaaccggcatcctggtcaggctgctgagatgctcggcattgcagtcgtctgctga

SEQ ID NO: 169855 - DNA, 126 bp, Enterobacter cloacae
atgcaagtgcgcctaacaaagattatgttaaatgtgatggctaaatcattacaaatcaatacgttaaccacccattcggttctcaagcctcactgtggtaactttaaaaacattgtccgttcctga

SEQ ID NO: 169856 - DNA, 360 bp, Enterobacter cloacae
atgatcagaggagaagaaaactatgcatcccgcttcatcgaatcgatgtgccagaaagaaccgcaactgaaaatggcgcaacagctgtcgctcgacttctatcgaatgttgaaaacgaagaataaatcgcagttaaatcaatggttctctgacgtcagtcaaagtgggctcattgaccttcagcgtgttgcggccggtatggaagcggatgcaacagcaatacacgaagcgataagcagcagatggagtaatggcgttgtggaaggccatgtaaaccgcctgaagatgctgaaacggcagatgtacggtcgagctggcttcgagttactgcgacgacgagtcatgagccctctggcttaa

SEQ ID NO: 169857 - DNA, 237 bp, Enterobacter cloacae
gtggaggatattcacggggcagcgtcaaaggcgggactggccgccccggctcctggcgaccataccgcgtcccttgagaaaaacagtaacctggcagaggcgctgggactcaccggaacgccggggatcatcgtcatgcccgttagcggggcgactcccgacaccatcacggtattcccggaagccgttaccgctgacaggcttcaggtagcaatccggaaagccacgtccagatag

SEQ ID NO: 169858 - DNA, 774 bp, Enterobacter cloacae
ttggaaaccaaaaaaaattgtgcttattgtaaaagcacaacaaacttaactaaagaacatatattcccttcagcgataattaaaagttttgatattgaacttttagcgatgactgataaaagtgactaccattttaaaggcgatccagttattggggatgtatgtgccgagtgtaataatggaatactgtctcaactagatgcatatttcgtaacttgttttaaaaaccagatgctcacgcctttaaaaccaggagatgaaataacatttgaatatgattatgatttattattacgtgaacttctaaagatatcatataattcagcaagagcatcaaatggcggttatgatgccagaaccactttagaaaaacacataccattcataattactggtaataaaaaagtagatggtgtaatcctttctcttctaatagtaacttctgcaaacaggattgatgtggaaactggtaaacctgaagagcctttagaaccatatctattaagaagcacatcaattggtggtttaaaccttaaccctaataattatattgttaggatggttgcattcaatagtttttggttctttctgttaattccgaagaggtcagttacatccaaaatgaaaaaagaattctgggatgaatttaaaagtaaaacccatctgcatggagttttattaaaaaaaggcaatacatcaataaagatcacaaaagataaaacaacatatttgcatcctcacttaacagaaatgatgtggcgtaaaataaagtag

SEQ ID NO: 169859 - DNA, 411 bp, Enterobacter cloacae
gtgcacttcctgcagcaggcggaacccttcccagacaaaccggatgctgaccggcttgccggttggctgtccgcccagcatctggcgttgcgttttgctgatgcgtcgtccgagcggatcgtagcggaagctgacctgcgcctgaggtttgttgtggtcccgcggctggctgatgaggtaccagctgaacgggttatcgtcccgctcttcccgtaccatgttattacggtagtcataatcccagcggcgggaccagcagcgcggcgacggacgctgcgcattgccagtgaatacatcccggcgatgcagtcgaccaagacggtcgtacttgctgcgggttgtaagcagaccccgggggcggcgattctcaaggtggagtcgttcgtcgcgggtatactgacaatttattga

SEQ ID NO: 169860 - DNA, 849 bp, Enterobacter cloacae
atggctacagttgtttctatgattaatatgaaaggcggtgttggaaagacaacgctaacatttaatttggcttggtattctgcatggatccgtaatctcagagttttagtaattgacttagatcctcaagcaaacttgagtcaatatttgatgggggcggaaaaatacctggattttttgaataaacaaaataaaacggtagtagatatatttgagcaatactcagcacctgatagactaactgggtctcctgttataacaaacccggatgatatgattcatgagttcaaagattggcatgatgaaagttgcattcatttagttgcttctcgattagagttagcgtggactttaaaaaacccaacagaaaaagccagccttttgcctcagtttatagcaaaggtggcggatagatatgatttaatacttattgattgtgcacctactgaatctatacttactacagcagcttatctctctagtcgttatatatttgttccagtgaaacctgaatttcttgcaacaatcggtcttccattgttagctcgttctatgagtgagtttaaacaaaggaattctcagcaaagcttagacatggctgggattgtttttaatgattctaaaagaacgggaactactcctgaacatttagagtcgataagaaacgtcaaaaagcttgctgatgagttcaattggccagtcttgactaatcaagcctaccattccgattcctatccaacaggatctcgagatggtagcccaatttttaggactaaacatgcaagagactatgtgaaagatgagtttcatctggttgcagaggagtttctagatggagttgggctatga

SEQ ID NO: 169861 - DNA, 525 bp, Enterobacter cloacae
atgataagtaagaaagaaaaaattgctttgcttcatatgctggctatcaaagaaagtttaacaagtacggaatttaataatgtacttaaggaagtccaaaatctttcattggacttgtttttttcgatgaaatcgaatgaggttaaaaataactcatcattagcaaccaaaactaatagtgtttcatcatcaaaaccaaaaagtttagattttattttgaaaagccttagagtccaagacgctgaaaagtatgaattactacagcagctaagattaaatttacggtctggtgcagtacttaaaaacttcggcgatatcaaagaccttttggcaaaattagatcaagcgagcttgataactagtagtaaagcttcaacaataaataatttattaatgtttctctctaagaaaaaatctaatgagatcagggatattataaaaaatcatatccgtccaaatgtgacacatgatgataaaggtttcaatgagttggcaaattacattattgatcctactaagaagtag

SEQ ID NO: 169862 - DNA, 408 bp, Enterobacter cloacae
atggcaggagtattagcaagcacggcggcggctatagggattcttgataaagcggttagcatcacccagaaactggcgaataacagcgatgaactggacaaggcaaagttaaaacttgagttggcgaacctggtggttgaacttgccaacgccaagatcgaaaccgtggcaatacagactctattgttcgacgcagagcaaaaaatcaaagtacttgaagatgatttaaaagataaatcgacctataccttcaagcatggtttgtggtggaaggaaggcgatcagattccattttgtcctcaatgttatgaggttaaacaaatcaaaacacacatgaaactattttcagctcgtgatgaaatgaacgataattactggttttgccgtaactgtagtttttctacttga

SEQ ID NO: 169863 - DNA, 360 bp, Enterobacter cloacae
atggcaattgttgaccttacgcctgatgtcgtggaagtgctggactatgagaccatcctcgcagagcgaaaggcgaccctcgtctcgttatacccggaggaacaacagggggcagtcgcgcgcacgctgatcctcgaatcagagccgattgttaagctgctggaggaaaacgcctaccggggagttatctggcgacagcgcgtcaacgaggccgcgcgtgcggtcatgctggcttacgctgccggaagcgatctcgaccagattggggcgaattacaatgtcccgcgactcgtcatcaccccgtcagacgacacgacatttccgcccacgccagcggtgatggagtctgacactgactaa

SEQ ID NO: 169864 - DNA, 1860 bp, Enterobacter cloacae
atggcgttttggaatgatggttacgaaatgagctataaaaaattcaggctcgacataaatgggttgagagcctttgccgtgatgagtgtggtgctttaccatttcggcgtgccttatgtatctggtggttttgtaggcgttgatatcttctttgtgatctctggcttccttatgacaggaattgtgcttgagcgcgtagatcataaaggggtgctagatttttatatcgctaggtttttaagaattgtacctgctctggcggtagtagtctttgcacttatggtttttggtctatttaccttgagtactaatgagtttgaattacttagcaaaaacgcaatctcctctttgcttttttattcaaataattattacgcaattcactctagttattttgatccgtcatctgaatacaacttcttgcttcacacttggtcactttcagccgagtggcaattttacattatttatcctctacttgtaatagccatcaagaagttaaggattcctgttggcattgcgttatctacaatattcgttatatcgcttgcagttacacttatgggtgtaactggaaccagggaggatatcttctatcttctgcctacaagggcatgggaaatgatttctggtggtcttgtatacatagcctcgtctaaattcaaattaccacactggcttaagcattttgatgcttgtggaatatcgataattgtattgtctgtcataatgttacatagcgatggatattggcctagctatttaacccttatgccaatttcaggagctattttagttctactagcaaataaccaaaaatcaatactcacatctaacatggtgtctcaatgggttggtaaaatttcttattctgtttatttatggcattggcctgtaattgtgtcaatgaaatactatgaaattgatttaaatttaataaatgttgcatttggaattgttgcatcatttcttattggtgatatttcatataggataatagagagtacccttcgtaaaagagataaacttttattaaatataattatatttattttggctttattatcttcactgataattttatatacaaaaggagcggcatttagattcgacgggacgttaaagcaagttgctgagtatcgtatggataaatcaaaatggaaggaaaatacgtgctttctttccactaaccaaggtccagatgcatttagtaaatgttatgagtctatgaacgaatcatctatagttttttggggggattcacatgcagctcagtacatacccgcaatgtcggctgttttcggaaataaatttaacgtagtccaacgaacagctgctttatgtggccctatacctggtcacaattacaaaccaaaccccatgtgtcaaaaaataaatgactatgtatttacagagattatagaaaaaaaaccaaatactgttgtcatggctggattatggaacaggtatccaataagagaagatctagatagtttagtatctaagattcataactctggagtgaagagaataattattattggtccaattccatattggaatgatactgcattaaacaacattgaaaaatatggtataaatgattccgggtcacttccagttagcttgcttaaagaaagcgtaaacgtattcgggaatgatagattcctacgtgatttatcaaaaaaacatgattacatatcatatatatcaccattagaggatatgtgtagcaataattactgcaagacaattatatattcggaaaaaaccgcataccctattcagtttgataactctcacttatcgattgagggagcaatttggcttataaacaaaaataggaattattttaactga

SEQ ID NO: 169865 - DNA, 1209 bp, Enterobacter cloacae
atgataaaaattgaaggacttggaattcaaggatcttcaacggactacaagtatgctattggtctttattcgactgcattcgttagcgtgagtaaatgcacatttttgcgaggttgggcatttattgatggtaactttatgcgcgatacaattattgagaagtgcgttattgccgcgccgtttggcggacatgcgatgcagtggaatttaactgttagagactgtacgttttatgcgttttctctccctggtgcatccactcagtcaggtggaataaatactacaggcggaggtgaacttctagttgaaaattgtgagtattggtttaatggtggtaatcatgcggctgaacatattgtcggatgcaggcaggactatggccaagggtgggaaggtgatataacagtaagaaatattaaggtttatttcaataagcccggatcgacttttacaattgtctatcttgccggtgcttatccaaatactatggattacacaaggccatattcatactatggaaagaagataatagttgaggacgttgttgtatatccaacaacgggtaatattgctcctgcaaatgttctaattcagcctgtcggttttgctgcaccagacaatcaatctatgaaaattcgcctagcagatgatgttgtaattaggaggattagttcggataaggaaagaattggtgggctaagaatgctagttggtgttccgggtgtaaaaccaagcccagaaagatacatagctaaaaaagtctcatttaaaattcaggaatgtgactttacaacaggtggagttgttttcaatcttgcagtaccagggagtgatggaagtgtaatatcaaatagtgtaacttttgatagatgtacaggttcaatttcaggaactattagtggaacgtcaaatgatacatgggaatttaaacaatgcgaaatatcatcgcttaattctgctggatctttaaattcaatcaatgtttatataaaggaatgcataatctcaggtgccaattgtggcggggcaagtgcttcagagaaatggcactattacaataacaatattatttatagctcctctgtaaatttaggctctcgagctattttatgcgttaacaatacagttacatcttctggagggttggtgggaaggaccattggtgagtggtggagttacagggatccatcagtatttagaacttcatga

SEQ ID NO: 169866 - DNA, 159 bp, Enterobacter cloacae
atgacgatgaaaaaatggataagcacgttacggcggttttttgcgccccgaccagtgaatgcggagaacagcgcgcaacgtgttcttgagtcaatactgtatggcgtggacgtagccaacatcgacccggagtggttccatgataaaacgtcacgctga

SEQ ID NO: 169867 - DNA, 336 bp, Enterobacter cloacae
atgcaacagtttgatagaatagaaatttcagataagggaatgattaaactgatacgtaacggtgggaaagatttcatcttcccagcagcaagaatcaatacatatgacatcaaagaatatgaagaacagctaacgggtgattttgctggtattgctgaactcattggcactctgttaggaacgctgaaaaaagagaaatatcacaatctgactttgtacacatccgatgatgagttggtgatcacaaaaattgagccgcgcatcgtcataagacttgatgaagcaattaacaagtcgagagagattgaagtcaaaaagtatggtgtattcagatag

SEQ ID NO: 169868 - DNA, 456 bp, Enterobacter cloacae
atgacctttagctggaaggcgggcattgctctgttcatcgttggattgatcgtggcgctcgcactccttgtgaaccactaccgcgacaacgccatcacctacaaagaccagcgcgacaaggcaactgagaatctcaggcttgcgaaaaataccatcgatgacatgcagactcgccagcgtgatgtcgctgcactggatgccaaatacacgaaggagttagctgatgctaaagctgagaatgatgctctgcagcgcaagcttgataatggtggtcgggtgctcgtcgccggcacctgtccgaagcaggccacccagcccgccagcctggacgatggaaccaccgtcgaactctcttcagctgctggacgaaacgttctcgatatcagaaacggaatcaatgaagacagaataaaaatagcggcactacagcagtacattattgagcagtgccgctag

SEQ ID NO: 169869 - DNA, 690 bp, Enterobacter cloacae
atgaatactcaatatctgcaatacgttcgcgaacaactcatggtggcaaccgcagacctgagcggagcaacgaaagggcagttggtagctttcgctgagaacgcgatgtttgaggcaactcctcgcagccgcggccgcaagaaagtcctcaaccctgctaacggtcgaatgatgaacccgacaagcccaccgattcccgggcagcagtcacgcgctaaaggctcacatatcccgctggtcaatcacgttgagttctgtaccgcgtcatggcgccgcgcccttatgtcactcgaagagcatcagaaagcatggttgctctggaactacagcgagaacatccgattcgaataccaggtggcgattactcagtgggcgtgggcagaattcacggatcacctcggtaccaagaaggttgccggcaagacgatggacaggctgaaagcactaatctggctggccgcacaggatgtgaaggctgaactggtagggaaggagacttacgaataccagaagctggctgaactggtaggcgtcactccaaagaactggtcagagacttttacggatcgctgggtagagatgaagcgtatctttgctcgcctcgatagtagcgctttattgcagattacgcgatcacgttcacaacaaaaggcaacaaatttagatgcaagtcttgcaaaactggattaa

SEQ ID NO: 169870 - DNA, 1065 bp, Enterobacter cloacae
atgaataactttgagcgttatatatatcaaaggacgttcagtgcggcagatcgaatagaactatatgatgactttaggcaatatcttctcgatggattaagcgcacaagatacgtttgcaaagctaattgacaactacacacgcagaggagaaaaccccggaaaccctatcggtaaaattttgaaagaatgtagtgataatttgaaagccggtttttcattatcagaatcgttgcgagaatggattccggatcaggaactaagcattattgaatcctgcgacactgccggtagagtcgcggatggatttcttaatgctatgttcattgccgaaggtacagagaaaatattgagttctatcaaatcttcattaatgattatgacgtatatgttttccttgtcttttggtgttgtcgccatgttttgtatattgcttgtacctacactcaaacaaaatgttccattagaaaagtggaatgccttgcaattatgtgtgtggtacttctatgtaatagttacagaatattggtatgtgataattgctgcaattgggatagtaagctttgctgcttttaagtcactttcccgctggacaggagatatacgcttttactttgacaggctacctccatattcaatttataagcgcttaaacggggctacgtttatcctgaatgtcaatgcaatgctttcagctggcattcctatggaaacagccataaataacatggtcgattcatgtgaatctccgtggatgcttgaaagacttgaagcccttcatggcgcaattgaatccggtgtggaaaatttaggcacagcgctggataacattgggttcgagtttcccggcgatgctgccattattaaaatgaagagccttttcgaaacctccaatgcagaaggatctttaaagagatttgcaggtaaatggctcgacaaaacagttgcatcagttgaaaaaacaggagagttactcagaatactaggatactttggctgtgcgggttctatcggtgttttaatattaattatgtctgacttaattcaacaggcatttttccactaa

SEQ ID NO: 169871 - DNA, 2406 bp, Enterobacter cloacae
atggcaggcgaattacgcaagaaaggtttatcaccagaaaatagagtgccgtggttacattatcatgtacatgaaaacatggttactttatccggtcagaggttactgagtatcgtaagatttaaaggtgtttcctacggtacgaaagaaaaaccagagcttaataaattattcaataatgaaaacagattcttcctttctttaggtaaaaaagaagggaagaatttaatgatacaaacgtggactacgaaatcctccatcagccttgatgctgaatacaaaatggaactcccagtatttcaggatttcgtagatacctataccgcaccatttcggaaaggtaaatatagacaagttggttatactgttgcgttcattctgaagtataaagacctcgatgaaggtattggtcgaatgaatgacatcctcattatggtcaataaaatgcttaatgcctttgaaccttcagtattaggcatggaagaaagcgccaatgggtctgtgtattctcaggttggccgatatgtgtcgatgttgttgaacggcgaagagcagaatgttatggcctcctcgacacgcttaggggatgctgtgatcgacagcgtaactaatttcgcaccgtatgactatgtggagaaccgccctaatagtggtggagcgcgttatgccactacctatgacctccgcgattatccggccaaaacagttcctggaatgtgggatgaagctatagaggaacagtttgattttactctggtgcaaactttcatgtttgaggacagaaataaatcaaaagttaatttcaaaaaacaaactgtggatctgacttctgctgaaggtgaaacgaagcaaacaaagcagctggaagacgctgttcaggatataacgcaaggagataagctttttggtcgctatcacgcagctctcattgtgtatggcgaaacaccgcagaaagccattgagaatggtgctacgctggattcaatattttctgctcgcgatacccgctttatcagatcaactgtgacaaatgacgatacttattactcgttatttccaggttgcactatagcgatgtatccggtgcctaaatcaacagaaaatctggcatgtggtttttcgcttcatgcttctccagtcggaaaagcagatggaaacccgcccggagatggtaaagcatggatgccatttcgttcagtcactgacgcactttacttttttaatgcgcataacagccctgtagggaaaaacaatactggcgagcgtatgccagggcacgtttccgttgtcggtatgacggggacgggaaagacaactcttgaaggagggttggtcttgtttgcgagtcgatggaatcctatgtacttttgcctggattacaaccgttcatttgaaaatttactcagggcgcttgatacacaatattatgtaatttcgccaggtgaagatacgggaattaacctgtttcaactggaagatacgccagctcttcgtactcacctatttgaccaagtgctcacaatggccgggggaggaagcgaagccgaacagaaacaaatacgcagctctatcgatgcggttatgtctcattctgtggttgagaacagaggtatgtcactcctgctgcaaaacatagcgccaacagaagatgaaaactgtcttcatgtgcgcctggcgaaatggtgtcgaatctgtcctgatggctcaacaggccgaaatgcatgggtttgtgacgcagctgtcaaccgcttcgatcctatgaagttccggcgacttgcgttcgattgcacacagataatgaagaaaagcttctttatgaaaaatcgggatatcatggagatattcctgaataatatgtttttcttgaaacgaatgatgcatgagtctcagccgggaaatatgctgattaacatgatcgctgagtgctggattccactcacgtttgaaagtacagccgattcacttaaggaagttctaaaagctgggcgcacaaggggtgaaatattgataatggacactcaaagccctgaagatttaagcgagagtgaacatgctccagcggtaattcagcaggtaattactcaaatatggttagcgaatgataaagctgacgaaaagcaatatgcgaagtttaatattaaagggaaagagttcgaaataatttctaactttaacccgttagcgcgtgagtttcttattaagcaagggcagcagtcaacggtactatcatttgatttacccgatgatttgaaatattggctgccaatcctttctacaaccattggaaaagagggcaatgcagctattgctgcaagtgtcagagagagattagggacagatgatcctgctaagtgggtacatgtgtttcttgatgaaatacagagaatgaaacaaaaagaggattag

SEQ ID NO: 169872 - DNA, 477 bp, Enterobacter cloacae
atgacagcgccatcgggaaatgccacatgtaacgcatcaggtgaggctgacggcgcaggatggtcatctgagaaaatgcccggcagcacaaaggccgtatcgagctccccgccgatggccagcaataacacctgctcgccaacggatggagcccaccatacgcgagagcgaccggcgcgacaggtgagccagttaagccaggtggtttgcatgccgccggtctggacacgacacagcccctcatcgtggtcgacgtcggtcacgatgccggtgcggatgaggttgcggatcgcgcgtgcgatttcctgtagagaatttaaattattcatacgtgaaggatgccgccgggcaagaccagcggcaattgaacggtgttttatggtatctgttacaacaaccaaaaatgcttacagagtgggtaagaatttcagctcagcatcaatcgctgtttgtctaaaacctcttccatttctttag

SEQ ID NO: 169873 - DNA, 900 bp, Enterobacter cloacae
atggagttaaccttaaatcttaaagagttagccccttatattggattaatagcactatatttcgcagttagaaactatagaagaaaatccggaatatatgtaagggggcaattctgcataagttcaaccgtttgtgcggaagataaatacattagcagtattactctggagaactttaaggataggtcagtaatcatattcaaaatattcattaaagttgggaataactattacattgaaatgaacgattttgaaaatgaccccaaaatcctaaagtcatatgagtcatttacatgcaactatgaccctgtggatttttattatataaacctgagtcggataaagatgaacaatcttcttgattccagaaagtcaaaaatcaacattgtcctatctacttctcagggaaaatatgtcgtcaaaaagtttattaaacgatgggaccccgtattcgattttttcaggaatcatatgactgcttgtatacaaccaatgtatccactagaaaaggcgggtcattatgggagtgagttcaaatatttagcaaaaataaccaccgaagacggatataccaatacaatccctatttacgctaccgatactaattacccaagatttgagaactttgcgctcacatcagaagcgatgtcatcacgtgaaaatcttgagaattatcttcttgagcaagcggtcaatggccatctgaaatgtactaaagttgaagtaatagatgcggagaaacttagggagcgaaactacggtcacacttatacaaaaacttttgaggcggtgcattttaattggtttacatatagagtacttggtagattatctacaatttatagcaatcaaaaactaatatatcagaatcgtaagttgcgaaaaaaaagcaagagttaa

SEQ ID NO: 169874 - DNA, 123 bp, Enterobacter cloacae
atgaccgtacttaatcgctatacccctgttgtgtcagggattgcacttccgcaacaggtggctgatgaggagctgagtcgggaaactaaccccgacccgaaaacccaacatcaggacacctga

SEQ ID NO: 169875 - DNA, 648 bp, Enterobacter cloacae
atgaatattaaagacagattcgcggtgctgtgtaaagacccagactttatcaacgcttacaatgattttaacggtactaaactgactgttctggaccaatctcagttgttcagcgttgggacactgtgtcaccttgtgacgattaacatgaaaacaggttctgaactgcttcttacagatgcgtattacaatatcgaatacaaagcaaagaactatatcgcaactggtgacttcactgatatcagcacgattgacgaagaaaaagaaattcagaacacaggcatgtccgttaaactggctaacgtcagaactgaatatattaacttggtcagaacgaaacaactggacgttgcagacgttaagattgatatcgcgtttttaaatcctgaaacgggtgttgtagcagagacatttaatctgtttacaggtgaaatcgacaagctaacgattaatatcgaatacgatgataatgaatcgaagaacgaaaccgaagcacagttaaactctatctgggctgttctggagaaatcagcacgaaatcacgcgtctgatggtgttcacagaagttatccaggttcagagaatgatgttttcttttctcgtatcggtaaatggaacagtgaacagaaatggaccagtaagaaataa

SEQ ID NO: 169876 - DNA, 558 bp, Enterobacter cloacae
atgttcagcaaattagttaaattaaccgatgttaaactgacatcgaatgctccgttcttctcgaacagagctatcagcggtaaattccagaaacgttttacaggcgttcagttctttgaattggaattcaacgtaaattatcaatgtgaacaaacacaagagataaaacgtttcatcgctatgcatcaacaatcacagccatttgaattcgatttgagctatcaaacgaaatatgaaggaacagccgaaggtgtgattcgctcgcaacagaacgcagcatcaggaaatcgtcaggtcgctctaggagcgtttaaaggtgttttagaagcaggaacacttattcagtttgaaaatcactccaagctttataccgtcacggaggatgttcaatcaggtgggtcaatgaaactttttccgaatcttcgcgctcaagttcaagtcggtgaagaaattcgctatcgttcacctataggtcgattcgtactaacgaacgataaattcccttatgacattaaatcaataagcaaattacagattaaagcaacagaggttctatga

SEQ ID NO: 169877 - DNA, 486 bp, Enterobacter cloacae
atgaacattacagaaatgatcaggtatgacgaaggtgaacgtcttacggtttataaagatacagaaggatattggacaataggagttggacatcttcttactaagaatccgagtaaagaagtggctttgaaagaactggataaactattaggcaataatcattacggttatattaatccgaaagagtctggaacgattcttgaaaatgatatcaacggaacgattaaagatatttctaaagctaaactctcagcaacttacactattatcgacggggttcgacgcactgcattggttaatatgtgttttcaacttggtgtttcgggcgttttgcaattcaaaaaaatgattgctcatttgaataacaatgaatatgaacttgcagcagatgaagcacttaattcaaaatgggctaaacaaactccaaatcgagctaagcgagtaacagacgttatcagatatggtgattacagaagttacaaataa

SEQ ID NO: 169878 - DNA, 453 bp, Enterobacter cloacae
atgattgatgctcttagctacgaattcttccgcgaattcgcgcgttatgaatattgtttaaaagctgttggacttagacacaataccaaagaggctaaagccaactgggatatgtacgcaaatgaagtaaaagatgttttagaaaaaccaaaatcccctcttttacaagaagcaatcgattattttttaacacatccacccaaaaaacaaattattaaaaaagatatacttgattgggatgatacaccgcttgaagagagagttttagcaaaaaaaatatttatactaattcgacgggtgagaaacaatctttttcatggtggcaaattcaatggtaactggtttgaacctgaacgaagcgagttattgatgaactatgctcttattattttgagggcttgcggtgaaagccacgctaaagttagtgaggcatataccgataatacagtttaa

SEQ ID NO: 169879 - DNA, 1053 bp, Enterobacter cloacae
atgcttgttaaatattatggtttgagtttcgatgaagaaaaaaagacttggtcacctagaagcgagtttattgagaatggtttattcagaatgacacaacctaaatatcttaacgatcaagcgagcgagtcgagagtgcatgtttatttcaatgagttctcaccaagcgattatgaatgggcaaagaaaaagcaccgaataaatcaacttgatccgtcgtatattccttcgaaaacagaattggaaacatggtgtttaaaaccggttggttcaaggtatggtgatgaattcccgcaccttctgaaacaagatggtttcagttctatggaagatttcgataaagaccaattaattcagattgccgaaaaaataaattcatttttagttgaggtaatgagctgtcatattggtgtattctcgctatcaaaatcagaaagaaatctgcatatgtggacgcattacgcacaagaaggtagagggcttgccgtaatattcaacgagacacatccttttttcaaacagtacaaaccgaaagatattaattacgaatcagagaaaagagtttctttaacatattataaaggttctcttagattggatggatctccactgaagaattttcgcgactatgatttaaacagtccatatggaattacacaacttatccaagacaataatattgacacagacactctttcagaaagattgctatattcaaaaggagaagagtggttaaatgaaaacgaagcaagaatcatttgcccattaaaatcttgtgaagcgcataaagataaaattgttgatcctgatttcggagtcgaattatcggaagaggaaaccgtgcaatttagacattacgaaattagccttaaaaaaataccttttgatgcaatagagtctatcgtattaggttatagaatgagagagctggataaagtctttattagagaacaggtaaagaaaaatgaaaaattatgtcatgttaaattacgtgtagccaaactgaatgtattcggtaaaattgaacttacagactacgttaacgaaatgtaa

SEQ ID NO: 169880 - DNA, 1515 bp, Enterobacter cloacae
atgcaaaagcaaaacgggttagcgtacagttacatacgattttcaagcaagaagcaagaacaaggggactcagtaagaagacagactgagcttgctgaaaaatacgctgctgccaatgatctgattctatcagaaaagaactttcaagacctggggatctctgcattcaaagaaggaaacagaccttcactcggtgacatgctgcaagctatcgagcaaggagctatcgaatcaggttcaacaatcatcattgaaagtcttgatcgtttgagtcgcagaggcatcgacgtaacacaacagatcatcaaacagattctacagcataacgttttcatcgcatcgctggtcgatggactgttgctgaacagagaatcagtaaacgacttagtaagcgtcataaggatagctcttgctgctgaccttgctcacaaagaatccgagaagaaatctcaacgactgagagagacaaaaggacaacaacgtcaacgagcattgaacggtgaagtaatcaacaaagttctaccgttttggttagagcgtaaacaggataaattcgttttttctgacagactcgacgcagtaaagagaatcgttgaactgaaaaagaaaggacttggaacaaacaagatagccaagaccctgaacgatgaaggtttcgccccgctacgttctgctggttggaatcatacgactgttgccaagacaatcaaatctgttgctctttatggcgcatatcaaacatcagaaacgaccaaagagcgtaaagtcattcttctggatattgtcgaagattactatcccgcagttatcagcaaagaagaattcatgttgctgcaatctgatcaaaagcagaacaaagcaggttacaagtcagaacagaacgctttcgcaggattactaaagcacgattgcggtggtgctcttgttagaaaatttcacacagttcatggcaaagtgtacgaataccatgtttgtgcaaatgctcgtgatgggaagtgtgatgtgactaagaacttcaagaacatcgaaacggcgatgtttagaattcttcgcgaactaaagatggaaaagaaagcgtctattgactcaacgattgttcaagagcgaaccgagattcaagagaagattcaagatctgaacaacatgcttatcacgatgaagaaagtcccaataagtgtcgttcagacgatcagcaatcttgaggataaactacaggaactcgaccaagcgattgcagaacaaaacagcatggtcatgaatgaacgttcagttgatttgaatctgttgcaggaggtgaaaaatcctcttgaactgaacatgatgcttaaacgagtgataagagaaatcaaggtgagtaatctccaaaaatcttggaggctgaaagtgtgctatctgaacggtcattcacagagttttagatgggacggccaaaatatcagttttaaatcagacacgaaaaaactattagatttcataaaatcacaagaacacaacgatttggccgaggaaatataa

SEQ ID NO: 169881 - DNA, 801 bp, Enterobacter cloacae
atgcaaataacacttaatgcttttcctccttacttggtaagaagctgctccaatcaattcaatccattacattgcagaacgttaaaaattggcactctacagtattttagagatatagaagatgaacatgttgttgatagagaagaggggtattactcagttgatatcgatttcaattacgttcatttgccttcgaatgtttataattacctcttgggaacagagctgatttcttcacatggtagattcgatcagacatggaaggtacccagctttctgtatgaaaacacatcactatacggaatgattaaaggagagtttaagtggaaatttagaaataggttcattctttgctttcatggtctaagcgatccatcagaatccgacaagatattcagtcaatacaatgataaatggtgcttgaagcggaggcacgttaaggatggacttagaattttgtctgatgagctttttgaatacgtcaaaagtcttttgaaccaaggtgaagatgtattcactgtaaagacaaaatgcgactacttgaactttgttagcaaaatagtggaagttaaatatggagaaagacataaaaaaatcactaacattgagtactatagcaacaacgactcaatacttaacattcatgatttaatttcgttcctaaaaccaataaaatattcctctgagcgtgagtatcgttggattattgatttctattacaaagatataccattagagcccaaagtggattatttgattctcccgtgcgaaaggttttctaattatctcaatagtttatag

SEQ ID NO: 169882 - DNA, 219 bp, Enterobacter cloacae
atggttgaaagaatgatataccacatatgttttatggttaacactgaaattttcccctatactttttgcagcatcaggtgtaacgcaagcaattgctttagcattactaagaaagtgctcccaatggtttttgatcgttatgtgattattattttttgggaaattatctccttcccaataaagccaagatgtatgatatatatacttctcaccttttag

SEQ ID NO: 169883 - DNA, 1650 bp, Enterobacter cloacae
ttgggaagaaatgacctgcttattcgcaccttccctaacaaaaatgccgaagccacgaccagcgcttcaggctctatcgtagttgatggtgaaggtagtgtcggtaaccgtaactatgccgtctgggctgaaggtggcaaagatggaaaggcagtggtcaacgtctattccaacatcacgctaaacaaagccgggaacatcggcgtacacgtgcgtgataacgccgtcgctaacgtcgacagcctgagtagcccggcattcaacagcaccgatcagattggctattacctgtatggtaaaggcgcaactgcgaatattggtcaggcggtaatgaatgacaacgggcaggatcgcaccaccattttccgtattgccaacggcgcaatgctggccggtaacaccaccactcctgacggtcagcccagctcaaaccttgacctgaccttaagcggcgaacagtccgttggcgtattagcgacgggcacaggcagtagtgtggataccggcgaagccacgttcaccgtgcagggcaccgactccgccgcgctgctgattgaaggcggtgccacaggtaacatcagcgataaaaccaccatcaatttaaccggtgaaagaaccattgccggggtagtggacggtcaggctcaccagttgaatggcaacgcagagggtagcgccactccgaccatcctcacttcaaacgcaaaaatcacttcagaagccagcggcaacaaggttattgcctatgtggcaaggaaccagggcagcctgatcctcgatacccaggcaattatcgatcttgccagcaccgacagcattggtgttaacgtgcaacaaggcgggagtttaaccaataacgcgaccgctgccttacatgtgagtaacggcattggcgtacaagcttctggttcgaacgcacagattaaaaaattgggtcagattcaagttgatgatggaaccgcaggggttctgctgaccaacggtgccagcctgaatattactggtaatactggcgatgccatcaccaccaatggcactgctgacggtattcgcctggacaccggagccggtaagctggctgccaaaggggtgattattagcgccgaaggtactggcgcgggcattcaaaacgatgccaacaataccgatatcacactcaatgatgtcaccatcaatgccaacgacggtccggggatccgtaccagcgtcgcgttaaacatgaaagatggcctgaataacattctgaacgttaacggtaaaggtaccggcttcgcctttgagcagcgcaatggtgacgcagtgacaggcaatctgaccatcggtaaaggctataccgttgaggtgcataacagcgaaggcagcggtatccgcgccaatacggacggtaaggtcaccaccaatgccaatatcaacgtctacgacagcgcaggtggttctgcaatcatcgctaaaaatgttagcgcaatagccaatagcggaaaaattacctctgccagcaccaccgcacccgttattgatgccagcggtgacagcaataaaaaaatcaccaataccggtacccttcaggctatcaacgatacggcagtggcgattcaatctggcaagggcaatgacaccattgatatcagccagggtatcaccagtgcgtga

SEQ ID NO: 169884 - DNA, 852 bp, Enterobacter cloacae
atgaaaaatatcgacaaattaaagaaaattattaaggcatcaaaaacttttatcatgcctcctgctgattacactccgtcagaatgggttgaacagaacttaattttcccagatggaccatatgcggatcagccaatgcgactttttgagttccagcgcggaatgattgacgctatcaaaggcaagaagaagaaaatcgttcttatgacttctgcacagatcggcaaaacgacgattctgaacggtgttctgttctataaatcagctacagatccaggcaacgcgggtgttttacagtctacagcgaaagaaacgacacaatggttatcaggtaaaattaaaccgatgattgatgcatcggaagaaatacagaaaatcgttactgataaaaatgacagaaacgcagttaataacaccagtcagattcagctacgaaatggtggtttctggtatttcatgagtttgaactctccttctcacttgcgtggtaaaactctgccattgcttctgcttgatgaagttgatgctgtcgatactgatacagaagaaggcaacccaataatgattgccgaacagcgtgcaacaactttcggttcagacgctcgaatctttatcagttcgacgcctactggcaaatacggtgctatcaatactcaatacgaagcatccgatagacgtaaattccatatcgattgtcctcattgcgatcattctcacgaactcgtttgggaaaacatcaaattcgattggattaaacatgatggtaaatcagtaccagatccagaaactgcgcgtcttgaatgtccttcttgtaatgaaacaatcacagatgaatcgccacggataatctag

SEQ ID NO: 169885 - DNA, 180 bp, Enterobacter cloacae
atgattgttaaagttgtttacaaaaatggtgatgtacaaaacgaacgtatgtcggttgatgatgcagcattaagactgaaaaccgactgtgacattcaatcaatcatcttcagcgaagattccgcgaacaagttgctagagaagagattagagcaattgctggttcatggatctaaatga

SEQ ID NO: 169886 - DNA, 615 bp, Enterobacter cloacae
atgtacaaaagaagtatcaacaacgtaacttataaaacacgttctgaactgaactctgagccaacaggattcagcgtttataaaaccgttttcagtatcaacaatgaattattcgtttattacggcaaacaagctttcaacggtcagcctgatatgttgtatatcggttctggtcgcggagttcaggaaaaactcgctgaaatgaccgagtcggatatcgtttataaaatcgttctacagaattttgaatcagaacaagaagcgtatgacttcgaatctgaatgcattcaatcagcacgtaaatcgaaggttaatattttaaatatctctaaaggaaactccggtggtaaggtctttgacaaaatgacagaagaacaaattaaacaacgtaacgtgaaaatctctatgagcatgatgggtcacgaagtctctgatgaaactcgtcgtaaaatctcagaagcgaaatctggtcagactcgctctgataatacgaaacaaaaaatcggtgatgctctgcgcggtcgcaaaactggtcctaaatcagaagaaaccaaacgcagaatgtcagaagcacataaagcacgtcacgctaacaaggagacagcgaatgtctaa

SEQ ID NO: 169887 - DNA, 609 bp, Enterobacter cloacae
atgaatttctcaatctttgaaaacttgaacggtactactaacgttagcttgaataaaaaaatcgttaaaactaacgaaatgactaacaaccgtaacacgctgaaaacttttatcggcagctttactgatattcaccgtaacatcagagcaaagatgttaagcaaagttgagaacgctttgactgtaaaagatatgcgtaaattccaaatcggtatgtcagaactgaacgacaagcctgctatcgttgcttattcaagtgatatgacaaaagctgtgatcgtttgctgtgaaggtcgtaactggaaagctttaggttcagacttgactatgattcacaaaaaagacaccgataactttgttcagcaatatgttggtagttttgtagagattaaagaagaaattgaatttcctactgaaaagaaagttgatgttatcaccaacgaattggaagaattgagaaaggagattgaagccttaaaactaaaaaacgctgctctcgaaaatgagaacagcgctatgagaaaagtaatgaagggtgataaattatcttttgacgaagaactattaattgtgaaaattgaaatttcaaagccgaccaaagcaatatga

SEQ ID NO: 169888 - DNA, 150 bp, Enterobacter cloacae
atgctgaggaggtacgctatagcaaaccccgtgtatcagtcgcggcaaagtgatgaagtctgtgcgagtcttatcagcaactatcagccgttcggctatatgcatttgatactgtggcgggcggccggtaccgagataaaagctcactag

SEQ ID NO: 169889 - DNA, 1326 bp, Enterobacter cloacae
atgttgcaagaaaccatttctagacttgatggtttagaatgtggcgacccgttgattgtttgtaatgaaaaacatcgttttttagttgcggaacagttgcagcaaatagggaaattatcaaataacataattttagaacctgaaggtaaaaatacagctcctgctattgctttagcctctcttgcggctaaacaactatttaaccgtcatgaacatatattactagttttagctgccgatcatgttatcaatgatagtgaaatattaataaattctattgtcgagtctcgcgaacttgcaattcaaggtaagttagttacttttgggattatgccgacgtgtgcagaaacaggttacgggtatattaagcgcggatcaaaacaggagcttctaaatggaatggctttagagagctataaagtagctgcgtttgtagaaaagcccagtaaagaaactgctcaaacatatttggagtcaggcgattatttttggaatagtggcatgttcttattccgggcggacatctatcttaatgaactgcgaaaatatcgggctgatatattaaacatatgctctgatgcattacaaaaaattaatttggatatggattttattcgtgtcgatgcaaatgtttttaaaaattgccctaatgattcaattgattacgcagttatggaaaaaacagatgatgctgttgtagttcctttaaaaaccaattggagcgatgtaggttcatgggatgctttatggaatatctatgaaaaagatgatgatttaaattccaagactggggatgttatttgtcttaactcatctgaaaacttaatatatagtgaaagtgctttgattactgctctgggtgttaaagggctaataataattcaaactaaagatgctatattagttgctaataaaaatgaatctcaatatgtgaaacaattagttgatatactcaaatataaaaaaagaaatgaattaacaacgcatcgtgaagtattcaggccctggggtaaatacgaatctcttgatgagggtgaaagatatcaagttaaacggttgacaatcaggcctggtgaagggatttccttacaattacatcatcatcgtgctgaacactggattatcgtctcaggtactgcaaaggttagcattgatggcaatgaaaaaataattagtgaaaatgagtctgcttatattcctgtaggagcgaaacataccttagaaaatcctggtaaaattccattggatttaattgaggttagatctggtacatatttagaagaggacgatattgtcagaatagcggaccgctatgggcgtttgtaa

SEQ ID NO: 169890 - DNA, 822 bp, Enterobacter cloacae
gtggaaaaaaaactacctccattttctttattaatggctgtttatagtaaagataacccggaatattttaatgatgcttttgaatccattgcagcgaatacattgctaccagatgaaattgttcttgttgaggatgggcctttaaatagcagtttagaagaggttgtttcacgttggtctcaacttttaaatatcattattgttcctttaaaggaaaatgtaggtcttggagcagctttaaataaaggtctaagctattgtagaaatgaaataatcatacgggcagatgctgatgatttaaatagaaaatatagattcttaatgcaagtggaatatctttaccttaatcctgacattgacatattaagtggttgggttgaggaatttaacatcatgcctggcgataaaggtaaagtaagaaaagtaccttcgaattcacatctaattgaattttctaaaaaaagatgccctttcaatcatccagccgttgcatttagaaaaaatataattatatccgttgggggctataaaaatgagcatttatatgaagattatgcactgtggatgagagttcttaatgctggttataaaggagataatttacccgagattttggtcgatatgagattctccgatgaagctttaaatcgacgagggggatttaaatatgcagtgtctgaaattaaatctcaatgggttttttatcgtcgcggttatatcaatatattacaatttacccggaacatagttttcagagcggtaattcgaatgttgccaaataggtttagagtatttttctataagagattattgcggggttga

SEQ ID NO: 169891 - DNA, 420 bp, Enterobacter cloacae
ttgtttattgcaggaggtgatcatggctcaaaaggtaaactggagattataattaaagatttatctatgcaagatcaagtgattttattgggctatgtaagtgatggcgagaaatattcgttatatatggattgtaaagcaactttacttttagggaaaagcgaagggtttggtataccagttatcgaaagtatggtttttgaaaagcctataatagtatcaaatcttggcgcgttaccagagatagtgggttctgctggtattatcaccgcttcaactgtgagcgatgttgctaacgccatgagaaagatcctcgaatttaagtgctctaaagatttgttcacccatgaacttgaaaggtttaaccttaaaaaacaacaagataaattatataatctatttaagtcggtgataaactag

SEQ ID NO: 169892 - DNA, 1290 bp, Enterobacter cloacae
atgctgctggccgatgtgccttacccgcagcgcaaatatcagcagatgggccttatggctgggcagattttctggtaccgcgcgcagctggtggaccgcagtggaaacgaatcaggttatacagagtttgtgcgcgggcaggccagcatcgatgtatccgatatcaccgatgcaatcctggaggacatgaaaggctccgatacgttcaaagacctgatcgagaacgcggtggacagcaatgaaaaaattgctggcatggctaacgacatcaaacaggccaacgacgaactggagcaacaggcgcagaaaattgctcaaaatgcccagaatgtcgggaaggttcagaccagcgttaatgagctttccagcgaggtcggaggggtctcttcttctctctctatgcttgagcagacagtggcgacggctgataccgcgctgggccagcgcatcgataacatcagcgtgtctgtggacggtatgacgggaggagtgaagaactccgccatcgcgattattcagggcaatctggctcaggtggccgcgcgcaaaacgctgtctgcatccgtcgccggtaacagcgcgcagctggaccgcattgatgaggtgatcgtcaacgagaaggaggcaacggcgcgttcgctgctgagtttgcagactgacgtgaacggcaacaaggcatccatcaacagcctgaaccagacgttctccgattaccagcaggctatggccacgcaggtaaacagcatcacggcaaccgtcaacgggcacacttcagcgatcaccaccaacgcgcaggccattgcgaacgtcaacggggacctgaaggcgatgtacagcatcaaggtcgggatgtccagcaatggtcagtattacgcggcagggatggggatcggcgtggagaatacgccgtccggcatgcagtcgcaggttatcttcctggctgaccgcttcgccgtaacgcaccaggccggagccacggtgtcccttccgttcgtcatccagaacgggcaggtgttcatcgacgatgcttacttcagggatgccagcatccagttcgcaaaaattaccgattcactgaaatccaataattttgtgaccgggaagacaggctggaatatgccgaaaagtggtaacgctgaactgaacaatgtcaccattcgcggggctttgtatgcaacgactggtaatttcgggtttagcgggccgaacaaggcgacggtgatagacagtaatggtgtaactatcaacctgaccggaggcggacgtatcgtacttggagaatgggaataa

SEQ ID NO: 169893 - DNA, 462 bp, Enterobacter cloacae
atgtacagcatcaaggttgccgtggatgcgaacggaaaacagtatgctgctggtatggggataggtgttgagaatacgccatccggcatgcaatcacaggtgctgtttgtggctgaccgtttcgcggtaatggcgcaggctggtggggcggtgtcgttgccgttcgtaatccagaacggacagaccttcatccgggatacgttcatccaggacggtaccatcagcaatgccaaaatcggcagctatattcagtcttcaacctgggacggaaccgggaacgttggctggcacatcaacaagtcgggatatgccacattcaacaacgtgacggttcgtggctccatttatgcaaccaacggtaatttttcatttaacgggtccggtaataccacagtcattaatggcaacggcgtcaccatcaacattccgggtggtggccggatcgtacttgggacatggtga

SEQ ID NO: 169894 - DNA, 492 bp, Enterobacter cloacae
atgaagcaacaaataaatgaattgtcatcttatgttctggacaagacaatcaaaaaagagaaggcatgtctctacatgagtgcatatctttgcgcacttatcaatgacaacatgaaaataaccgcaagattgatttctgggtcacttgtaataagaaacacaaagattttctcacatgagcctatactgccgataattacttcggggagcaattatacaggagaatgggatggtcatgcttgggttgaggtcgctggatatatatgcgatttatcaatcttttgtacaattttttccaaaagtacatcaactgaattgcagaatgttttcatgcaaacatttgatagatactatgaattcttaatcgcaccaagagaaaaactagaagcagcagatatttgctataaagaatgcgaagaattaggtaatgaacaaatagatattctgattcactcaggaataaaatcaggtatcttagtcaatccagaatga

SEQ ID NO: 169895 - DNA, 237 bp, Enterobacter cloacae
atgatcccgacgcggcagcttcattccctgtgtacatggtgcattcgtaataagtaccgcaccggcgatggctgcgactatgccggtacgcgctatttcgacaaaaacaacaacccggtaagcgatccgtcactggatgaatgcaacggcacgctgacggcctgcaaacttcggttcggtgaaagcaacgaactctcgtttggtgggttcccgggtacgtcgctgatcaggagctga

SEQ ID NO: 169896 - DNA, 240 bp, Enterobacter cloacae
gtgccagtccatcagctcaataggctgccctgccagtgcgccttttacgtgaggtacaaaattatagaaattcagaatgtgctgcgcgcgcggttcactgaagaaaataccgcgctcttcgccgtgtgccagatcgtcaagaaaacgctgacaggcaaggcgcacatactcacaggcaataatttcccccgccaccaccctctcggcgtagcggatgccttctgcaaccttcgccattaa

SEQ ID NO: 169897 - DNA, 240 bp, Enterobacter cloacae
gtgccagtccatcagctcaataggctgtcctgccagcgcgccttttacgtgaggcacaaaattatagaaattcagtatgtgctgcgcgcgcggttcactgaagaaaataccgcgctcttcgccgtgtgccagatcgtcaagaaaacgctgacaggcaaggcgcacatactcacaggcaataatttcacctgccactaccctctcggcgtagcggatgccttctgcaaccttagccattaa

SEQ ID NO: 169898 - DNA, 810 bp, Enterobacter cloacae
gtgagttcgtctcaaaccgtgaatccgcagcaagcctgcgaagacctcctcctggagggaaagcagtacaacatcgagcaccacatcctgcccagcgagaacgcggtcgcggatcgcctgctggcgcgtggcgtcgaattgaaagacgcctacgatgaattgcatggaaagctccacgcccggcctccggcgctccaggtctttctcggccttgtgttgagcactgccgctttctggaatccacagaagatgctgaaggcgcgcaccgcccgcaacgacctcaccaacgtcaatcagcaaatcgcgagaaaggcgaatgagttggcagaactgctggatcaacgcaccgatctgcacaacacctcgggtttcagcagcgaaacccactatcacgttggcgacgtgatcgaggctgcatcccagaacaactacctgttccagtcatatgtacaagagaagctggatgccctccggggccagttcgatctgaagtattggccctcattgggcgacttcatgcgcgaactggcatcggatgctgagaaggcggagatggcggccacagacccactgacggccgccgccactgcggcgacccgtccctccaaggccgacttcttcaaggcactgttcgcttcgatcgaggaaaacagcacggagaactacggccaactgccaagggcgttcaagctgaccgatcggacattggcctcattggcgaactgcgcactggatctcggccccgacgaactggtggacgaagcctacgtgaagcgcctccgtcagcgtgagcgcaacggaaccgagtag

SEQ ID NO: 169899 - DNA, 477 bp, Enterobacter cloacae
atgcaattcatgagttcttgggccactggcgacaggaggacgttgctgcattttacggattccgcactggagactttttgccagcatattcaggttattgataccgcctgtgaagctggtggaattctgcttggttcagttcatggggctcacatgattatcgaggaagcaacggcccctacggaatatgacaaacgattcagatgtctattcgagcgtatgccctttggtcacgaatctattgccctggcgcgatggacggggagtaacgggaccatccgctacttgggggaatggcacactcatccagaggatcatcctcacccttctggtctggatagatcggaatggaaccgcttatcagcgaagcgtcgggacaagcggccaatgattgctgtcatcgtcggacgaaaatctctatacgccgaattggtgccgaaatcaggccgaggtttggtactcgctcccgtggagtag

SEQ ID NO: 169900 - DNA, 1632 bp, Enterobacter cloacae
atgagcggcgccatagcggtcgcaaacgtgatcgaggcctttgagcagcaaggcttcgcgtttgttggcaagacggatgacggctggttcaggctgcacggacagttgatcccgccccaattgggcaagggctatccgtgcgaggttcagctcgatccgacgttcttcgacttacctcgcatccggctgctggaaatcccctccgaactgccagctgcggttcctcatcttggcgcagatggcgggctttgctatctcgccaagggcacggtcgtcctggacatctacgatcctgtcggacagtcgctggcatgcctgcaacgcgcggccgtcttgttcgggcagatcctgaagggggagatgatcgaagatctcgcggaagagttcttcgcctactggcacggtgggctttgcttcgtggacatgcaaagcgaggatttggggcggcagaactgcatcgtcgcgcaggccaatgggaatcccttgtggttcatcaccgacaacgaagatcgaacaacagaaaaactgaagtcgctcggctaccaagtcaccgatagaacggtgctgacttaccgggtaaagacgggtgctcaaccccgtcctctgaccagccattggcctcctgaaacagtgagggatatcttggcatggcaaagcacccttgaccctcggtgccggcgcaagattcacgaacgcatcaaggaaggagaaaggaaaaaggccaatggcgttctgatcgtcgtcgaatccccgttgatgacgtatggcttcgtggttctctatgaccgccaacgtcctgtgcaaaagagcaagctcgcagatcgcagggattccagctatggattgaaggtgatacccatctcaatggtcagaatagatgatcgctaccttgcccagcggaacatgcctaaggcaaagacgcttgcaggtaagaacctggccgtcgtgggatgcggcacgatcggcggatatctgtcggacatgctggtcaaggccggggcggggacaggcggcggaaaactcacgttagtggacttcgactgccttctcccgcagaacatcgggcgccatcgcttgggatttccagatctgctgtctaacaaagccgaggctatggcgaaggaactgaaccgcttggcgccaggggccaagattcgttctcttcccgttgatgtcaggcaggcccagttgggagaactggaccttctcatagatgccaccggggaggaatccctcgggcattggctgtgcggccactatccaccacctacgcccatgctttcggtctggatagaggggccgggtacggctgtccgcgcactattgagaacgcacgcatctggtgcttgctaccgatgtctttggcatagcaatagaagaggtgaactccgctctacagttgatcctcttcctgccatcttggcggggcacggatgtgagggcttatacgtgccgtttcctgcctcggtgtcggtgcatgctgccagcctgggcgcagagatggcgcttgattgggttaacggcgtccattcccccgcacttcgaacgagggtcatcgaccgtacccagcaatctgccacgcccgactgtgatccgctgcggaacccggaatgtcctgtatgcaattcatga

SEQ ID NO: 169901 - DNA, 1143 bp, Enterobacter cloacae
atgctgaacctgagcccgcttttctttaccactgttgacgacgaatcctgcatccatgatgagctggatttgacgcctgaacagcgtaccaagatcgccagtgcacggacggatgtcagaagctgcctacgcacgggcattcctcgtgtgatgagagctggcggatacacagaagacgtaccgcagccgcgcttctttacgcaggggtcgtgggcatacaagacgctgaactcgccggcacaacgtccgcagcaggcggatgtcgatgatggttgctatctaccaatgagtttcgtctcgcagacgcagcgccccagcacagcggcaacagttttctttactgctgcggaagaggcgttaaggccgctggtcgaagaaaaggggtggaagcttgtcactgacaagccgacttgcattcgcattgtcattgctgcctatgcccacattgacatcccactatatgccatccccgatcaggagttcgtgaatctggccgaggcctcaatgaggcgatatggctacgactcggtgatggatgccattatcaaagcggagcgagatgcgtggacggcattaccgcgcgacaaggttttacttgcccatcgtgaatgcaattggatgccctctgatcctaggcctgtaaaggagtggttcctgggcgaagtggaagctaagggggagcagttccgccgcgtggttcgttacttgaaggcattccgcgattggaggtggtccagcggcgggccctcttcgatcctgctgatggccgccgcggctccgctatttgaaaagcgtgatcggcgcgacgacctcgcgttgctagatgtcgtcgcggcactaccggcccgattgcgtgcgggggtgaacaaccccgtggatgaatccgaatcgcttacggtacggctgggcaaagccggtgtcgaagaagctgcaaaggcgttcgaagaatttgagaaggtgcttcgtggcgcaaccgacgccagcagcccttcacaagcttgcatctggatgcagggcgaattcggcccgcgttttccgaatgagccggatcgggtcaaggtggtatccatcgttgccaccatcgccgccgctcccgccgccgctggtccgagcgaactcgtcggacgaacgaaggccggatga

SEQ ID NO: 169902 - DNA, 1002 bp, Enterobacter cloacae
atgactgacatccctacctaccatgtgctcgccctgtcggggggaggctatcgcggcctttatacggccacggttcttgccgagcttgaagccgtgctgggccggcctatcgcttcccactttgacctgatttgtggcacatcggcaggagggatgttggctttgggactggcagcggaaatccccgccagcgaactcaaagcactgttcgaagacgaaggcagccgcatctttggttgccgcagtctttcaagacggcttctgggattctggctgactgcaaaacatgattcggcagggttgcgggaagtgctgaccgaacgcttccagggaaccaccgtaggcgacctgaagcatcgtgttcttgtaccagcagtcaactactcgacaggtcgcggacagtttttcaagacacctcaccacccttcctttgaatttgatcaccgcatgaagatcgtcgatgttgcgttggcgaccgctgccgcgcccgtctactttccgctggcgcgcaacgaccgcggtgtcttcgcggatggcggactggtaggtaatgcccccggcctgttcggattgcatgaagtcaacacgttcctggcaccgaaacaggatgtgcggattcgggttctttccatcggcacgatgacgattggtgcgaccgtccgtggcggcgctagccttgaccgaggattcggtaagtggcgcggaggactcttcgatctggtgatctccgcccaggaatcgtccgtggactacatgctgaggcagctgttggggaacaactacttccagatcgacgacaaggcaacgcctgatcagagcaaggacgtgaaggcgctggatcgggtttccattggcgccacgaatacgctcaaggatcgtggcaaccacgcggcccagcgcgcgcttggcgatcctctttttcaaccatttcgggcgcaccaggccggcgcccccattttctatcacggccccaacaagaatgtaccggaggccgcatgctga

SEQ ID NO: 169903 - DNA, 225 bp, Enterobacter cloacae
atggccggaaaaaatcagcatgttgttcctcatcaagacggttgggccgttaaaggcgccggcaacgagcgggcgacctctgtgcatgacacgcagcagcaagcaatagatgcagcgcgggatattgcacgcaaccagaagtccgaactcgtcatccatcgtccagatggccgtatccgtgacaaggatagccacggcaacgactcctttcccccgagaggttaa

SEQ ID NO: 169904 - DNA, 393 bp, Enterobacter cloacae
atgccacaaacaggcttgggcgtcgctatcaagacgctacgcgaacgcagaaccctttccctgcgtgaaattgggcagctatcgtcagtggaccatgcatacgtctaccgcctcgaaactggcgaaaaaacaaacccctcccaagacctgattgaaaagctattgaaggttcttaagccgacggagagagatgctgcactcgtaacttggctggttgaccatgcggacgccgacccgaacctcgtcgaatttgtgctacaagattcgtctattggtatcgacgtatttacgatggcggccggcgtcaggcatcggggtaacgcaaggcctgatcccgccacattgattacccggatcaaaaaggcccttgaggacgacgacgaggacgattga

SEQ ID NO: 169905 - DNA, 870 bp, Enterobacter cloacae
atggacgaatcggatgtcagacagaaagcacgcgcgttcattgcgaaagtcgatgtttctaacatccgaggagacctgtctccctatgtgaccgctgctaatgccaaggtcaagaaagatgagcttggcgaaggagagtctggctataccattaccaagccgaacgggaagcacataatcaccgtgaactccctggagactgaggaacgccagcgtttcactatttgccacgagatagcgcatatcgtgctcgacctagaatcgagtcacgaggaagtcccgtcctggtcttatgccaaacggcatcccaacgagatcgcctgcgacacatttgccgctgaactgctgatgccttatcagcgatggctttctgtcgttcccaaggaagagccttccttggaccttatccagcgcatggccgatttgtttggcacttcatttcccgcggctgcgtcgagattcgccagtctcagcgatgttccgtgtgccttcgtcaccatggagcgtggcgcagtacggtatgcagcacgctccacgtctttgagacaagctggggcctggatatcacccaagtcggtgatcccggctggctcggtagcgcaccgaatcagatcttcaggggtcaacgccaccgatacgggggagatttcccaggatgtatggttcgataactgggaaaaaggtcttgatctctgggagctttcgaggcactacgcacgtaccgacaccaccatttcactactatggtttgacagtgaagacctgccggagatcgaagtgaaccgcttcggcgtgcgagtggaggacgatggcggcctaccggaattaactggtgagttgccgtggccagggcggagcaagcgtcgctag

SEQ ID NO: 169906 - DNA, 1170 bp, Enterobacter cloacae
atgacaaggaagacgcccgtggcaacacggaaacccgctgccttaccggctggctatgccggcatccacggcggcatcgtggagctgctggacgcggcgcgtcaggcggcggcgcgcagtgtcaacgcgctgatgacggccagctattgggagattggccgccggatcgtcgaagccgagcagaaaggcagacggcgggccggttatggcgagcagttgatggcgcggttgtccgccgatctcacggcgcgctttgggcgcgggttcagcccggataacctggagaacatgcggcgcttcttcgtcgcttatccccttgaggcaatttccgagacactgtctcggaaatctggagacggactgcccatcgagaattccgagacagtgtctcggaaattcgacctctccgaactggcccaggtcttcaccctgccatggtcggcctatgtccgactgttgtcagtcaaggatgaccatgcccgccagttctacgaggccgaggcgctgcgcggtggttggagcgtgcgccagcttgatcgacagatcggcagccagttctacgaacgcactgccttgtccaaggataaggcggcgatgctggtcaagggttcggtagccaagcccgaggatgccgtcgcgcccaatgacgccatcaaagacccgtatgtgctggagttcctcgacctcaaggatgagtattcggaatctgatctggaagcggcattgatccagcgtctggaagatttcctgctggaactcggggaaggcttcaccttcgtcgggcggcaacgtcggttgcgtatcgaccagacttggtatcgggtcgatctgctgttctttcatcgcaagctacgctgcctggtcattattgacctgaaattgggcagtttgacccatgccgatgtggggcagatgcatatgtactgcaactatgccaaggagcattgggcctacccggacgagaacccgccggtgggcctgatcctgtgcgccgacaagggccatgccctggcgcggtatgcgctggatggcttgccgactaaggtgatggcggcgaactatcgcaccgtgctgccggatgcggagttgctacaaaaggaactggagaacacgcggcgtctgctcgaatcacgtagaccggtacctcacaatacgcccagcgaaaactag

SEQ ID NO: 169907 - DNA, 1224 bp, Enterobacter cloacae
atgaccggagtatctagcgatcaatacgctgctggtgaacagggcttagggtatatctatcagcctcgttttgcgctacttaagcttcttcagtggccagaagatacatctgttttgatcgaaaaagatgatgacctagacttcgttagttttgatggtgtcaaaacactggcatcgctcaaacacaaaggggatggggatactctaaccgacctgtctaccgatttttggaagtcagtccgcatctggcttgaccgctataatcgtgatggtaaaaccgaagcaaatcttcgtttctttttgtttacgaccggatctatctcaaactcctcgttcctgcaacacttcttagtcgaaccgccaacaaaagacgataattcagtatcaataactcaactcaccaacacagctctggctagaagcaagtcaaaactgatcacggcaatagccgatgagttcaataaactgactgatgagcaaaaagatgacttcttatcacggataatcatatttgatggcgggcctcgcattgaagacctcccaacaattatcaaaaatcaacacatgcgtatcattagacgcgataaccgagacgctatttttgaacgacttgaagggtggtggaataacacgatagtcgatctgctaacagggaaacgtaaagaggcgatttttggttatgagatttccgacaaacttgcagcattttctgaagagtacaaatcggacaatctgccgattacgttcagaggaaaaattcccgttggagaaatcgatgcgatgaatgatcccaggctctttgttgtgcaactccgtgaaataggggtttcctctaatcgtatccgaaacgctattctcgactactaccgagcatttgagcagcgttcttcatgggcgcgtgaaaaccttttggtaacaggagagatggaagattatgaagaccgccttgttgatgaatggagtcgctataaagacgtagtttttgaagaattagatgaaaattcagctgacgaagtacttattactgcgggaaaagcattgtatcaatgggccgatcttgaaagtggtaatattcactcattgcgaatccgagaacgagtgactgagccttatgtagttcgaggaggatttcacatccttgcgaacagtagaccactacccaaaattttctggcatccccacttcctaaatagaattgggcaattgttgggagcccaagcatga

SEQ ID NO: 169908 - DNA, 387 bp, Enterobacter cloacae
atgaaaatatttaaagttgtgcttgccatcttggctctgttcgcaacagggatgaaagcatcatatgcgtatgatttacctaaagatgtgactctcagatgtacggacaatgagacagtgttcatacactttggcactgatgagccggagggagcagtaaaagataccgtgtatctgaaactaccagataccgaaacggttaatattccgcttcgcgccgcacgttttgttgataacaacaaagcattacgaatggatttcgtgaaaatcttcgatgatcaccgggcggttgtacgcaagctccttctcgaggatggctcatattacaaggccgataataaaactaacaaactaatggactgtagcgttaaaaatgccacctattga

SEQ ID NO: 169909 - DNA, 963 bp, Enterobacter cloacae
atgaatagcaacggggctggggctgtatcattatgcattcctgattcagagtggcgagtcattaacggggctcaccagatttctgttcgatttctgcggaaaaagacactacaggcgaaaagatttacgcaatggatgcaacggacacacgccaagttgcttggggcccccgtaaatgtcctgtcgttctgctcatctggcctaattaacggtgaatttcctgacaaaaacggctggttttacgctggtgatgcacttgctctgctcacttatagcatctacagcagtgaaaacgagccattgattgacgcaattgagcataaatccgggctgaaactgcctattgcagccggagccagcaggctggaagagcaatttggcgttgaactgaacaggcttcatgattttttctggtcgctcaggccaaatattcatttggaaatcacaagacaaaagctaattggtccctatcgggtagattttttcatcattgagcagcgttataccgatctggcaaaaggggaaacgtcaaaacgccttttcgttattgaatttgacgaaaaagctcacaggttggagcgatatcagacaaaggacaggctcagagataagtggttccgtaaaaaccgccctgatatcacacttatcagagtccggcatgaggaacaggaagtatggcttagtactgtcagacgactaaagcggcttgcccgtctggaagactgctatgcccactgcctacagcaggcatgtacttcgcatgccgggccggagctacggattcaaagcgcttctgcccgcaaagcctatgatgccgagcgaaatgtgtgcagttttctattaaagcgaccggctcaaccattgcgggaaatggctctgttgtttgagcgactaggtattccttttgaaaaacgacgcgatatctatttcctgcgggcacatctcaggggatatgggatttaa

SEQ ID NO: 169910 - DNA, 1695 bp, Enterobacter cloacae
gtgagaagccctaaagcttattcttacgttcgtttcagtacccccaagcaggcccaaggcgatagctatcgccgccagctccagcatgctcgggactattgcctgactcataatcttgtgttggatgacaaggccatagaggactttggagttagtgcttttcgtggtagtaaccgtactgatggtgcattaggtcgctttattgatgcagtgaaatgtggggaaatcgaaaggggatcttatctcttagttgaatcggtggatcgtctgagcagacaagcgattgaagaagctctaacgcagttcttggaaatagtcagggaagggattgttattgtcaccctttcagacaatcaggtatttcgcagtggtgaggtcgatttcacaaagctaattgtttcgattgtatatatggctcgtgccaatgacgaatccgaaatgaagagccgccgtagccgcgctgcatggtccaatggtcgccagcaagcgagagataataacaaagtgatagcaaactctcgtctcccttcatggttgacacttgaaggggacaagattgtccctatccctgaacgggttgctattgtgaacgagatgttccaaatggctcggacgggtcaaggatatcaacagattgcgaaggtattcagagataaaaattacaagacatttgggcagggtaaagtatggcgtccggctggcattcagtcagtgattaagagtagggccgtcatcggcgaatttcagccgcacatcatttacgacgggaagcgaatcccagatggtgagccaattattgactattatccggtcattgtatcgcctgcaatcttcgcagaggtacagcatattgtagataagaggagcaaccatagcggttcttacagaaaaggcctgtacaacaatctttttagtggggtaatccgttgtcagtgtggtgaattgctacgcttccataataaaggtagcaagggacaggttcgtaactatcttgtttgcccaatggaaggcgtaacgggctgccagttgccttatttgctatataacaggctcgaacctcagttgctgcaagccgtttgcaggctctccaaagttatgcaccaaaggcaaccatcgaccgcgaaagtcttaacgcttaaagacgagttggctgtactgcaaggacaattggatatcgaaatcaaaaagagaaagaaagctgctcaatccatgctggatttcgatgatgatgctacgtttagagcgttgtttgaggaatgtaaggcaacctgtcaggccttagaaggaaaagtccttcaacttgaagacgatatcatgcgattagaactttctaatcgaaccatttaccgccttcttcgcccagaggacctaagtagtacagagcaccgccagcagttcaatagccagttaaagtcttctatccaaatcgagttcatccacgacaatactcaattggtcgccgtttatagagatcttgatgacaatctcatgctggaacaagcttttggccccaagttaatgagcagtaccgttcatgattatgacgggcacatctgcgtaaaaactatagctgatgccccgtatgtcgatcctaactggttgagtgaagaatgggacgactacgccgaagatagccctgattcaggttctggtattgatgaagagtttggcgcatggagggcagaagatgaatag

SEQ ID NO: 169911 - DNA, 648 bp, Enterobacter cloacae; identical to SEQ ID NO: 140488

SEQ ID NO: 169912 - DNA, 189 bp, Enterobacter cloacae
atggcgacgtgcagactgtcagttgaaatcaagagcaggtggtgggttcctatctatctcaggacgctgacactgttctgcatgatgatgcgttgcgaaccggattacagaaaggttgctgagttcatcgtaaagcgcggcataagcaagaaggtgaaggcggagccggtaaaatacaaaacggagtaa

SEQ ID NO: 169913 - DNA, 240 bp, Enterobacter cloacae
atgttcgttgaagttactgtgactcacgttctaaacaagggtgttggtttctttcctcagagcccggcatataagctctatgtcaatggtgaccatatcgtcaaactcgccaagcaagaagacgaagcatggactgttatgaccttgtcagatggtgttgtatacgctatttcagaaactccttatgcagtagctaataagctcaatggcggagaagacaggtcaaaagtgaatctttga

SEQ ID NO: 169914 - DNA, 468 bp, Enterobacter cloacae
atgagcaacatcgacaaacgcgcattacgtgaacgagcagaaagcactatcggcattctggaaaacattgccgggtttgaaccttcagatatcgacggagacactgtagaacttcgctttgaaactgaggatggttttgataccggttgtgaagtgagcattgttgaccagtgccagaaggccgctgatgtgatccgtgcgctgcaggatgagctggaaggagaaaagggacgcaccaaagaactggagtcacaacgtgctttagctttcacgtcatgcaatcgatgggctgataagtttcgagaatcagaagcaaagctggaagccgcagagaagcgggctgtagaaatgccaaccttcgatggttatgtcccacacgttgcgcgagaacttcaagcggcattccgagttgcctgtgataacgctggtatcaacatcactgcagccggtaaaggagaggcatcatga

SEQ ID NO: 169915 - DNA, 339 bp, Enterobacter cloacae
atggctaatactttcactaactctgataagccgtgtattcattgcggctcacttatccgttatgtctcatcgggtagttgtgtggactgttcaaagacacgtagacagccacctaaaccaaagccacagattgtacgggtaaccgcttcagcagcaagagcaccgtttcactctgaaggtggggataaccgaaataacatcattgtgaagctgtctgataaggctcttaaccgtctggatgagattagttactcgttggttaagaagtaccgtttagccggatattcaccagaacgaatccgaatgattgccctgtcccatctgcttgaagccgcttaa

SEQ ID NO: 169916 - DNA, 189 bp, Enterobacter cloacae
atggaagatacgattaacgcaccgattaattattacgattctgaaaagcgtctaatcatcggggctaaccttatcggtaagattcaccctcagttaatggataagctggttcgccgttcaaacgatggcagcccccgttgccagcaagcacgaatcaccagctacttagaaggactcttaaatggctaa

SEQ ID NO: 169917 - DNA, 924 bp, Enterobacter cloacae
atgaaagaaaccatttataacatcttctgcttttgtcctgatggagttcacatcacacattgcggaatcgttgcgcatgaaagagatggtgacgataatcaaaaactggaatttttacgcaagcagttagacactgatttagcttcttgtaggtcatttcatgacattcacccttctgtgcttgatggtgacaaacaactaactctcgcaagatataattcaaatatgagggtaggaaacaatttatccccttttgaattagctctacaggccatgaatgccccccttcaccctttatctattgttacgccagtagtagaaggtaaacttcattatcacatccaactatcattgtctgaacaactaaggcataagcacatgccccatcaccacatagaaggtgttaaaaacttccctgattaccttgatgattacatgaaagaagatggttttcatattaagaaattactcaatgacgaccatatgaagcccatcagaatgctttttaatgaaaaacattatctgtctagtttcaaactgttaatgtccttcattgacaccattgcttacattgaatatggtaattccaaaagggttttccaaaactggcttgatacttactcagaaattaaaaaacttgaaataacatctgatgagttatatgagttaagaaattcactcttacacatgactaacctgaattcacataaggtgacacaaggtaaagagcgccgccttagtattgctgtttgcaaaagaggccacccaactcagtgtcacgctgacattgtttatttgaactttacagactttctatttttatttgatgaagctatagataaatggcttgacacttatcgtgacagcaacaaacagttaacatttatagaaaggtatgatgaagtagtgagggataactattaa

SEQ ID NO: 169918 - DNA, 642 bp, Enterobacter cloacae
atgaatacactgaacagtctacaagaaatcgcacgcgcgatccgcaaccttatccgcaccggcatcgtgaccgacgtcgaccacgacgaggggctttgtcgtatccagaccggcggtatggaaaccacctggctgaactggctaacctgccgcgccggtcgctcgcgcgtatggtgggctccatccgttggcgagcaggtgcttttgctggcgatcggcggcgagctcgatacggcatttgcgctgcccggtattttctctgatgaccatcccgcgccgtctgcctcccctgatgcacttcatgtttcctttcctgacggggcggttattgagtacgagcccgaaaacggcgcgctcactgtgtcaggcatcaaaaccgcagacgtcaccgcgtctgagtccatcacggccactgtgccactggtactggtgaaagcctcgacccgcatcacgctcgatacgccggaggtggtgtgcaccaacaagctgacgaccggcacgctcgaagtgaagaacggcgggaagatgagcgggaatatcgagcacaccggcgggacactgaaatcaaacggcgtgcaggtggataaccacgcgcacggcaacgtacagagcggcggaagctggactaaggggacgcaatga

SEQ ID NO: 169919 - DNA, 507 bp, Enterobacter cloacae; identical to SEQ ID NO: 154041

SEQ ID NO: 169920 - DNA, 264 bp, Enterobacter cloacae
atggcctcgtatgccttaccggtcggagcctgcaggcgactcaggacggcacggctgcccgttcccgccatcgagccggtgattttggcgtcatggagcgcgccaaccattgcggcggtctgctcgatactgaccccggcattttttgccaccggcgcagcatacgtcagcgcgtcgctcagcccgtcaaagtcagcggccgttttgttcatcgtcatcgacagcacgtcgccaatgtgtgcgatctggtcgtttgacatctga

SEQ ID NO: 169921 - DNA, 294 bp, Enterobacter cloacae
gtgaagcgcatcaggggaggcagacggcgcgggatggtcgtcagagaaaatgccgggcagcacaaacgccgtatcgagttcgccgccgacagcaagcaaaagcacctgctcgccaacggatggagcccaccatacgcgcgagcgaccggcgcggcaggtcagccagttgagccaggtggtttccatgccgccggtctggacgcgacaaagtccctcgtcgaggtcgacgtctgtcacgataccggtgcggatgaggttgcggatcgcgcgtgcgatttcctgcagagaatttag

SEQ ID NO: 169922 - DNA, 240 bp, Enterobacter cloacae
atgttcccgctcatcttcccgccgttcttcacttcgagcgtgccggttgtcagcttgttggtgcaaaccacctccggcgtatcgagcgtgatgcggctcgacgctttcaccagcaccaccggcacggtggccgtaatggacttagacgcggtgacgtctgcggttttgatgccggacacggtgagcgcgccgctttctggctcatactcgataaccgccccgtcaggaaaggacacgtga

SEQ ID NO: 169923 - DNA, 465 bp, Enterobacter cloacae
atgttaatggttttaggtttgtttgtgtttgagcgccgcacgctgccctatcagtctatgcagtattcgaaggattaccgctgggcgtcaaacgaccgtatcggaaagccaccggcttaccagtatctcggggaaggggaaaccacgcgcacgctgtcgggtgtcctctatcccgaaattaccggcgggcgtctatcactgaccgccatcgagctgatggccgacgaggggcgcgcgtggccgctgattgacgggacgggcatgatccacggcatgtatgtcatcgacaaagtgacgcatacgcacactgagctattcagtgacggtgctgccagaaaaatcgagtttagcctgtcccttaaacgggtcgatgaatcgctggcggccatttacggcgaccttaaaacgcaggccgacaatctggtcacgtctgccggtgaatggctgggagggctggcaggatga

SEQ ID NO: 169924 - DNA, 210 bp, Enterobacter cloacae; identical to SEQ ID NO: 161993

SEQ ID NO: 169925 - DNA, 201 bp, Enterobacter cloacae
atgcgtggccgtcataaggagtacgacggcggcgaaaacaaacagggcgaaagcggcacgaccaaaatcgcgaccgagtgctcttactaccagctcacgattgacggcaaagaggtcatcgagattgacgtcgtcaacatggtgatgaaagtcgacggcgtcgaccgtctcgctgagcaccgccgggcgattggcctgtaa

SEQ ID NO: 169926 - DNA, 228 bp, Enterobacter cloacae
atgcaaaaccacgagttagtagtttcgtctttcaccgctaatggcgatgttattagcgctaccgttagcgtaaggtcgatggcggtaccaatgttaaacatcttcagtatggaggtttatattgcttgtattgagggtggtacgattgaatattatgagggtgaagccataaaaactgccgcaaagcttatcagcgttgtgaatgatgatattaataaagcggcctga

SEQ ID NO: 169927 - DNA, 603 bp, Enterobacter cloacae
atgcagtttcagatggatttcactccggcacgaaaagaattaaatgcctgcaaacgttgttttgagaggatgatttctgcaaaaaattatgaagaatacgaagaagcatggtgcgattttcttaatcggttagaaaaaatatttgaaaaactacagcgcgcttgttatccacagaaagagaaatttaatgcactgctttcaaaagaaaatgctttgcgcaattcagacccacttttgaagtacttgaaacaagctaggaatgcggatacgcactctattcaggacatagctcagaaggttccaggaagccttagcgttggaattgatatacctaacagtaatgtgccaatacggatagaaaagttagtgatgagggggacggaaataaccgaataccgtggtagccaccctttgatcgttacattcacacctgaaacagttgaagttaaggaattgattaatagaggggtacattattcaccacctgaatctcatctttcacggccattagaaacacgacatcctactgatctcgctagactaggtgtggaattttacgaacaactttttgaaaaagtaatatcgacctttacacctagatga

SEQ ID NO: 169928 - DNA, 987 bp, Enterobacter cloacae
atgaaatatcgtcagttaggtcgtagcggattaaccgtatcagcattaggcatgggggcaatgaatttaagctttggaaccggtagcgccgttgatgatcggaccgggattaacgttcttcatgctgctctcgacaggggaattaatttttttgacactgctcaggcctatggtccctatacgaatgaaaagcttgtgggcaatgcgttatctgcacaccgtaaaaaagtgattattgcaaccaaatttggtttcaaactggaaaatggcgtgacaacgggcgttgatagccgcccggaaaatatccgtgctgttgctgaagcatctctgaaaagcctgaaaacagattatatcgatctcttttatcagcaccgtgtggatccgaatgtcccgattgaagatgtcgcgggaacgctgggagatttaattaaggaaggtaagatccgtcactatggtttatccgaagttggcgctgcaaccattcgtcgggcacatgcagtcactccagtcacagccgtgcaaaaccagtactctttgtggacccgtgagcctgaagctgaagtattgcccgtttgtgaggaactgggaatcgggtttgtgccatggggacctctggggaccggattcctgacgggaacgattgatacctcaacaaaattcgatagcgcgactgatttacgagcaaacttcccgcgcttcaccccagaggcaataaaagcgaatatgccgttagtcagcatgcttcgagaggtagctgccagcaaaggtgcgactcctgtacaggttgctctggcatggttattggcacaaaaaccatggatcgtgcccattcccgggatggataaagttgcctatatcgacgacaatctgaaagcgattgagcttgaattgagcgcagaggatttggctaatatggatgctttgttagcaagcattaagatccatggtaatcgcctggatgacggtttgctttcgatgtcagaatga

SEQ ID NO: 169929 - DNA, 585 bp, Enterobacter cloacae
atgacaaacgttctgattctaggcgcagcgggttctgttgcccgggttacaacccgttacttactggataacagccaggcccagttaacgctgtatttacgtaacagtgcacgcctgcaaaacccggatacagccagggtgactctgattgaaggggatgtactggattatgaacaactcaggctcgcaatgaacggtaaagatattgtgtacgccaatttatccgggaatatgaaggaacaggccgaaacgattgttcgtgcaatgaaatcaacgggtgtacgtcgtttgatcttcattagctcaatgggaatatatgatgaagtaccgggtgagaaatacggcagtattttggcaccttatcgggaatcagcaaaaattatagaaaatgcagggctcgatcatacaatcatccggcctgcgtggtttactaatgggcatgaagttgaatatggcctaacgcacagaaatgaaccctttcgggggagcagcgtttcccgattaagtattgccgatctgattaaccgcatggtgatggatccatcactttatttacatgatagcctgggcatcgcccgagtctaa

SEQ ID NO: 169930 - DNA, 1194 bp, Enterobacter cloacae
atgaaccgttctccctccgttaagacaactgggctactttttattatgatcctaagcgccctgatggcgtttacgtccttgtctaccgatatttatcttcccgctatgccgattatggcgaaggaattgcagggtgatgcagaattaactatcaccggttttttgattggcttttgtctggcacagctcatctgggggccaatcagcgatcgtttcggtcgtcgccctcccctgataatcggtatggtgttatttattatcggttcggcgggatgcgcgctttctactgacatcacgcatattgttttctggcgcgtatttcaggcgctgggggcctgcaccggtccgatgcttgcgcgcgccatgattcgtgatctgtttagccgcactcgcgccgcccagatgctttcaacattaaccatcgtcatggcgattgcccctattgttggcccactgcttggcgggcagatgattaaattcacctcatggcatgccattttctggttgttgacggccattggcgtattcatgctgctgtcactctactggctgcctgagacattgccgcctgaacgtcgtatatcgtcctcaattggtggggcgtttcagacatattatcggttgctcaacaatgtgaactttatgaagttcaccctttgtctgacgttttattatgtggccgtttatgcctttattgcaggctctccttttgtctatatcacctatttccatgtagatccgcagcattacggttggttgtttgccgtcaacattattggcgtaatggggctgagtgcggttaaccgtcgcctggtgcaacgttacccactggaaacgctcttaaaaggtgccgtactgattgccgctacagcgtccctggtgctggcggttgcgacaaaactgaatgtcggaggcatagctctgattgccctcgcaattttcatcctgttttcaatgaatggcattattgccgccaccgcaacggccgccgcgctggatgctgtaccgaatgctgcggggtcggcttcagcgctgattggttcactccagtacggcagtggcatcatttcatcattgctgttagcgatgttcagcaatggaaccccctggacgatgggctggattatcacccttttcactctggccagcgcagctatggcgctgaccacgcgagtgagtaaggcgggtcattaa

SEQ ID NO: 169931 - DNA, 1050 bp, Enterobacter cloacae
atgaaattcaatttcttaagtgcaatgctgctcacggcaatggcgggagtgacctcagccaatgcggccgattacaaaaaaaatcccttcacactggtttatgacggtgccatcaccgagaacgtcaaaggtcaggtcaatattcatccggtgaaatacaatctgcatggcatccagattgtcgcgaatgtctataccccagctaactacgatcctgttaaaaaatacccggccatcgttgtggcacatccgaatggcggcgtaaaagagcaggttgccggactgtatgcgcagcgccttgccgaacagggttacatcaccattactgccgatgcggcttaccagggggccagcggtggaatgccgcgcagcgtggataaaccggctaaccgtatcgaggatatccacggtatggctgattacctcagccagtatcccggtgtggatagcgctcgcattggcctgttaggcatttgcggtggcggtggttattcattaaaagccgcacagacagataaacgttttaaggccctggcaacattaagcatgtttgactccgggttggttcgtcgtaatgggtatcaggattcacaactgtccaccctccaggaacgtctcaagcaggcgagcgatgcgcgttcacgcgaagtagcgacaggtgaagtcagctactccggtgatgccaaccttaccgacgaacagattgctaaacttccctatgatttgtaccgtcagggctacgagtattactggaaaacccacgcgcatccgaactccacgttccgctacaccaccagtagcctgcttgagctgatgcgctttgatgcgcaaagcaatatggatcttattaatcagccgctgctgatgatggcaggtaccaaagctgactcgctgtatatgaccgaaagcgcattccagaaggccaccgggacacagaataaaaaactgttcctgatcgacggagccacgcatatcgagacctactgggtaccgcgctatgtcgatgcggcgatggggcaacttgataccttctttggcaaaaatatttaa

SEQ ID NO: 169932 - DNA, 1458 bp, Enterobacter cloacae
atgcctaagcgttccatctccgttcacctggcgttgatgtttgccttatccgcgctgttgattgtgtccgttatcggtatcctgctaagaagctccctgcatgattctctgcaaaagcagatgcacaacgaactgctgttccgggaatcattaatgagcccgtggatcaccgcccgaacctcggctgacggctggtcaacgttggccaataaattcaccgtattaaccaattctgaaggtgagcgcgttcgctactggatagtgagcgataacccacgctttagcatggggggaacaccgccggtgggtgtccagtggtcttcattacgggaaggctttaataaagtgcccggcgcatcggaaggtgcatgctcattgttcctgttagtgaaaacgatccccgccaacggtgaaaggcctgctctgcgctatatcgttgctatcgactcaaccccctatatgggcacactggaagcattcacccgcactctgctgatcattgccgcgctgggtgtgtttattgtcgcgctgctgggctatatggtttcaagaatcggtatgcgtccggtgaggacactcagtcagcaggctcaacatctcgcaccgggggaccacggacaacggcttgatacaacggaattacccgcagaactaaaacaactggcctcatcatttaacggcgtattagatcgtcaggaaatcgcctggcgtcagctcgacagctttaacgccgatgttgcgcatgaactccgtaccccgctgacaaacctgattggccagacgcaactgggcctctcacgccgacgttcgcatgatgaactggaagagttattgggttccaatctggaagaacttgaacgcatgacatcgatcgttaacgacatgctgttcttgtctcatgcgcacgcgggcgaacatgcttcccagcttacgcaagtctccctgcgggaagaaaccttgaaaacagcggagtatgttgaaccttcttttgctgaaaaacagctcgcgctggatgttgagggcgacgtcactgcgcatatcgatcgacgactgttccaccgctcactggctaatttactggaaaacagcgcaagacattcaccgtccaatagcacggttacggtgcggctaagcgaaaaagataatcaagcctgtgttgaagtttctaacccaggcgagccgatcgcgtcagagcacttacaccggctgttcgagcgcttttatcgcgtcgacacctcccgggccaggagtgatacccaccatgggctgggcctgtcgatcgtgcgtgccgtcgccattatgcaccggggagatgtctttgcccgtagcgagaacggtatcaatacctttgggctgacgtttgctaaacagcctgacgctacccgaaccaagaaactaatgtcagggcgtcctctctctaaacctgctgacaaaattgtcagagagccgtcagcctaa

SEQ ID NO: 169933 - DNA, 657 bp, Enterobacter cloacae
gtgagaataggaaagatatttagcgggtttctggcgatgatggtcatggggtttctgggacaacccgcgttcgcatcagagaactcatccgcccagtcccgcacgctgattatctggttttcccagcccgaagaaatgaagcccgatgctatagacggtttttccggggccagcgtattgcagaaatatacaccagagactggcagcacgcagtttgttgcgcagctgattcagaagcagacgcatggtgatctgtttcgccttgaaaccgccaccccctaccctcgccagcatgatgcactattacgcgttgccgaaaaggaacagcaaactcaagccagaccctcgttaaaaacaccgctccccgacctcagcgattacgacaccatttacgtcggctatcccatctggtggtataccatgcccatggtgatctacagcctctttgagcaaaatgactttgccggtaaaacggtcattccctttaccacccatggaggcagccgtttagccgactccctgcgagaaattgcccgcatgcagccgcaggccacattagtcactcgtgcgctctcgatctcgcgcaacgatatttcaggccctgacgtacctgcacaggttgagcaatgggtaaaacaagtccagccacagcgttaa

SEQ ID NO: 169934 - DNA, 693 bp, Enterobacter cloacae
atgaagaaaatttatattttccaggtcgtgcaggatgcgctgatgacggaacttctgctggtactgatggggtttcaccttcacggcgaaatcgtgcatgaatgggcgggtattatttttaccctactcattattttgcatctataccttaaccggcatcgcttgtggtcactgtcaccgaatattccgttaacgatgcgggtcgttaaccgagccattaatgtagtgacattcgctgttattctgaccgctattgtctctggcatgatgctgtcccgacatatcctgctagagttgccgttccataatccggcgagttgggtcagaaaagtacacatgacatcggtccactggggaatgctcattctggcgctgcatatcgggttgcactggaaaatgctggcgacctttttctgccggatcctgaatgtcgccaacaactcgctcttagccaatatcattatgccggggatcttttcgctcattgcattattgggtttgtacacgttacttaaccaggactatctcgattatttgctgatgaaggtcgatttctcctttttcgactacgatgaatccgcccttcttttctacttacgctacctagccattgttgttttattttcattaatgacgcgttttttactttggttttttatttttagaaaagacaaagctgtgtcaccacaatag

SEQ ID NO: 169935 - DNA, 480 bp, Enterobacter cloacae
atgattagacatttgcgttatctcggactgctactgcccctcgtggcatcttcatcctgggcagtagagcaaaattccgctgtccatatctcccccgcaggaagtcagaacgcggtggaggggtctgccgagaactttaccggtcgcgtccgggttgatcctctcttcacaccagataacgacatccctgtttccggggcttatgtcacctttgagccgggggcccgttctgcctggcatacccatccggcaggtcaacggctgattgtgacctcaggcgttgggctcacccaacaagaaggtcagccggtgcaggttatccgtacgggcgacgttgtctcttgcccggcgggcgtcaaacactggcacggggcgtcacccggtagcgcgatgacacatctggccataaccgggattgtggatggcaaaaacgttaactggaaggagttagtgacagatgaacaataccacgcccattaa

SEQ ID NO: 169936 - DNA, 585 bp, Enterobacter cloacae
atggagcatgatcccaaccgcagaatgttgatcacagcgcttgccgggctcacgttggcgaacgtctctctggcgagagctgccagcggaaacgccaacgtgcagggtaaaagccctattctggtggcgtatttttctcgcagcggtaacacacgggtggttgcaggcgtcattcaccgcagcctgaacaccagtctgtttgaaatcgaaccggcaacgccttatccggaggactatttccagaccgttgaacacgcgcaaaatgagcataagcggggaataaaacccgcattaaaaaatagcgttgcagatatctcacgctatgagaccgtgtatttaggctttcccatttgggggaccagcgtgccgcccatagtacaaacatttctcagcagtcataaccttgcgggcaaattactcatccccttcattactcacggtggctacggtaaaggaaacagcgacgacattcttgccagcctggccccaactgcccgccgtgaaaaagcgctggtcattgaatgcgaccaggagcggaaagccacagaaactgtcaccagttggttagagacaatccgcaactaa

SEQ ID NO: 169937 - DNA, 891 bp, Enterobacter cloacae
atggtgaaaaatagaaggaacatcagcgtgccgataataataatactaaagggtattgggttatttctatttttatccggttcagcttccgctggattgactgaaagcattcaagtgaataaccaacagatctatgttaactcgttgggaatgcgttttgtcacaataccagcagggcaatttctgatgggttcatcggacgcaacgtccgacagtcgggaaaaacctcaacattcagtgatattttctcacgatttttttatggggcaatttgaggttacacaagcagactggctggctgtgatgggggaaaacccttatgtgcgcgatcgctccaatccctactatctacttcctggtatggcagatcgtattacgcatccggatcatcccgcgacggtatcctggcaggatgcaatggagtttattgagaaactcaatcaacgagaaggtacaactagttatcgattaccaacagaagctgaatgggaatatgcagctagagcgggtagtacaacacgttatttttttggcgatgacgcttctgcgttagataattatgcctggcatggcgaaaattttatttctggtggcacacatcccgtgggtatgaaaaaaccgaatccatggggattgtatgatatttacggtaatgcctgggaatgggtcagcgattattacagcgtccgctactatgctcaaagcccggagcacaatccgcaaggcccagacggtagtacagaacgtgtcgtgcgtggcggtagctggcatagtacttcggatggctggcatagcgcgtggcggaaaccctaccccgaggattaccgtgggataagtattggattcagagtggtttacaccggcttaccagaatcatcccttagtcattag

SEQ ID NO: 169938 - DNA, 852 bp, Enterobacter cloacae
gtgcaaacggtaaaactgaacaacggtattgaaatgcccctggcaggtttcggcgttttccagatgacggatgcggctgaatgcgaacgtgcggtgattgacgccatcgaaacaggttatcgtctgattgatactgccgccgcctaccagaacgagactcaggtcggaaatgccataaagcacagcggtgtcgatcgcgaagatctgtttatcaccaccaagctatgggttcaggacgtgaattatgagggcgcaaaagcccagtttgagcgttcaattaaccggctccagctggactatatagacctgtatttaatccaccaaccctacaatgatgtccatggtgcctggcgagcaatggaagaattgcttgctgccgggcgaattcgcgccatcggcgtcagtaattttcacccggacaggcttgccgatcttatcgcgttcaataacgtcgtaccggcggtcaatcagattgaagtgaacccttttaatcagcaacttcacgccgcgccgtggatgctaagcaggcagatccaacctgaagcctgggcacctttcgccgaaggaaagaatggattgtttgaacatccggtgctggcggctatcggccagaaatatggcaaaagcattgggcaagttatcctgcgctggctttatcagcgaggcattgtgtcgctggctaaaacggttaaaaaagcccgcatggaagaaaatatcgctatttttgattttgatataagtggtgacgatatgcaaaaaataaccgctattgatactgcgacaagcgcatttttctcacatcgcgacccggcgcgagtggaatggcttgcggactggaaactggatatttga

SEQ ID NO: 169939 - DNA, 1050 bp, Enterobacter cloacae
atgattaaaacagtaaaagcgttgggcaccgatgccgcaaacaaccccttgcgggaattcagcatcaaacgtcgcggattattaaatgatgatgtggaaatagaaattctctactgcggcatctgccactctgatttacatcaaatcaaaaatgattttggcggcacccattatccggttgtccccggacatgaaatcgttggccgggtgattgctgtcggtgagaatgtcaccaaatttaaacccggtgattttgccgctgtcggctgtatcgtcgattcctgcggtgagtgccctgcctgccgccaagatctggagcaattctgcgaatcagggacgacattgtcatttaatacaccagataaacatctgggcggtatgacctacggtggattctcacaaacctatgtttgccgggaaagctacaccttgaaaatgcctgtaaatttagaacttgccgccgcagcgccattactttgtgccggtattaccgtctattctccactcaaacactggcaagccggtgccgggaaagtggtggggatcctaggcattggcgggcttgggcatgttgcgataaaaatagcaaaagccatgggtgcgcatgttgtggtctttacaacatcacagtcaaaagtcgaggatgcgcatcgcttaggtgcacatgaagcggtgctctcttccgatgcagaacaaatggcaaaatttgtcggcaaactggatctgattttagataccgtatcggcaaagcatgacattaatgcgtatctgaaattattaaaaattgatggttccgttgtgcttgtcgggctacctccagagcctattgaaatttccgcatttaatgtcgtgaaaggccgtcgtagcttctcaggctccaatattggcggcattgctgaaacccaggagatgcttaatttctgtgccgaaaacaatattaccgcagatatcgaactgattgatgccagccagataaatgacgcattcagcaggctggaaaaaggtgatgtgaaataccgctttgtgatagatatgacaacattgaaataa

SEQ ID NO: 169940 - DNA, 255 bp, Enterobacter cloacae
atgaaaagtaccgtattgattctctccacacttttaactctgtttaccattaacagtgcattttccgcacaggtaatctccagtgatgccggtaaagtaaaaattggtgtcgtatccgccagtggagccagcacgctggacgatctcgtcgccaaactctcaacacaagcagataaacagggcgcctcttcatttaaagttctgtcggctacaggcaataataaattacatggcgtggcagagatttatcaataa

SEQ ID NO: 169941 - DNA, 342 bp, Enterobacter cloacae
atgattaaactcgagcaactgataaccgaaataacccgatggatagacgacaatattcatcagccactcagtatcaatgatgttgccgcgcgcgcggggtattcaaagtggcatctccagcgcgttttctttcagatgaaaggacagaatattgcgacgtatattcgggataaaaaactggcgttagctgcaaacgatctcatcgacagccgtgacaaggtacttgatatcggcttccgctatggttttgaatcccagcaatccttcacccgttcattctcaaagaaatacaatgttccacctcaagcgtatcgccgcttatataccgaaaagcatttttaa

SEQ ID NO: 169942 - DNA, 1173 bp, Enterobacter cloacae
atgatgaaaagttcggtggcttattcgcctctggctatgctatgcatttttgctatgacgacagggttggcgggatgcgacagtaaggacgcatcttctgccagcaaagatattcctcccgatgttattgtcgagacagtaaaagcaacgcccctcaccctgacccaggatctccctgcaagaacggtggcatcccgtattgcggaaatccgcccacaggtttcagggattgtgctgtcccgtgattttaccgaaggcagcgacgttaaagccggccagccgctctaccatatcgacccggcaaccttccgcgcttccgtcgataatgcccgggcggcagtcaaccaggcgaaagcccagtcacagctcgcccagacaactctttcccgctatcgcgcactaagcgggaaggattatatcagccgtcaggatctcgatcaggctcaggccactgcccaccagtcgcgtgcggctatcgatgcggccagcgccgcccttcgctctgctgaaatcgatctggctcacagcacggtaacgtcaccactgaatggccgcatcgggttatcgagcgtaacggagggagcgctggttcagaacggtcaaagtgctgcactggccaccgtgcaacagttagacccaatgtacgttgatatcacccagccgggcgaggcgtggctgcgactacagagtgcgctggcgaatggccagattaagcaggaaaacggcaaagtgcctgtccatgtgctcatgcaggacggaagcccgtatccactaagcggcacgctggcattctctgatgtcacggtggatcagaccacgggcgcaattactctacgcgccattattcctaatccaaatcatcaactgctccccggtatgtttgttcgcgcccgtcttgaagaaggtatcgcgccagaagcactgctggttgcccagcaggctgtcacccgtacaccacgcggtgacgccacgacacttgtggtcgataagcaaaaccgggtgcagcctcgcgcaataaccgtgacgggaacgtctggcgatcgctggcaggtcactgaaggtcttcaggcgggtgaacgggtcattgtttcaggcagtcagcgcgctaaacctggcgaggttgtgaccccgcatgaacgcgccacgcgctccggttcgtcttcacaggaataa

SEQ ID NO: 169943 - DNA, 3135 bp, Enterobacter cloacae
atgtctaaattttttattaaccgccctattttcgcctgggtgctggctattatcgtgatgattgccggggggatcgcgattatgggattacccgtagagcaatacccggacgtcgcgccaacggcagtacagatacgcgtgagctatcctggtgccgatgccaccacgctgcaaaatagcgtgacgcaggtgattgaacagaacatgacgggcctggatggcctgatgtacatgtcctcaaccagtgactcctccgggacgctgcaactgaccctctcctttaaaaacggcaccgatccggatatcgcacaggttcaggtacagaataagctccaggtcgcgacccctcttctgccgcaggaagtgcagcagcaggggattacggtgatgaaatcctccagtaccttcttcctggtacccggttttgttgatgaaaccggacatatgagcatggaagacatcgccgatttcgtggcatcgaccattaaagatccgattagccgtattgacggcgtgggcgacacgacgctgtttggttcgcagtacgcaatgcgcatctggctggatcccaataagctcaacaactatcagctaacccccgttgatgtcagcaatgccctaaaagtgcagaacgcgcagattgccgcagggcaactgggcggcgcgcccgctatgaaaggccagcagttaaatgcatcaatcattgcgcaaacccgcctcacctccccggaagagttcggtaacattttgctgaaggttaacagtgatggctcgcaggtcacattgcatgatgtggcgcgaatcgaacgcggcggcgagaactaccagtttgtggtgaaaataaacggcaaaccggcttccgcgctggggatccagcttgccagcggagcaaacgccatggataccgccaaagccattcgcgcgaaactggctgaactggagccttattatccgcaggggttaaaggtcgtttacccttatgacaccacgccgtttatcagtatctcgattcatgaggtagtgaagacgctgtttgaggcgattatcctcgtcttcctcgtgatgtatctgttcctgcaaagcttccgtgcgacgcttattcccactatcgcggtgccggtcgtgctgctgggaacgttcggcatcctgagcgcgctgggctactcgattaataccctgacaatgttcgggatggtgctggccatcggcctgctggttgatgacgccattgtggtagtagagaacgttgagcgcgtgatggccgaggaaggtctcaagccccgtgcggcaacgcgaaaatcgatggatcaaatccagggcgcactggtgggcattgcactggtcctgtcagcagtgtttattccgatggccttttttggcggcagtacgggcgtgatttatcgccagttctccatcactatcgtctcagcgatggtgctgtcagtgctggttgcactcacgctgacgcccgcactttgcgccaccatcctgaaaccggtcaaacccggtgaacatactaaaaatcgtgggttgttcggctggttcaatcgccgcttcgatgccagcagctcacactactcgcgtgccgttgcccgtatgctgaacggtaccggacgttatttaatcgtctacggagtaatcgtactcggtatggcctggctgtttgcccgtctgccgactgcgtttctgccgtcagaagatcagggcgtcctggcgacgcaggcggttctgcctgctggtgccacgcaggaacgttcgcagcagattctcgatcaaattagcgactggtatctgagtgatgagaaacacaacgttgccaacgtgctgaccgtcaacggctttggttttgccgggcgcgggcagaatattggtatcgcctttatcggcctgaaagactggtctgagcgtgacggtagcgaaaacagcgttgatgctatcgccgcccgtgctaaccaggcattttcgaagctgattgatgcacagattgccgcattcaacctgccgcctatcatcgcgctgggtaacgccactggctttgattttgagctgatcgatcaggcgggtctggggcatgaaaaactgatggaagcgcgtaataccctgctacagatggcgcagcagcaccctgacgttctgatggccgtgcggccaaacggaatggaagatacgccgcagtatcgggtcaatatcgatcaacataaggcttccgcgctgggggtttcgctggatgatatcaacactacgttgagcaccgcctgggcaggaagttacgtcaatgattttatggacagaggcagggttaaaaaagtctatgtcatgagcgatgctgcatggcgcatgatgccggacgatctcaataactggtacgttcgcgccggtaacggcaagatggtccccttcgcaagcttcgctgacgcgcagtggatttatggctcgccgcgacttgagcgtttcaacggtctgccatcacttgaaatcctcggccagcccgcgccgggtcgaagctcaggcgaagcaatggcactgatggagcagctggcatcgcagttaccgaaaggtatcggtcacgactggaccgggatgtcgtatcaggaacgcctgagcgggcaacaggccccggctctttatgccctgtcgttgattatcgttttcctgtgcctggcggcgctgtatgaaagctggtccataccgttcgccgtgatgctggtggtgccgcttggcgtcgtcggtgcgctgctcgcgacaactttgcgtggcctcaataatgacgtctatttcgtggtcggcctgctgacaaccatcggtttatcggcgaagaacgcgattcttattgttgaatttgccaacgacatgatggtgaaggaaggcaaaggtttgattgaagcgacgcttgaggcagcacatatgcgtctgcgcccgatattaatgacctcactggcctttattctcggggttctgccgctggcattaagccgtggtgctggttctggcgcacagaatgccgtcggcactggcgtaattggtgggatggtcgctgcaacgctgctggctatctactttgtgccagtgttctttgttgtggtacgccgccgctttaccggcaagcgtatcactgatgacgaggatgatgagtaa

SEQ ID NO: 169944 - DNA, 894 bp, Enterobacter cloacae
gtgcttaaagaaaactttaatgaactccagctctttctggctgtggcgcgtgaacggagttttacccgggcagcggctaaacttggtgtttcccagtcagccctgagccatgccatgaaggctctggaggccaggcttaatatccgtctgctgacacgcaccacgcgcagcgtggcacctacggaagcgggggagaggatcatcgcctgtctggagcctcgtctgacagagctggaacaggaactggaacagctggtacagctcaacggcgtggcggccgggaatatccgtatctcagccggagagcatgcggcgaaaagcctggtgtggccgaaactcaaaccgttcctgcgtgaatatcccgaaattaatgttgaactggtggtggataacggctttgtaaacatcgtcgaaggccgttttgatgcaggcgttcgactgggggaaagcctcgataaagatatggtcgcggtgcgcatcgggccagacctgcggctggtcgtagtgggttcgcctgactattttacccgctatggcattcctgataccccacacgatcttcagcaccatcgttgtattaatatgcgccttccgacactgggcggcttatatcagtgggagtttgaaaaagacggaaaaccgcttcaggtaaaggtggatggccagcttacctttaatcacctctcggaaagaatcgatgcggcaaaagacggcttcgggctgtcgtttgttcctgaagacatgattcagcagcagcttggatcaggaacactaattgaggtattgcaggagtggagcccggtatttcccggctattatctttactatcccagccgaaaacagcatccacctgcctttgcgttgatgattgatgccttacgctacagcgcttaa

SEQ ID NO: 169945 - DNA, 771 bp, Enterobacter cloacae
atgaaaattttaattgtcggtgcgaccggcagtattggtcgccacgttgtagaaatgtcgatcaaaatgggacatcaaactatagctcttgtacgttcccagcaaaaaagcaaattgctgccacgagaagttgagataatttatggcgatgtttctgtcccggaaacattgaccggcattggtgataatattgatgccgttattttcacactgggatccgatggattagggcgcataggcgcacgggcaatagactatggcggagtcaaaaatattctgaagcaattaacgcaacggcatatcagaattgtgctcatgacatcgatcggggtgacagaaagagaaggttcttataaccgtcagacagaagcgcatgactggaaacgacgtgcggaacgcctggttcgtgccagcggccatccctataccatagtcagacccggttggtttgattacaataaaccaaatgaaaaaaaaatcgttatgctacagggagacagacgtcactctggcacccctgctgatggcgttatttcacgtaaacaaattgccagagtactggtttgtgcagtttcagacgacgaagctaaaaataaaacgctggaattggttgctgaatatggtaatgaacagcaggatctagctcctctcttttccgctcttcgccaggattcagttgcacacaatgacggcatactggatatagataatatgcctctcgcttcagaacctccgtgtatcgttgacgatttgaccaccattgccggttaa

SEQ ID NO: 169946 - DNA, 645 bp, Enterobacter cloacae
atgaaaaatcggcttaatgagaaacaacaggcaataatccctatcgcagtttatgcagcaatcgggcagatggataaattaaactccgctctgcatagaggtttgaatgccggattaaccataaacgagataaaggaagtgctcgtacatatttacgcttattgtggattcccaagaagtcttaatgctatttctgccctgataactgttctggaaaaccgcaatttgaaggggctcacagacgaaactggcagagagccagcccctgttccacagggctggaacagtctgatggccggtaccgaaaatcagacccggcttgtaggaaaaacagtgacaggaaatatatttgaatttttacctgccatagatcagtttctgaaatctcatcttttcggagacctgtttcagcgagacgtgctggattggtccacccgggaactggtaacgatatcagcgctggctgcaatgcctggtgtaagcagtcaactcaaaactcattacgttatcagtcttaacagtggactgacaattaaacaactatctcattttgttgacattctggaatctgagtgtggagatatttcagtaaacagtgcccgggaagtactctcacaatttctcgacaccaaaaacaatcagtga

SEQ ID NO: 169947 - DNA, 408 bp, Enterobacter cloacae
atgaacgataagtttgatggtaacggcatttttcctaagggcccaataaatgaggcctatgcgcaatattttctgggaacaagctatctgaatatgttatcgacagaaggtgttatgataggtaatgtagtatttgaacctggatgccgtaacaactggcatattcaccataaaggtgggcaaatattacttgttactggcggcaagggctggtatcaggagtggaataagccagcacgttcacttaaggcaggtgatgtagtgaatattcccccagggaccaaacactggcatggtgcaacaaaagattcctggtttgcccatatagcagtagaagtccctgctgatggtgcatcaaatgaatggcttgagcctgtagatgacgaacaatatagtatcttgtcttaa

SEQ ID NO: 169948 - DNA, 1056 bp, Enterobacter cloacae
atgaccttaaatgttaaaggttatgccgcttttgccgcgaaagaggatttagttccgcacaattttgttcgccgcgatccgcgcgataacgatgtggttatcgagattttatacagcggcgtttgtcactcagacatccacaatgcgtttaatgactggggcggtgcaaaatatccgatggtgccggggcatgagatcattggtcgtgtgactcagattggcaaggcggtgaccaaatttcgcgtgggcgactatgccggtgtgggatgcatggtggactcctgccagcattgtaagccctgtgagcaggggctggaacagtactgtgaggagggcaataccttaacctataacgacgttgacaggcatgatcatatgccaacctatggcggctattcggacaagattgtggtcaccgaaaaattcgttatcaaagtgcctgagacacttgacttaaaaggggcagcaccgctgctctgcgcgggtatcaccacctggtcaccgcttcgtcactggaatgttggcccgggcagcaaagtcgcggtcgtggggttaggcggcctggggcatatggcgataaaactagccaaagcgctgggcgcggaagtcacattattcagtcgttcgccgaataaagagaccgatgctcgccgtctgggggcttcccatgttgtgatttcaaccgacgaaaaacagatgctgagtgcgcataaccagtttgatctgattatcgatacggtaccgtatgtccatgatcttaatccctacattccgacactggcgctgagcggaacactggtgcttgtagggtacctgggcgagttagagccaatgctgaatagtgcaccgctggttttaggacgcaaatctgtggcaggatcagttatcggtggaattgaggagacgcaggaaatgattgatttctgtgctaaacatcagataacttccgatatcgaacttattaatattcaggatattaataacgcctggcggcgaatgctgaaaagcgacgttaaatatcgttttgtgattgatattgcttctctaaaggcataa

SEQ ID NO: 169949 - DNA, 831 bp, Enterobacter cloacae
atgaaagatgtcattgttgttattggtagtggctctattgctcaagccattgcgcgacgcgtcagcgtcggaaaacacattcttctggctgatatcaaaacagaaaatgcccagcaggctgaaaatacgctctctcgtgcgggttttgaggtaagcacaacgactgttgatgtgagttctcgccagtcagttcaggcacttgcgaagtcagcctgtgcgttaggtgagattaaaggcgttattcatactgcagggctttctccttcgcaggccaaagcacaggacctactccgggtcgatttgtacggtactgccgtgctttttgaggagtttggcaaggtgattgcgcgcggcggctcctgcgtggtgattggctcgcagtccagccatcgcttagccgttgatgcgctgactcaggtacaggcggatgaattggccacgttaccgccggaagaactgcttgagttgccgctggtgaaagacattgacgacagcttatacgcctaccagatttccaagcgttgtaatgcactgcgcgtgatgtctgaagccgtaaagtggggcaagcgtggagcgagaattaactgcatcagcgccgggatcatctttactccgctggcctatgacgagcttaatagcgcggaacgcggtgcgttttatcgcaatatgctggataaatcgcccgcaggccggggcggcacgccggatgagattggcgcgctggcagagtttctgtttgggcctaatggcacctatgtcaccggtagcgatctgctgattgatggcggcgcaacggcatcttataaatatggcgaattacgcccgcaataa

SEQ ID NO: 169950 - DNA, 567 bp, Enterobacter cloacae
atgtcagatatagggttataccagaagttatccgcaggcgaaccggtcaatatgcggtctccagaataccgtgaagctattcaggatatgagccagtcatggtcaattaatgcgtctattaatcgtgcagaatatgcatttttggacggttctttacatcctttgtttaccgcactttttggtcgggaaatggagagtaccagtcagattttaccgcctgtctatatcgattttggtcgtcaggtccaggtcgggaaaaatgtgttcattaaccataattgcaccatgatgtctgctggcgggattgtcatcgaagatgatgtccagataggccctcaggttacgctgacaaccaccaatcatgatttcgacgatcgttttaccctgctgtgcaaaccgattcatatcaaacgtaatgtatggatcggagctcgggcgctaattctgcctggcgtaaccgtaggtgaaaatgccgttattgctggcggctcggtggtcacaaaagatgtggaaccaaatgttgttgtcggtggctctccagcccgagtcctgaagcgtttgaattaa

SEQ ID NO: 169951 - DNA, 906 bp, Enterobacter cloacae
atgttagataaactcgatgcattaaagattttctgtactgcggcagaaacattgaaatttcgagaaaccgcgagtcgacttggacttgcgcctcagatggtgacaagggctattgctgagcttgaacatcagttaggggaagtactgttccttcgtaacacccggcaaatgacgttaacccctttcggacagcaactctggccaaaagccgaattacttctttcggaaagtgagtctttgttcgctggagggagaaatgaaaacagcctggatatgaccgggcgcgtgcgcattacattaccgccgctgttcgaaaatcaggatattgtgcgtcacctgctccgttcgcttgaaccttaccctgatctaacgattgaatggctccctgctgatgcgcatctcaatattattgatgagcaaatcgatattgggattcgaataggtactattccggataatcgatttatcgtaaaaacaattcgacctgttggcatcagtatcgttgccgctccagatttagtaaagcgactgggaatgcctgattctttgaaagcattgcaatatgaatatcctcttagcgctttgagtaacagcaactccggccgtgtatggccctggcagtttgcaaatggcaactcattttttcctgcaaagcccaaatttatcgccagtgatattggcagtgaactggctgctgcactagcgggaagaacatgtagccaattgccggatatcaccgttcgcccttatttacagcgcggaggactggttaatattttccctgagctgaattattccccttatcagctatacatattccgaccgcaccagcccttgattcctatgcgtattcgggttgtctttgataatttgactaaaatccttcatgagctgttcagagaatag

SEQ ID NO: 169952 - DNA, 126 bp, Enterobacter cloacae
atgcttcagggtgatcgacgccatacgggaacaccggaagatgatgtgatatcccgtgagcaaatcgctcaggttctggtcagcgccctgaacaacgacgaggcaaaaataaaacgttcgagctga

SEQ ID NO: 169953 - DNA, 153 bp, Enterobacter cloacae
atgtctaagataccatcatttttttggtggatcatcagcctgcaggtctgtaaacagtggggtaagatcctgctttccttcgcctcgttcagccatcagctcgaacgttttatttttgcctcgtcgttgttcagggcgctgaccagaacctga

SEQ ID NO: 169954 - DNA, 252 bp, Enterobacter cloacae
atgaaagcactacttattactacattagttatggggattatctcagtgaataccgcatctgccgcccaggaaattaatcaagtagatgggaaacaaaagatcggcgtagtctcagcaagcaatgtctatacacttgatgaattatcgaatgagctttcccgtaaagctgatgagcagggtgcgacgtcattcaaaattttgtcaacaacaggaaaaaataagttgcatggagttgcggaaatatataaatag

SEQ ID NO: 169955 - DNA, 1227 bp, Enterobacter cloacae
atgattaaatggtatagatttaaaaacttctactcttttaaggaggatacctttgttgatcttaccttaaaggagaattcatcattttcaagctatgatactgaggtcaatggcacaaagattgctaagattatgaccgtcatgggttcgaacggttccggcaagtccaatatgcttaagcctttggcttttttacgctggttttgttctcattctttccaaaaacttgagagcaaaagtcttttacctttctatccacattattcttgtgtggccgaaccttctgaaattgaaatttgcttcattgattccgatgataagaatcagcattgggaatataagtattttgttaaattgacacgcgatcgtgtacatcatgaagaattaaaactgaaaacaagtcggcagtatactactctatttaaacgtgtgtttgatactgataaagataaatatatctgcaagtctcataagctaatgtcagatgagaatgcttttcctgtttcagaaatgaaatcaattcctgcaaactcgtcaaccattgcttatatgcatcgcaaggatagtattattgcaagtttaatacttgataacttatcttcgatagacaataacctgaatgtttacggcaagattaacttcaattattcaaatgttatgaatgccactgaattttattcgacagagaaagatatttttaatcaagcgataaaatatctaaaaagaatggacttaggtcttgataatataatccttaaagaacaggaggtattagaaaaagaaacgggtgaaagaagaaaagagtttatgccctatggtgttcataaatgtgatggtaaaaaatttagggtgccattttatatggagtcaagtggtactcaggcgtgctattactttatattaacgctgatcattgccatacgagatggtggagtggcagtgattgatgagctagatagcgatctgcatcccaacatggtcgttgagctcttaagcatgtttgaaaatgaggcgataaacacgaaaaatgctcagctcattttcagctgccactcacccgaagtgcttaaaagccttaaaaaacatcatgtttatctagttgaaaaagatgatggtaagagtgaatgttggaggttggacgatgttaagggtctgcgtagccaagataatctatatagtaaatacataactggtgcgcttggtggtgtaccagatatttgtctgtga

SEQ ID NO: 169956 - DNA, 1215 bp, Enterobacter cloacae
ttgatttcatcttccgaaatacattcggaagatggatttatcgtcatcaaacttccaaatccttacaataaggatgaaaaaactagcctgcaagcttctttctctaaaattggttaccttaagtccgaagggatttttgaaggcgactcggcactctggttagacaaacgggcaaatttctggttcgaagggcactgccctttttactctaattatgagactttttggcagcgtgttcatagttcagaaaaactacctgactatttttatatagttagtaataaattatcccacttagacataaagtcgaataaaacacttaacattttcaatttgtatttcacatggaaaaaaatactccttagtttatccgatcatttcgctaatgatttttacgtttttttcttaatgaacgacaaaggtggagacaaaattgaaattgagtctgcactcgatttcaatgaacttcctgaaatcgatagtcctattgatgatctcaacatcgcctccaatctaattcagaagttagaatttgaagaccttcataaactagagcgccgttcagttatgcgggcaactctctacgaattaacgaagtcagcggacaaggacagcaatttactaaaaacgattattcaacagacaataatatttaacaaaaaatataatgagctgtacgaaatttacaccaaacgctattcggtcaataaacttcttaatgagctagatgaaaaaagcttagagttcacatcaaagataaatgaattcatatcttctagtcaaacaaaagcgctaacaataccaggagcgttaatcgctgtaggtgcattagctaaggtagacgcacctcttgaggcaattattattattgctggattatggatgatcaaacaagtaaacatttcctcaaatgaggtttacagagaggcattcacagccttaaacaataggctagataatgctttcaaaaagtacctaaccttccacaacgaacttgaagttaagcaaagcgcaagtgatatacaaaaggaactttccgagttaattaataaatccagcgtaagattaaaaactatcgatagattagcatcagctatgttttggggtgggttggtctatctgattgtaaaactctccagcagttatgcttatccaaaaataatacatttaatcgaacgaacaattacttcaacatgtaacttttttgccccataa

SEQ ID NO: 169957 - DNA, 1173 bp, Enterobacter cloacae
atgagcggattcgcttgtcaggaatgcgggaatgtcatagacgacattgaacaagattgtgaagtttgtggtgcaagtcccaatgtcgcaagaatcggaaaccagaacttcatggttgtgaatgcaatcacagcacatcttgaaaaagagaaaatttttgactttactatggggcagttatggaatcttacaactcccgtcgctacggaattcattactagaattgaaaaaaaatttcgtcgtaagaataaattccataattacttagtcaaagacacgcttcctaactcaatccctactctattatcaaaattcaacgcaggcaccattattttcgaaaaactttgtaagtctgtgatgaataaattgaaactaaactccaataacgagaacgttgtttcaaagttggttggtgggacattggtatttgtacattataaatctataaatgacgctgatgatttaggcaaactcttaatagtaatggtagataaacgcggagccttcgattttgaagagggtagtttacagcctaaacgtcttaaccctgtaaatacagatgctttacgccaagctgcgatgtttgatcttactttgttcgatgaatgttatcctgataacgatggtcattcttacgtggattttattcagggtaaatctcagagcgatgttttcaaagattctttaggttgtacccgagatgttgataacaaaagaagcattaatgaagttttccgagcaatagaaatgtttgtttcgtcaaactctttaggtagagcagtcagagaaaatgcagacattgccgtgaggaattttcttgacattaaatccagagacaatgtcgataaatcggttagcattgacgaaatacaagaagttattgataagtgtttacctaaaaaatccaaatacagaaccacattcaaagatttcgtctatgagaatgaatttaaaatagatgcacaatttgaaccaactatatactctgcgaaacaggcgcttaccataaaactcacagatgaggaccaaaacttcgaaataaaaatacttcgaggagcgattggagatgaaaattccaataaaccagttataataggcaaaagaaataacgaggtaatcattcgcctctcgccagatgagttttataaactgaaaaagtatgcagatgaataa

SEQ ID NO: 169958 - DNA, 456 bp, Enterobacter cloacae
atgagcaacatcgacaaaagcgcattacgtgaagccgccgaaatatatggagatgacgatattctggcgcttctggatgagctggaagccgtgcagaagacttccgcagcacgtcttggcgcgatagacactacgcacaagatgtttcagcgagaacgagacagagcagatgttgctgaaaaacgtagcgctgagctatctcagaaggctgatatctacgacatgttgcgacaagactatgggcttcagggctctctggttgattttgttgattggcagtcaaagaggattgctgggctggaggcgcgggaggttgtactgccgagtacgcaagatgttcacccattagggccacagtcggcgaaaattttttgtgagtttcaccggagtatcgtgaacagatgcgccgatgagattcgcaaggttggcgtcaaagtcagcatcaaggggaattag

SEQ ID NO: 169959 - DNA, 996 bp, Enterobacter cloacae
atggcgaccactgtaatagctgcctttaacgaatttatgaaagataccgtgaatctcaaaaaggcagataccgatgacgcacgtgcaagtcgcgactggcttatcggcaagattaatgattttgagaaggacggaacatttccggtgaaccatccggacatacatattccattcggctcttttgccagaaggactaaaatacgcccgcttgacgatatcgatctaatgctcgggttatctgcggaatcggcgacacacacgatatacagcgatcacataacgctgaattcttccggagaaaacacgcggctgcacctgtacaggcatactggagaaaataccatctgttctgtaaggatcctgaacgcctttaagaaccgactacaaggtgtttctcagtacgcacaggctgaaatcagacgtaatcaggaggccgttacgctcaatctcagcagtaaggactggaattttgacatcgtaccctgctttatgtctaccgcagatgcgtttggtaagaattattacctgatacctgacggcaaagggcactggaagaaaaccgatccccgaattgaccggaacagggtttcggaaatcaatgttaaaaatgacgggaatgtccttaacgtcatcagagcagttaaatactggcagcgacgacccacgatgcccgcaatgagctcctatctgcttgaaacaatgatactggattattatacaaacaagacaaactgctcaaagtttatcgatatggagcttcaggcccttttcaatcatctaggtctttttgttaagtattctgttaacgacccaaagggtattcagggcgatattaataccctgtcgatggaagctcgtcagaaaatttcggatagatgctatctcgatgctcagagggctgcagaagcgagacagttcgagagggatattgattatgaaaaatccatcaacaagtggcaggaagtgttcggccctcattttccagcttacgggtga

SEQ ID NO: 169960 - DNA, 1260 bp, Enterobacter cloacae
atggcaaataacaggaaaaatggtcacttgatctggaaccggcgtatcagtcagctccttcagcggctggaggaagcgaaggtagacgcggagtctttctggcaggaggtcagcttactggacgtgccggagatcagtaatatccccggcatcaggtttgaaagggacgtgacatttttatggcgtgcttcggggccacttcagggcgtgtatttacggctcaatcgagtgacggacaaaaacgccgtcaatacaggaatgataatgatgaggcaggtcagtaacaccaatatctggacactgacggtacgtttaccttcgcctttctgtggctcttattccgtggcggagatccccgcaggtatttccggacaggagtggtctctgctgggaagccgctcttcctctctgaaaagtttgcccgatccgctcaattgtagccccgggatcgtggttcggcataactccccggaatcggtgctcagccttggccatgctccgtcgatgaaagaatggcatcccctagggaacattatccgcggccgaatagtatctttcaacaaacctttgggtgaagcatcgtaccgcatgcggctttatatacctgacagaacttcctcctctcggatgggattgttgattttgcctgatgcagacatatggattgatcgtctgggccttctttttgcgctggaacaggccgcggaattcggccgcattccgcctgtggcggttattggtatagacagcccgggagaggcagaacgcgtcagctttttggacaaaggaaagtctctggttgcccggattgcggatactctgctgcctgaactgagaaaagactttcctctgcttcagaaaatccatcgatcaagaacggtgctggccggtcaaagtctgggtgggatccttgctctgatgggggcgtgccatgcgcccgacacttttgggctggtgctcagccattccccttcaatgtggtggcgaccgggcagaaacgtacggccggtggacttcccccgctcagagcagccatggattagcgaacagcttctgtatttacctcctcacaacgtccgtattcatcttgccgtaggttctcttgaaggagatacggtattccacgtcagccagctgcatcatcagcttgaatataccggaattaacagcagcgttgcggtctacactggggggcatgattatgcttggtggagaagtgcgctgattgacggcctcgcgttgttaaaacgtcagccgtag

SEQ ID NO: 169961 - DNA, 222 bp, Enterobacter cloacae
atgaaaaaagcattagccctgtccgtagttactgccgcaacattattaatagccgggtgtaccaagcatacctatagcattgtcacgcaggacgggagaaccattatcagcgagggaaaacctaaagaaaccagtgcaggattagtgggttttgtggatgccaacggtgtaaaacaacaaattaaccgagcagacgttaaagaaattacccagatcaggtaa

SEQ ID NO: 169962 - DNA, 636 bp, Enterobacter cloacae
atggaaaaatacatctattttattaacagtaaaaacatcagcattttactgacggatgatttctatctttttcatggtttgaaagaactaaccggcttacctctggttcatatgacttatgatggtattactcaaactcctgcaaccataaaaggaaaaggaaaaatccgtgtacttattgacgggcgaattttcagggagggtaactggcatggtttcaacaaactacaggaggccctggaaaaaggtgcagactggatctggctggatatatccgggcatggacggttttaccctgcaaattgtgaatatcatatctacgtcaatttaagaggtagcatacatgactcaatgttgtccctgtattctgcctacctgaggcgccggacaagtttgatttataatcattatccgcgccttactgagagggagttagatattctccagtgtctgcttgataacgagagcattgaggaaatacaaagcaagtttttaattggtgaaaaaacggcatcctgttaccgaagtcgaatagtgcagaagtttggatgtcggggatacggtatgtttttgcgatattacaggtacaacaaggatattatagacaaaaagtggaggtatgcatgtaagcagtaa

SEQ ID NO: 169963 - DNA, 390 bp, Enterobacter cloacae
atgcgtattttcaataattgttcaatgatttatctcctgtgtctctcaattatgaccttatctgtgaagactgatgcccgttctttttatgtgaagaattacagttttcctagctataccgaatttcacgggaaaattaagagtggtgaatttgatgaatatcatgtttttctgcagaagtctcagcccctcagaatggagatatccgataaacgctttgagatgagtatggtcggaccggaccacagagggagtagggttcgtacccttctggataaggacagtgttttcattgccccggcatccggtatgtataaaattattgtgaaaagtacgcatcgggatcaacagtgtaattgctatgtgctggctattaactttatgggttga

SEQ ID NO: 169964 - DNA, 468 bp, Enterobacter cloacae
atgtacagggggatcattgcgctctcacttctgttactggcagttgagagcattgctaaagataatataactattaatatgcttgctaataatccatcaacccgaatctgttttcttcagatggtgagggcgaataaattaccgacttgggttgtccgtaacgctgaaaattatcccacgcttgacatgaccattcgtaaggaccgctactatgtcatgaaagcctgcaatccggacaattgtgaacacgagcaaattgctgtcatctattcccctcagcggaatattatctctggcgtctactccatcacggacaggccagaacaacagtcgctgcagtggctcgggatcagtgatgaactgccagaagggaaggctttgctttttgctgcattgtcagggagcctcgtcaggcagctggagtacgtatcagaaatgaaaattcttcctcagacaacgggcgaatga

SEQ ID NO: 169965 - DNA, 573 bp, Enterobacter cloacae
atgacgcttctggcatcgcgcctcgaggaagtgaatgcgatggcgctggccggtgatttgcccgatgttgatatatcggataaaggcgtgaaaattaccccgctggataacagcgtcccttcagcagtatccccttttgccgatctggtttatggcatgctgcctcaccctaaaattacggaaatgctggatgaagtggacggctggaccggttttacccgccatttcacacatctcaaaaatcatcacgtcagacctaaagacagaaagttgttactgaccaccatcctggcggatggcatcaatcttgggctgacaaaaatggccgcatcctgtccaggaacgacaaaatcgtcacttgagggcattcaggcctggtacatcagagatgaaacctattcagcagcgctggccgatctggtcaatgctcagaaaaaacggcctttggcggcattctggggcgatggaacaacctcctcgtctgatgggcaaaattttagggtgggtagtcacgggcgttatgctggtcaggtcaatctgaaatacggtcaggagccaggcgtgcagatttaa

SEQ ID NO: 169966 - DNA, 804 bp, Enterobacter cloacae
gtgcgtgattccactcacgtacttgacggcttgctttatcacgaaagcgacctggaaatcacagagcattacaccgacacagcaggtttcactgagcatgttttcgcgctgatgcatctgcttggattcgcttttgcgccaaggatccgggatcttcatgacaagagactgtttattcatggtaaatccgagttgtatccggggcttcagtcaatcatctccacaaccagcctgctaaaggacattgaaacccactggaatgaggtgctgcgtctggtgagttcgataaagcagggaacggtaacagcatcactgatgatgaaaaagctggccagctatccgaaacagaatggtctggcaaaggcgctgagggaaattggtcgcatcgagaggtcattgttcatgctggactggttccgggatccatcgctacgtcgacgcgtacaggcaggcctgaataaaggtgaggtccgcaatgcccttgctcgggcagtttttatgcaccgactgggggaaatcagagatcggggactggaaaaccaaagctaccgggccagtggactgacgttgctgactgcggcgatctcactctggaatacggtatatatagaaagggccatagattctctgaagcgaaaagggatcccattcaatgaccaactgatttctcatctgtccccgctgggatgggaacacatcaacctgagtggggattatgtctggcgaacaaacctcaagctgggacaggggaaataccggtcattacgcttagtagatagcagtctgtacaaaaaacaggcttag

SEQ ID NO: 169967 - DNA, 702 bp, Enterobacter cloacae
atgaaactaaaaataagcttacaggatggttttagtaaaacatatctccctctccagttccgggcattctggaatgatgagggttactgttatcttaaagtgcaaatcattaatggaaagttaattttcctttgtgctcaattattgaattattacaacacctcaatcactaacgcagttgaaagtgtaagagaatcggcgatagaccagcttatcagggacggtgcattaaaaattcataataaaaatggcctctttgatgtatttaaatctcaacaacggaaaaataatgaatttgtaaaccaaatttatgagtacataaataacaactcaatatggatagaacattacgagtcatcaatgagcataacgtatgatgaccgtttcagcctggtgagttttgaagggaacaaaaaccctgtatggaggactgtggctaaagaaaagcttgaggagaaatttcctgcttttaatttcaatatatccagggatatgctggagagctggcgtgatgcacgccttaccactcagggtattaagaaattattgaaggaaaaaaactggacaatgaaggaagtcgcaactcgctggaaccgctccgaatcatggatgagtaaaatagtaaatgatgaagacagagaattgtactgggaggatgctttcagaggactcccctcaaaaataaatgaagtaattaattaa

SEQ ID NO: 169968 - DNA, 447 bp, Enterobacter cloacae
atgcttaagttagttgtcgcaagcttaactctgttatcagcaacttcctcgtttgctcataatgaaatttcgatcagcaaactcgcgacagatagtgagacaacaaaggcatttcacaagatgtcgaaggagcataacctgccagattgggtcatgaagggaggcactgaaactccggccagaaaggtaacgctggacagcaaagtctatcaacttgtatcttcatgtaaacctcatgattgtgcttcagaacagattgcgattctgtattcaccagaaggaaaaagcatgtccggagttttctctaaacaggctgccgaggaaaatcaacagaatctggtgtggctgaattccgagagtgaaatatcaatagacggtaagacagtgctttttgcagccctcagcggtagtcttgacaatcacccggatgcttttaattttaaataa

SEQ ID NO: 169969 - DNA, 414 bp, Enterobacter cloacae
atgagtgaacaacaggaaaagccatatgacgtcgataacgtccgggatggcgcagcgatggccagcaggacgtccagctggatgaaaggtggtttgctgggtttagcgggaatactggcgatgaccggtgtggcatacgtgacggcgaaagccgtcaccccggagatcgtggttttcgatatgaaagacacgattgatcttttcatgcagcagtccgcccagttgcagcttgatgaagacaaggcccggacgttgacgaagcgctttaatactgcgctgaccgacagtctgggggaatggcaggcttcacataatgccatcatcctggtgaaaccggcggtgatgagttcacagcgtgatatcaccagcgagatccggaccgatgttgcgcgacgcatccagggggggcagtga

SEQ ID NO: 169970 - DNA, 723 bp, Enterobacter cloacae
atgtggcaggaatcggttatcaggattgccgatgatatggcaacgttaagttgttcgattattccggcgcatccgtgggtgtatgggctgggccagtctgcggattctggcggatatctaagtccggctaacgcgcttggatatctggcgggcaaactggcatccagcagtggaagcggagacgtgatcgtgatgatggtcgctgaaaatacccatactgcgtttatgaatgccctgaaaaaccttgccacggtctttccggcccccgtttttacccaggtaagccgaattgccgacgcggcggcgaaattaagcacggtaaaaatgcaacttccttccaaagcgaatttgcttccggtcgccgcgccgttgtctgtgtccactaaccgtttagcggtgaatgcgcagcgtgtagctgccgcacagcttgcggcagccataccgacaaacatcacagcgttacaaagtcagattgccggtttcgttcaggagcgggcaagcctgcttaattcgctgagccagtcactggatgaattgaagggggccagcgctaagattttatcttttagatacacaggaacccatcgcggtgccgctggggagttattaaaaaatatcccccgaactactgccgtacacacggcggcaacgttgtttattggcgattcactatcagacttaggaaaaatgatccatgagccagaccgcgctactggcgcttaa

SEQ ID NO: 169971 - DNA, 519 bp, Enterobacter cloacae
atgatgttgatgaaaaattttaccgcaacggctaaacagatgggtgatatttcagtcctggtattcaccgataaagaaggtaatgactggtatgaatctcagagcaaattttcacccaccagtctgaaattcatgtttgacgagaacgggatcattatcgctgcgtcgtgggatgtttcgatgcttgcccctgaaaatttatcggttgctgaagtgcgcaaagccagcgtcccggcgacattcttcgatccgggtacacgctgggtgtttgatggtaaaaaaatcatcccgtttgtttatagccaggaagaactacagcaacaggccgaggaaagtcgcgagcagttactgagtgaggcgaaagaacaaatcattgtgcctcagaccaaattaatgaccggacgcacgctgacagactcgcaattaaacacgctgaatagctggctggattatatcgacaagctggaaagcctggacaccacagtattacccgttatctggccggaggtaccgcagtaa

SEQ ID NO: 169972 - DNA, 2301 bp, Enterobacter cloacae
atgtcacaggctgtaattacaaaagcatttaccgaatggaaagcacagcaggctatagataataagcccgtactgctggatgagtttatttttgcctttatccccggtctggatgttgataagccaattgctaacaccgaaaccacaccgggcgcggataaaattgtacaccgtcaggcggtcagtaagtcaggcgtggtgaacggtaattccgttgtttactccgtgacgctgggcgcggatgtcggggacttcgatttcaactggatcggcctttcgaataaagcaaccggcacgctggcgatgattattcacgcgccaacgcagcgaaaaatcaaaaatgccagcggccagcagggcaacgtcctggtgagatccatgctgatggaatacagcggagcgcaggcggcaaccaatatcactacgcccgcagagacgtggcagattgattttaccgcccgactggcttctatggatgagcgccagcgcctggagaatatcgatctgtatggtgcggcagcgttttttgatgccggttacctggttgataaaagcggcactcagtattttgtcacgaaaggcgcgggttacgttgccgggttacgcactgaactggccgcaaaccagaatatcgctgtatcaacgaagccggtaaaagtctggctggatgtgtcatggtcgggaacgttaacaagcgaatggaccgtgaaaagcaaaatcacggtagccgcgaatcttgccaattatgtggaaaatggcagtcagcattatgtgtttgcactggcgagcatcgacgcaaatggaaatattaccgatctccgccctgccggtggactggctgaccaggcgttaaaggcgcatgaaaaatcgcgcaaccaccctgacgcaacgactaccgaaaagggtttcacaaagctgagtagtgcagtggatagcacttcggaagcattggccgcaacaccgaaagcggttaaagcaacctatgacaaagcaaaggccgcagacgataacgcaaacacacgggtaccacttacgcgaaaaattaacggccatgcgctatcaactgatactgatattttgcccggtgatatttttaaactctcagtgggcattggtggcggtgcggatttaaatgattacatcgcgccggggttgtatttccaggccgcgaacgctcaagccgctactgggacaaattatcctgagccaaacgcggggtcacttgaggtttataaacacgctggctttacgcagatctaccggatttatagtaattcccggtcatacattcgcacgatgtataacggaacgtggtcagcttggacaaagcagtatgatgcggcaaacaaaccgtctcctgcggacatcaatgccgtaaacaaaagcggcgacacaatgacggggctgttaaaagttaatgccgaagtgcaatctgcttccgttaacagttaccgcattgtatacggcgattacggcacattctggcgtaatgacagtaataatctttatctgatgttgactaataagggcgatgcctatggtacttacaattccttacgcccttttcggataagcctctcaacaggcggagtgcaaattgaaacgcccctttcggtagtcaacaccatttatgccgataaagatgtgactgcaggttatagcgattcatttatgtggacgcagcagtacaacacaaaagcaccattttttaactcttactctgcggtatcaggtgcaagcgaatatcacccggcagtaaaacagagagcatctattgcaggtgttaactcctgggctttttcaatgggttcgcttgtttccgggaccgatctttcatggcatctgcacatgaaaggcagtggcgtccaggacattaattacaaatgggataccagcggtaacttttacgcacctgggcaaatatctccgggtaattacaccaattttgaccagcgctattacaccaaagcccaatcggacgctgggtatatggctaagactagcgcatatacgaaagcagaaagtgaagcacgttatcagcctaaaggaaattacaccccggcagggcaggcttatacgaaagccgaaagcgaggcgcgttatcaggcaaaaggtagttacgttaccggcgttcgtcttggtgcatcggctgaatatcaggagcgcggaaatagtgagcgcatggctggcggcgtgatgacgtcatttgctgaccgggggagttctaattattgggtccgacttcgcccgcttcagtatcagattaatggtggttcgtgggttactgcggcctacgcataa

SEQ ID NO: 169973 - DNA, 2202 bp, Enterobacter cloacae
atgagccacctggattttacgctgagcctgattgataagctgacgcggccattaaaaacggcccagtcttcgctgactggctttgccgaaaaatcgcaggcgtcttttgcaaaaatcggtatcggtgcggcggcggtatggggtgttgcccagtccatcgcgggcgtggttggccccgcgtatgaaatgaatgctgcgctttcggaagtgggggccaaaggcgtggcagaagacacgctcaagcgactttccagcgaggccctgaaattcagtgttcgctacggcaaaagcgcggttgatgtggtgaattcaagctatgcgatgaaaggcgcaatggctggcctctctgatgccgacttgccacgcgtgacagtggcggccaacaccctggcggcaggtgtaaaagccagcggcgaggaagcgggtgaatatatcggcgcgatggcatcccgcttcaacgcggaattgtccagcctgggcaatgtcaggtttgccgaagaactggccgggaaaacggcctacatggtgcaaaacttcggcgtgaaaatgcagaccatgcaggagcttattgagggcaccaaaaacgccggtgctgattttggcgtcagcatggatgaacagttcgcggtgctgggtacgctttcgcgcaccctgggcacagagtccagcggcatttacgagcagtttttgcgaagcgcaccggcagcggctgaaaagctgggcatgagctttgttgatgcgaccggcaaaatgctgccaatgggcgatattctgcaaaagctacaagataaatacggggcaagcattgaagggaacgtaaaggcccagcaggcactggacgcggcttttggtggtggcgctgatgtcatcaaaaaactgtacggccagcaaaacaccctgaaccgcagcatcacagagctggggcgcaatgacggcatgaaacgcgcccaggaaatggccgaacgtatggcgaaaccgtgggaacgtatcgtcgcgacgttttacgccatgcgcgtggccctgggcaatacgctgatcccgatactgacgccaatgatgaaccgcgttgccgacgtgggggcgaagtttgcccgctggctggaaatgttccccaacattgcccgctggctgggttacatcaccctgggcgtgttgtctttcggtctggcaggtgcggccactaacattgtgatgggcatcttcggattcactatgacaggcctgagcggaattgcgaaagtcctgaatagtgcctggaaaggcctgttatggacgctgaacatactgcgcccgtcattgctgacgacccgcattggtctggccgcgctgtggatccagtcaaaactgttagccctttggacgggagtttgccgcgttgcgctggccgcctggaacatcgcactgaaagccggagccgttgccatgcgtgtgtatgccgtggcaaccacgtttgccggtgtggcaatgcaactgctgaccagtcccataacgctgatcattgccgcgctggccctgctggccgctggggtgtggtacgtcgtaacccactgggaagaactgaaagcggcagtgatgaatactgaggccttttcctgggtgatgagcgttgccgcgcaggtcggccaggtattttccagcgtctggcaatccatcactgacggctgggccgtggtggttgcgttctttgctggcctgtcaccgctggcctcttttgaagggtttgcggaaaccatcggcggcgtgttcagaaaacttttcgacactctgaaaaatacgtttgcatccacttataactggattgccgagaagttaaacaaaatccccggggtcaatatcgatctcaaaactacggcgcagccgccaggagtagatcccgcaggggtgaagttgccagccggagccggggttgcaccaaccgcattacccccaggcgccgggatggtccctgctgtcactgaaataccggcacacaccgttattactgatcgtgctgcagagccgccagcgctgaatgccccgtcattgctgacgggtaacaaaattaatgcagatatcccacggggaggcctgataagccaggtgaaatccgacaataagaccgttgtggatagccgtaagacgtggggcgacacctacattaacgccccgaatggaattaccccggcccagttggccgaatggcaggagcttaacgccggatga

SEQ ID NO: 169974 - DNA, 720 bp, Enterobacter cloacae
atgacgtatctgggaagcaaggccgcaagcggcgtctatcaaaaaataattgcggaaatgccgccgcatgatacctacatcgaaacgcacctgggcagcggcgcggttatgtttttcaagcctccagcattacgcaattatggtgctgatcgtgacgtcatggcgcgagtgaaaaccttgcaacgctgggtagacaaaggcctgaagccaccacgtcttgattttttccatggtgatgcggtgcattttcttaaaagcctggtgcgtcctggtgcgcgtgatggcactagcggcttcgaaaagctggggcgcgtacttatctattgcgatccgccatacctgccagcaacccggaccagccgcgcccgttatcggttcgaatataccgttgatgatcatgtccggttgctggaatgccttaaaaccttgccggataatgtaagcgttattttatcgggctacccatcagacctttatgacagcatgttgccggactggcgctgtcgggagtttcaggcaatgacgcgcggaggggttcggacggaaaaaatctggatgaactttgcagagggtaaagcatacacccatgcctttgccggtaaggattacaacgacagggcaaggataaaacgaaaggttgcccgctggcgggataagttcgccgccttgcctcctgctgaacggctggcgatcatgacggccctttgtgaagttgaataa

SEQ ID NO: 169975 - DNA, 294 bp, Enterobacter cloacae
atgaatcttgctcaaaaattgcgagctatcagaaaagcagaaggactaacacagtctaaattctgtgaaatcagcgggatagcgttaggcacgctaaagaactatgaaggaggtcatcaagaaccaggcatacaggtcatcatgcaggtaacgaatacgacgcaatttgaaaaatacaccctgtggttaatgactgataagacagcacctgaatccggacaaattagcccggtcgtcgcacactgtgggcaagaagaaacaacctcgtcaccctcaggccgcaaaattggctaa

SEQ ID NO: 169976 - DNA, 330 bp, Enterobacter cloacae
atgacgagtaacagcataaataacatccgttttgttggtcgtggtgccactatagaccacctggggaaggaattaaacaacgctcattttgagaccaaacgcggccccagatttttttcggcatcctcaaccacccttgaatatgtgcaggtgattgtaccggttgcaacatcagcgataagcgccctggccgcgattattatcgctaaagcgaaatacgggaaaattaaggttcaataccgcgatgggcccgtgtctgaggttacggctaacaataccaaagaggtagaagacattctgagggcagcaaaagaaatccatttggattga

SEQ ID NO: 169977 - DNA, 909 bp, Enterobacter cloacae
ttggaactcagactactgcgctatttcgttgcggtcgcggaagaactgcatttcgcgcgagcggccgagcgccttggcgtagaacaatcgcctgtgtcgcgcgcaatgcgcaatctcgaagccacgctcggcgtgcagttgttcgaccgcagcgcgcaccagacgcgactgacctgggccggtcaagtgttcctcggtgagtgccggcgtgtgctggccaccgtggagcaggcggtgagtgccgcaaaggcggcggcgcagggctatcagggttatctgcgcatcgccatctgcgacagcttggcgcagccccacattgccaccttgctggcgcgcagccgcgaggaagagcccgaactggagattcgcgtcttcgagctgcctttcgcgcagcagctcaagggcctgcacaacgatctgctggacatcggctttgcgctgtcggacgcggtgagcgaaggccttgtcgccgagcccgtgtggaccgatcctctgtcggtgatcgtgcccgtgcgccaccccttgttggcgcacgcggaagtgccattggatgaagccttgaagtttccgttggtactgtgccatccggacgcgggatcgggctgccaccaccagatccaggcggtgcttcaaggtgcgtccaagccgctcaagctggtagatcaggtgacgagcctaggcgtgatgctgactctggtcggtgccggttatggcctaggtttcgccattgcctcgcaggtgcagaccctgaaccgccccgacataaccgttcgccccttggccggcacgccgcccatgctgtctacctacctgctgcgccgcagcgccgaaccctctgagcccatgaagcggtttctgcagcgcgcccgcgaggagttcctgccaaagggagatgaaccggcctcgtga

SEQ ID NO: 169978 - DNA, 612 bp, Enterobacter cloacae
atgaatacagacaccatcaccgattccagtgcggatgagcccaccaaaacactgtgttcattgaccgaaaattggtggatttttgcgttgcgcggtgtcttggcattgattttcgcagcccttgcgttctggatgccacaatcggctctgttggccatgaccttagtgttcggcgcattttccttggtcaatggcgctttcaacttggttgcagcggtgcgccatatccagaaaaaagagcgctggggctggctgctgttcagcggcattgtcggcatacttaccggcgtcgtcgtcctggttgctccttgggtcgccacgatggtcatggcttcttttttatgggctagcgtggggttctgggcgattttcaccggtgtgctggagatatccgccgccgttcggctgcgtcaagaaatcaagggtgaaatctggcttgccttcagtggactgctctcgattgtccttggcgctatcgtcttgtggatatttttttcccgtccggtcgagtcattcctggccgcaggctggctgttgggcttctatgcggcagtctatggtgtcacgcttttgttcttgagttggcgtcttcgcaaaacgcgccagggataa

SEQ ID NO: 169979 - DNA, 1431 bp, Enterobacter cloacae
gtgtccgaccccaacgggctgacatgggcagccaccctcgtgtcgctggcggtcgctatccccacagcggggcacgcggtcatctacaagcgtgaccctcgatcggccacgctgtgggtactgctgatcgccttgttgccgctgggcggttcgctgctgtatgggctgttcggcatcaaccgttaccagcggcgggcgcggcggctcttcccgggggcagatcctgctgttcggcaggacctctcgcccacgatgcccgaggctgtatcgccgccgcttgccggtctggcccacctggtgggacgcgccaccggccagtcgctgaccagcggcaaccgcatcgagccgcttgtcgatggcgagcaggcctacccggccatgctcgccgccatcgaatcggcgcggtacagcgtcgccttggcctcgtacatcttcgacagccaaggcatcggggcgcagttcgtcgatgcgctgcgccgggctcatgagcgcggcgtgcaagtgcgggtgctgatcgacgacgtgtatgcccgctggacgccccgcagcgcctaccgcgccttgcagcgcgccggcgttccggcggcgacgttcaacccgacgttgattcccgcgcgcctgcatgccgcgcatctgcgcaatcaccgcaagctgctggtgatcgatggcgagacgggtttcaccggcggcatgaacatcttcagcccgtattggcggcccgatgcgccgggccgggcctgtcacgatttgcactttcgtctgcgcgggccggtggttgcgcatctgatgcggtgcttcaccgacgattggtgcgataccacgggcgagcggctcaacgagggtctctggggcgaaccgcccgcaacggctgatgagcaaggaacctcttgggcgcgcggcatcgaggccggtcccgatgaggccctggaccggctgcgctggaccttcatgggcgctttgagcgcggcgaagcattcggtgcgcatctggacaccttacttcgtgcccgatcagccgatgatcgcggcgctaagcacggccgcgttgcgcggcgtgcgtatcgacgtgctgacgcccgcaaacggcgaccatcccacggtgcaatgggccgcacgcgcccactactggcaggtgctggagcacggtatgcgcatcttcgaacggccgggcccgttcgaccacagcaagctgatgctgatagacggccagtggtgctgcctgggttcggccaattgggatgcgcgcagcctgcgcctcaacttcgagttcaatgtggaggtgtacgacaccgcgctgtctacgcggctggaatccctttttgatgccgcccgtgatgcatcgaacgagatatcggccatggcgttgcgcgcccgcccgctggccatccgcttgcgcgacggggtggcccgtctgttcacccccattctctag

SEQ ID NO: 169980 - DNA, 570 bp, Enterobacter cloacae
atggacattgatttcaagaaattggctccctggaactggttcaaaaaggagcaggaagaacaacagagcactgcctcgctgccggtgcagcgcaatgacctgccggtggcgggtgggcccgtcagtcccatcctgcaattgcatcgcgagatcgaccgcctgttcgacgacgcgtttcgaggcttcggtttcccgacgctggccatgccacgctggccgtcggactggccgggcatgctgaagccggcgctggacatccaggagaccgacaagcagtacaagatcgccctggaagtacccggcatcgaggaaaaagacatccagatcacgctcgacaacgacgtgctgctggtgcgcggtgaaaagcgtcaggagcaggaaagcaaagacggtggtttccaccgggtggagcgctcctacggcagctttcagcgcgctctgaatctgccggccgatgccaaccaggacacgatcaaggccgctttcaagaacggcgtgctcacgatcacgatggaaaagcgcgaggccagtacgcccaagcaggggcgctcgatcccgatcaacggctga

SEQ ID NO: 169981 - DNA, 378 bp, Enterobacter cloacae
gtggatgcgcgcgtggtggttgccaaggcgctggccgctgacaagtttgcggcctggtgcgtggagctgcctcccggctgcctggtggccctggaggcctgcggcggtgcgcatcactgggcacgcaagctgcgcggctatgggctggatgcgcggctgattgcaggccacttcgtcacgcgctaccgcatggccggcaagggacgcaagaacggtgcggccgatgccgcagcgatctgcgaggcggcaacccgcccgcacatgcgcttcgtgccggtgaagccgccggcgcagacgctgctgaccacccatcagctgcgcaaacctcccgattcactcacgcagctgattcctgcttgcctagggacgaccgtgtaa

SEQ ID NO: 169982 - DNA, 552 bp, Enterobacter cloacae
atgtcagcgcctacggcgaagctctcgttcgagatcgcccagctgcgacgcctgaagttcggcaagaagagcgagcagctcgatgccgaacaacgcgcgctgttcgacgaggctctggacgccgaccttgccgcggctgaggcgcagctccaggaactgctgggcaagaagaagccgccggctacgcctggcgcgatgcctaagcgcaccgccttgccggcggacctgccgcgcgtggactgccaccacgagcccgagaacactcgctgcgcgtgcggctgtgcgctcaagcgcatcagcgagaagctggacaacacaccgggcgtattcacggtagagtgccacatccgcggcaagtggacctgcgcacaggtgccgaacgctgacccaggcgccagtcccggcggagatcatcgccaagggcatccccacctccgggctgctcacgtaggtgctggtcgcaaaggactccgaccatctgccgcttacacggtcgtccctaggcaagcaggaatcagctgcgtgagtgaatcgggaggtttgcgcagctga

SEQ ID NO: 169983 - DNA, 909 bp, Enterobacter cloacae
atgaacttacgccatcttcgctgcttcatcgccgtagccgaggaactgcacttcggccgggctgctcgacggctgcacatcgaacagtctccactgtcgcgcacgatccgccagatggaggcggatttaggggtgccgctgctcaaccgcttgccacgcagtgttcgtctcacaccggcgggacaggtcttcctcgaagaagcccggcgcgtactgctggccttcgagcaagcgcagaccaaggcacgcgccgcagcgaaccagcggaacacgctgcgcatcgcactatctggtgacatggggcaggcccgcttgtcggcgttgcttgcgctttgccgcgaggaggcaccacaggtcggcattcggatatttgaaacgccactggcgcagttggtgactggactgcgcaacgacttgtatgacgcaggttttgcattggctggtgaaatggacgccggcatcgtcgccatgccggtgtggcgagacccgctggtggtggctttgcccgccaggcatccgctgctggctttcaaggaagtgccgctggaggaagtggcgagctatccgctggtgctgtgcgatccccaggtctgcgaaggttgcagccggcagcgcgaacggctgctccgcacggtggatgcgcagccgacggtagccgagtacgtcaagacccattccctgatgctggccctcgtggccgccggctacggcgtgggcttttcgagcgcggcgcatctggcgggttgccatcaggccgatgtcgtcgtgcggccgctggccgacgagaccgcttcgctgacgacctatctactgcgacccgaaggcgaaatcatggagccgctgcggcagttcatcgaccgcgtggagcgtgtcggacgcccgcaaggcaccgatcaacgcccgatgtga

SEQ ID NO: 169984 - DNA, 759 bp, Enterobacter cloacae
atgccgaaatcgagcagccacgcctttggcgcaaagacgtactaccgaccgatcgaggcggccgtccgctggtgcggtctcctgcgcttcgagcagcgtattctggaagcgctggagcagcgtgccatgccggagcccggcgaattcccgcgctggccgctgctgcgcctgtatgccgagcgcatcttcgacgcgctgacgcatggcgaattgcccggtggcaaggccggcatcgtgctggactcgcagcggccggcgctcgacgaccccgagctgaccgtgcgccacgtggacttgaaagcgtggatgtcgcagttctaccccggcgatcggccggggtttttgtttgacggcatcgaacgcgcggtgcatccggcggtgagcgtggacacgctcaacattctgctggccgatcgcgaagcagcgaagtcgcaacttgccgaacttgccctggtgcatgaaacgctgcgcaccgcgcacgaagcactggcgaaggaacatgccacgcgcgcggccaacgacgaacaggcgcgcgagcctggcctgcgcagcgagacgacttacctcaacatcatcggcggactgctgacgctgctgctgggcaattcgccgtcaggcgcggcctattcgtcgttccgcagcatggatgccgtggtcagcgcgctgatcgcacaccatgaggggcggccgggtctcagcgagcggacgctgtggagcaagctcgcgcaggcgcggcgccacctggaggcgtcgcgctga

SEQ ID NO: 169985 - DNA, 219 bp, Enterobacter cloacae
atgtcttcgcagaccaccgcgccggcagtgccggccgagcaccgcatcctgcgtcgcgccgaagtcgaggccaaaaccggcttcaagcgcgcgcatatctacagcctgatgaaagaaggcaagttccccaaggcgctgcgcttgggcgtgcgcgccgtgggctgggactcggcggaggtcgagcaatggatcgccgatcgcctcgatgagcgcgcctga

SEQ ID NO: 169986 - DNA, 867 bp, Enterobacter cloacae
atgcaggtggtgtccatcatttcgaccaagggcggcgtcggcaagaccacgacggcggccaacctgggcggcttcgcagccgacaccgggctgcgcgtgctgctgctggacctggacgtgcagcccacgctgtcgagctacttcacgctggccgagcgcgcgccggccgggatctacgagatgctggcctacaacgagcagcgcgccgagcaactggtgtcgcgcaccgcgatcgagcggcttgacctggtgctctcgaacgacgaccgcggcgagctgaacacgctgctgctgcacgcgcccgatggcagattgcggctgcgccacctgctgcccacgctggcgccgcactacgacctgctgctgatcgacacccagggcgcgcgcagcgtgctgctggagatggcggtgctggcctcgaacttggcgctttcgccggtgacgccggaaatcctcgcggcgcgcgagctgcggcgcggcacgctgcaactcatcgaggacatcgcgccgtaccgccacctcggcatcgagccgccgccgctgcacctgctcatcaaccgcgtgcatccggtgtcgtcgaatgcgcggctgatccagcaggcgctgcgtcaggtattccaggagcagcctggcgtgcgcgtgctggacaccgacgtgccggcgattgaagcctatccgcgcgccgcgacgcgcggactgccggtgcatcgggtggaataccgccagccggcgggccgcacggcacctgccgcattggagaccatgcgcgcgctggccggcgagctgttcccggcgtggcaggagcgctttgcgctcgtcaccggccgaggcgacgcgggaggggccggccatggccagcgcacatga

SEQ ID NO: 169987 - DNA, 258 bp, Enterobacter cloacae
atggccagcgcacatgacctggcccgcggccacaagcggctgcgagggctgatcgagttcgccctgggagaaggttggaaggtggtgcgcacccgcggcgggcacctgctgttcacgaagcaaggctgcgcgccgatctacaccagctcgacggcgagcgaccaccgcgccgagcgcaacgcccgtgcgcagcttcgccgcgccgaccgacaggcggcccagggtgttgcagcatctcaggagaatggccgtggctga

SEQ ID NO: 169988 - DNA, 1662 bp, Enterobacter cloacae
gtggctgacctgacgccgcaggacatggccgccaatctgctggcctcgggcttcgagcgcaacggcccttcggtcgcggccctgagcgaccccatcgccgacacgccgatggtggtgacgctggaccagttgcgcccctacgaccacgacccgcgcgtgacgcgcaacccggcctacgaggacatcaaggcctcgatccgcgaacgcgggctcgatgcgccgcccgcgatcacgcgccggcccggcgaaccgcactacatcatccgcaacggcggcaacacgcgcctggcgatcctgcgcgagctgtggagcgagacgaaagacgaacggttcttccgcatcccctgcctgttccgcccgtggccgcagcgcggcgaagtggtgatgctgaccgggcacctggccgagaacgagttgcgcggcgggctcagcttcatcgagcgggccttgggcgtggagaaggcgcgcgagttctacgagcaggaaatggggcgggacagcggccagccgctgtcgcagagcgagctggcgcggcggcttacggccgatggcttcccgctgccgcagtcgcacatcagccgcatgcaggacgccgtgcactacctgctcccggcgatccccacgctgctgtacggcgggctcggccggcatcaggtggaacggctcgcggtgctgcgcaaggcctgcgaacgcacctgggagcggcatgccctgaggcgcaacctgtcgatggacttcgctacgctgttccaggacctgctggcgcagttcgacacgcagcccgacaacttctcaccgcagcgtgtgcaggacgagctggtcggccagatggccgagctgctggaagcggactacgacacgctgagcctggaaatcgacgacagcgagagccggcagcgcgcattgaccagcgatcctgcgccgctgcaggcggcaagacctgcggtgccggccgggccaccgcgaccaccgtcaccgccttcgctgccgcccggcccctcggtgcagtcgtcggagcctggccctggccaggctgcgcaggccggttccacgccggccgccagcgacaagggcatgcagcaggatgacgaacgcctgcagggtcacatcgtgtccccggccccgaccaccgaacgcctgcaatccatccagcgcatggtggccgatcagatgggcgacaagctgcccgacttcgaggccgacgcgctgcgcgcgatccctgtgcaggcgggcgggctctaccccatctcggatgtctggtacatcgagcccggcctggatgtgccggatcggctgcgggtgcacatcgcacagttcgcgcgcgagatcgccgaggaagccgacgtggccgggcaggtcgaacccagcgaaggcggcatgggcttcgtctgcgtggcgcccccggcggtgcgcgcattgcctccgttcgcgtgtgcggtgctgaccttgctgcatgcgctgtgcgccgcgccccgacccgcccccggcttcgatggcgcccggctggccgacgaccttgcggccttgctgcatggcggcggcgcatatccgcgcctgagcgatgccgggctggtaaagctgttccggctgctgcgcatggcgcgccggctgctggatctggagaccggcgcggccttcagcaaccccggccacggcgcctga

SEQ ID NO: 169989 - DNA, 561 bp, Enterobacter cloacae
atgtcggcaccgcatccgctcaaccaggccgtcatcgcacaggcgctgcacgacctgcgcaatgggcaactgcggcgctgcaaggcgatgggcttcggcgaggaggagctggacgcgctcaagcaccccgaactcgtgagcatgctggtgaacgccacggtgtcgtggtgttcggtgtcggtgaaccgcgatgtgctgaagcggctgctgagccaagtgcacgacgtggagcgagagatcgcgacggtcgaccgcatgctgcgcctgggcgccagcacggagatggtcagccgcttctacgggcttacgcaccaggaggtggccctgcgccgcgacatcctcggcctgcccaagcgcaaggggcggcatccggtgctggacgaggcgcaggacacggcgctgtggaagcagtggaaggccggcgtcatggagcgcggcatcgcgctggacgatgaggtggcgatgctgacgctgaccatggacctggccgagaccttgaacctgccgatgtcggtgatctggtcggcgatacgcaactggatcgaccaggggctggtgtag

SEQ ID NO: 169990 - DNA, 1251 bp, Enterobacter cloacae
atggcgaccggcggcgcaccccggcgcgatggccccgtggcgctgtcggcactgttcgacgacgcgctgcgggaactggtgccacgggcaccaccgacaccgccagccccgcgcggcgctgctgctgcattgccggccgcgccggtcagcgacggcttcctctacagcggcaaccggcacgagagcgtgccgcgtgcgctgttcctcgaccggcgcctgacgccgctggagcgcaacgcctggcaggtgctccgcctgcagctccagagcgacggcgtgacggcgttcccgacctacgaccagcttcgcccctacctcgcctcgatgccctgcgcggcgcaggcctcgcacgagaccgtggcgcgcgccttgacgctgctgcggctgacgcgctggctgagcctggtgcgacggcgccgcgacccgaagaccgggcgcatcctgagcaacctctacgtgctgcacgacgaaccgctgacacccttcgaggcgatgcagctcgaccccgactacctcggcctggtcagccaggcgctgacccatgcggcgaaggcggtgcagatcgtcggcatgaacaccctgcgcgagatcgccgaagacccgatgctcaacggccgcacgctgcccacgcggctgcaggtgctggcacagcgcatggcgcgcaacgaatgggcggacgcgagttatccacaagcgcctgtggatcacgaatccgaagaaggccaggacggcctgcttcggaatctcgaaggcccgtcttcggaatccgaagcagggctgaaatccgcgccagacggctcacttcggaatccgaaggaggaccgtactgtacgtatggatcgtataaatcaagtacgtacagtaccgcgcgcgaagtcgttgcagcacctgcgcctgcccgagcgcctgctgcgcttgaaggacgagcagcaaagcggcgcgatggtggccttgcagcaggtggacgagtcgctgcggcaggcggtgttggacgaatgggatgcgcgctgccgcaaaagcgcggtacgcaacccggccggctatctgttcggcatcatccagaaggcgatgcgcggcgagttcaaggcctgggccggcgaaggcggttcgccatcgacgccgcctgcgccgccgccacggccagccgcaccggcaccgtctgcaccgccaccgcccgcgccgaacggccctggccgcgaggcagcgcgggcctacctggcgaaactgcgttcaaccctgggcgattcctga

SEQ ID NO: 169991 - DNA, 780 bp, Enterobacter cloacae
atggccaatgaatcccagccgcccctgcagttgaatctcggatcgctgcgcagcgcgatgtcgctgacgctgcacacccaccacgcttcacgcatctggcatggccgagcgcctgccgagggccggcccgggatcatcggcctgaacggctacatcagcgtgatgaacaagatgaagcgcggcgccgagcaggacgatccctactcggatttctggatgctgcgcatcgaggacaagctgacgcagaccaaggacagcttgcaggcgctgcgtgagcaggtggaccaggcgctggccgacgtgccgcccgcgctgtcgctgggcgagaacatgaacgtgcagcccgtgaagctgccgctgttcgtcaatgcgcagctcggcttcatagcggtgtacctgctggccgactacgacgacctggcccgcaagctgatcctcgcccaccacaccgcgctgatcgaccgcagcacgctggaacgctggctcaacgacggcgcgcatgcgctgcgcagcctgttctcgctggcacagcagtaccgctactccggcgcgacgcgcgacgacttcgcctcgaagaacgcggtggcgcgggcggcgctggagaagttcggcgagttgccgcaggacgtgctcgaaggcacgcgccgctcgcgctttgcgccaccgatcgcacggcggtcgggcaagcctggtaaagccgcggatgccgcacccagcgctggcgcagccgacgtggcggacgacgaccacgaccatgacggcgaaggcacgaaggcatga

SEQ ID NO: 169992 - DNA, 552 bp, Enterobacter cloacae
atgacagcatcgtcttccaacggccaaccggcgcgcttcctgccgctggaacaggcggacttccagcgcctggaacacggctcctacctaaaaggccttttacagccttttaaaggtaaggggagtctggaggcctgggccaaccagtgcacggcgctgcgcgacgacttaatcgggctggcgcagcggcgcgtgctgcaacaggcgcgggcctaccccttctcgctgctcgacgtgcaactggcccagcagaccactggcgcaggcacgaccttcctgcgctggcgcaaccacgaccgttcttccatgggcgtggcgctgtgggaatcgctgctcgaccgcccggcgacgccggcctcgctgatcgacgacctgtacgcgatggagctgcagcgcatcgctttgaacatgcagatcagcctccttcacacgctgggccgccaggcccaggagtgcgccagcaaggccgcgcaggccgaagcggcttacctgcgacgtgtccacgggcatgccgcgtcggttccatccaccacccccaaggagtctccatga

SEQ ID NO: 169993 - DNA, 450 bp, Enterobacter cloacae
atgagcacgcacttcgtcggcgagggcaacatcggttccgcgccggactatcgcgaattccctaacggcaacgacgagccgcgccggctgctgcgcctgaacgtctacttcgacaacccgatcccaaagaaggacggtgaattcgaggaccgcggcggcttctgggcgccggtggagctgtggcaccgcgacgccgaccactggaaagacctgtaccagaagggcatgcgcgtgctggtagaaggccgcacggtgaaggacgagtgggaggacgccgacgacaacgagcgcacgaccttcaagatcgaggcccgccgcatcggcattctgccgtaccgcatccaggccgtgaccctcagcgccaggacgctggaacccgaggccgcagtaccgccgccgaaggagaccaaggggacgaaggcgtcgaaggaaaccaaggccaagggctga

SEQ ID NO: 169994 - DNA, 2016 bp, Enterobacter cloacae
atgcgcgtgttcctgtgcgagaagccgtcccagggcaaggacatcgcccgtgtgctgggcgccggccaacgcggcaacggctgctacagcggtgcgggtgtcgtcgtgacctggtgcatcggtcatctggtcgaagcggttccgcccgaaggctacggcgagcagtacaagcgctggggcatcgagcaactgcctattcttcccgagcgttggcgtgtcgagcccaaggcggcgaccgcggcgcagttcaaggtcgtgcagcagctcgtcgccaaggcgggcgaactggtgatcgcgaccgacgccgaccgcgagggcgagatgattgcccgcgagatcatcgagctgtgcggctaccgcggcccgatccagcgcctgtggctgtcggcgctcaacgatgcgtcgatccgcaaggccctgggcacgctcaagccgtccgccgagacgctgccgctttacttctccgcgctcgcccgatcgcgtgccgactggctgatcgggatgaacctgagccgcctgttcacgttgctcgggcgccaggccggctacaccggcgtgctgtcggtcgggcgcgtgcagacaccgacgctcaagctggtggtggaccgtgaccgcgagatcgcgcgtttcgtttcggtgccgttctgggccatcgaggttgcactctcacatgcgggccagtccttcgtcgcaagctggacgccgccgcagggcagcaccgacgacgccggccgctgcctgcaacagccggtggcgcagcaggctgccgagcgcctgcgcgcggccggtgccgcccaggtgctgtcggtggaaacagagcgcgtgcgcgaagggccgccgctgccgttcgacctcggcacgctgcaggaggtgtgctcgaagcagttgggtctggacgtgcaggagacgctggacattgcccaggcgctgtacgagacgcacaaggcgaccacctatccgcgctcggactcaggctacctgcccgagagcatgttggccgaggtgcccaccgtactcgacagcctgctcaagaccgaccccggcctgcgcccgctgatcgaccgcctggatcgccagcagcgttcgcgggcctggaacgacggcaaggtcacggcgcaccacggcatcattcccacgctggaaccggcgaacctctcggcgatgagcgacaaggagctggccgtctacaggctgatccgcgcccactacctcgcgcagttcctgccgcaccacgaattcgaccggacggtggcgcagcttacgtgcggcgggcagtcgctggtcgcggtcggtaagcagatcgcggtggccggatggcgccaggtactggcggcgccggagcccgacgacgcggacggcgaggaagcgcagcgcggccaggtgctgccggcgctgcgtgctggagcttcctgccaggtcggccaggtcgatctgaaggcgttgaagacgctgccgcccaagccctacacgcagggcgagctggtcaaagccatgaagggcgtcgccaagctcgtgaccgacccacgcctgaagcagaagctcaaggacaccacgggcatcggcaccgaggccacgcgcgccaacgtcatcagcgccttactggcacgcggctatcttgtgaagaagggccgtgccatccgcgcatcggatgcggctttcacgctgatcgacgcggtgccggcggccatcgccgatccgggcacgacggcggtgtgggagcaggcgctggacatgatcgaggccggccagatgacgctggacaccttcatcgccaagcaatcggcctgggtcgcccagctcgtgcagcagtaccgcggcgcaacgctccccctcaagctgccgcccgcgccgagctgcccgcagtgcggcgccccgatgcgccagcgcactggcaagaacggcgcgttctggtcgtgcagccgctacccggactgcaagggcacggagccggtcgaaaccgcgacaggcaagcccgcagcgccaagcccgcggcgtcggtctccgaaggcgagctga

SEQ ID NO: 169995 - DNA, 180 bp, Enterobacter cloacae
atgaaaagcacccgcgtcgtggcgacgcgcgtccgcggtggtcggtgcgaagcggactggatcggtcaacgcggcgaaccgcgttgcagccttgaggaccggggctgccagggcatggtgctgacgaccgtcagcgacacatgcgggaagaatgaaagcgcggcggcactccgtcgctga

SEQ ID NO: 169996 - DNA, 252 bp, Enterobacter cloacae
atgtcccttgcgctcgcatcggcacctttgagtgctgaacaggcccgagccgaatccatcggctaccaggccctggcctgcgtcggcaagcgcctgcccctgcaagtgctgtgcagcgcagccggccactacatcggcaccgccgatgcggacggcccggtctcgcgggagtcggtcagctacttccgctcgcaccacgccgccgagcacgccctgcaaacgggccgctggcagcagcgcctccacccgtga

SEQ ID NO: 169997 - DNA, 393 bp, Enterobacter cloacae
atgaaccgtgccctgcctcaagaggtacttgatcagatcgagctggaacaccagcacttcgccgccgcgccccaagccttcttcgaggcgtggaaacgcggcgtcgacatcgccggagccgaatggttcggcgacggcacccgcgaaggcctgcagcgtgccaccaccaagtgggatctgcggccgaagctgctgatgctcaacgatgccctcggcgtcctgagcagcggccagcggatgttcctgtccgcgatggtgagcttctacaacgcccgcgagggcggtgcgatgctcaagcgttgcggcttcgagggtctgtccgacctgggcggcctcgacctggaacggcgcaaggtcgtcgccgacctgacgctgaactacaacggctggtga

SEQ ID NO: 169998 - DNA, 465 bp, Enterobacter cloacae
atgtcccctgacttttccatcggtctgctcgtgaccgacgacgacatcgatgcggtcatccttgaaggctggccggccgacgtgcgcaagccgcgcatcgtggtgttcgactacgccggcaatgatgtgcccgacgagtatgtgctgcatgtcagcagcggaaccccgaataccggattgaccgggcgcgaggtgttcccggtcgagtacggacccgactgccgctacccatcgcccgctgaagtcctttcggtgctcgatgcacctaagccggccggaaaaccttccgcgctgagcatcgcccgcaacgtgcaccagagcatcctcaacctggatgcgcggctggatcgcctggagcaggcgccgaccggcgacgactacaaccgcctgtaccagcttgcgaatggcggcctgctcgacctgttgaaggcgctgggcgacccgtcctctaccgctgccggctga

SEQ ID NO: 169999 - DNA, 717 bp, Enterobacter cloacae
atgtcctactcgaacaacaatccctttgtccgcggctacgacggcctgtccgtccagcggctgctcgccatctcctacgacgacgactgcccgctgacctacctgccgctgcatccttcgcagtcgaatctgccggacagccaggtcgaacggcgggcctgcatcttctcggacgacttcgtgctgatcaccgaggaccaggtggtccccaacgagttgcaggcgcaatgccgcagccacgggctcgcccgcaacgtggtctatgccgtgatggccgaggaagacggcaagccactgcacgtgggcgacacttactccgaagaagcggcgcgggaagtcgtgcggcgcctgcgctatgaaaccggctactacagccggtgctgggaaatcagcagcgcgcacctcgacgccgacgcacaccgcttcctcgccgaactggcggacatcgccacgccgacgctgttcctgttcgtcgccttccgcatcccgtacggcccggccatcgggttgaagctgatcgccacgccctggaccgacgagaacctgcgcgcggtcgaaggcatcacggccaagcggctgatgcaggagcatcgcaagaagggcatgccggaatccctcatgcacgtgctgcacctggccgcgctcgccgacgtgcgcatgctggtcttcgatgccgatgcgcaggtgctggacggcctgccgatctacgacgactga

SEQ ID NO: 170000 - DNA, 798 bp, Enterobacter cloacae
atggatacccaagccatccgcgcacagatgccgacgctggttcgcggccacgtgccttccaacgtccgcagcttcaagttcaacatcttcgacggccagcccaaggtttcgacgctgggcttccacgttgatcccaagcccttcgagggcaaggtcatcgccaccaccgacgaggccatcgtcgtcaagacggggcgggccgagttcgcggtgctcgacaaggccctcgtcaccgacgtgcccgacgaaggcgccaaggtgcaggtcgaaccgtatgcgcggcgccgcttcgacggcttgcgcgcggatacgcccgaggagagcactgagttcaccgccgacggccagccgtacacggtgaagcggctcatcctgggttccgcgccggccaagctgccgatccccgagccgcagtgccccgagctgcaggagctgatccaccaactggagcagttgcccgcgcccgatggattccgccgcatcacgcacctgctggtggatgccggcgcgcgggacttcacggtggtcgatccgagccccagcaacatcatcgccacgccgccggccatcggcttcaccgtcgcttcggcgaagttccaggggcgcgtcaccgtgctctacgaacgcggcctcgacacctacgcggtggagctgcatcgcgaaggcgagctggtcgagcgggtcgatgaagtgttcttcgacaccttgggccaggtgctggagcggctgatcgacgacgggagctggcgcctcatccgcgtacagcgcctgtccggtcgcaagcccgtccagcactga

SEQ ID NO: 170001 - DNA, 366 bp, Enterobacter cloacae
atgactgttcgattcaaaggcaccgagcttcggcccgtgcttgccgaggcggcggccaaccagtgccgcgtcatcctggtcaaggaccagggcgtgtatttcatggccgagcacggcgagagccggcccgatgggcggcgcaagaccatcgcctacgccgtgggctgcaaccccgatgtcgatgcgttcgacgactggtgggaactggcgcgcgccgaattcggcggcgacgacttcggcgagttcttcgccctgcaggaacgggtcctcacccgtatcctgcacagcgaggacgacctcgaagtgtcggccacggtcacgcacctgtcgatgcaggcggtatccgctgcaccggccggccactga

SEQ ID NO: 170002 - DNA, 345 bp, Enterobacter cloacae
atgcgagacccgttcaagatcgagcaaccgacctgcatcagcttcagcggcggccgcaccagcgcgtacatgctctggcgcgtgctgcaagccaacggcggcctgcccgcagatgccgtcgtctgcttcgccaacaccggaaaagaagtggaagccaccttgcgcttcgtgcgcgactgcgccgagcactggcaagtgccgatccactggctggagtaccggcccatcgaaccgggcttcgtggtggtggacttcgataccgccagccgcgcgggcgagcccttcgagatgctggtccgcaagcggcagtacctgcccaacccggtggcgagagggtgccactaa

SEQ ID NO: 170003 - DNA, 564 bp, Enterobacter cloacae
atgaccacttccaccgacaagtcctacttcgacctgcacatcaccggactcgggtatctcaatcgcatccgcgaagtgaagcccaagaaaggcgatgcgttcctggcctgcgacatcgcggcgctcaacggccccagcgatgacgtggcctacgtgcgtttcgacacgcgcgtctcgggctccgaagcgcagcacctcgtgcgccgctgcatccaagcggtcgatgccgagaagaaagtgatgatcggcttccgtctgggcgacctgtgggccgacaccttcacctactccaagggcaagcgtgccggcgagcagggggtgagcttcaaggcccgcctgctgttcgtcagttggatcaaggtcgacggcaagctcgtctacaaggccgagcccaagccgaccgatgccgaccagcgcgacgaacgcgacgtgcgtaacacggatgtccccgcgacgttcgctgagccgcaagccgctgcgttcgagcccgccaggcccgccgccgaagctgccgacgaagccactgccgatgcgcctgcattggaagttgccgagtcgttctga

SEQ ID NO: 170004 - DNA, 630 bp, Enterobacter cloacae
atgatcaccattcccggccaattggccatcaagaccatccacggccgtaacggcgacttcaacgtcgggcgccttgcgacctccatcggcgagttcgtcgtgaagaacgccgaactcgaccagtacgccgaaggcaagtacgagggcgatttcgccatcgcggagattcgcccgtccacgtacaccgccaacggccgcatggtcattgagatccgcgccctcctgggtgggatgactttgtccaacatcgacgccctgagccgtgacgacgcccgccggctgagtccgcaggaagtcgatccgatcgacgaggaagcgcagaccgccacgccgacgccgacgaccgcccccaaggcggccggccggaagaaggcgcgcagctcgcgcgacccgctggtcgataccacgccgttcggcagcgagccggctgctgcgtctgccgaggctacggcccatgcggacgacgacggcgacgcggcgctgttcggcacactctggccgctgggcgatgtcgtcaagctcgatgccaccgtggatcggcgcgtgctgcgtcagcagcgcgaccgcctcggcgacctgggctacgagttcgctccgctgtcccaggactggcacctcaccagggtctga

SEQ ID NO: 170005 - DNA, 393 bp, Enterobacter cloacae
atgggctggacattcgttcgattgacgcgcgatcagttgatccgcgagctgaccgcaaccgaggaaaccgagcggtcgcgcagtgaggtcatcgaccacacgctggtcggcaacgtgctgtggacggtggcgcgcgtcaccgccaagcaggccggcgtcctgggtctcgcacccggcgagtcggccaccttgatcggctgccatctgctggaaagcgagggccgcgaatggggctacaagttcctggtcgaggccgagcacccgtactactactcgtgcccgctgcgctatctcgacatggcgccgcagcgctgcgccacctggcgcgcaagggtgcatgccttccaccagcagccgacgcgcaaagcggccggcgatgcagccaccgactga

SEQ ID NO: 170006 - DNA, 270 bp, Enterobacter cloacae
atggacaccctcatgtcgtccttgccgcccgagctgcttcgcttcgtcgaagaccagttggccaacaacgaggtttccgacgacgacgaactgcgcgagcacttcatcgccaacggcctgagcgaagaacaggcgtggcaggcactgacctaccgcgcgctgtacctgcgacacgtctttctcgacggcttcacgccgatcctcaaaggccaggaagcgctttgcttcaacccgcacagccgcggctgggagccggttccgaacccatag

SEQ ID NO: 170007 - DNA, 828 bp, Enterobacter cloacae
atgcaactcgcatctcgcttcgcccctcgttccccggtgctgcgcgccgaccatccgttgtcggacgatcagattcgcaccgtggccccatccatcttcgcggacaccccgcacgaaagccgctccgaacggtacagttacatccccacggcggctgtgctgaccgaactgcgcagagaaggtttccagccgttcatggtgtgccagacccgcgtgcgacacgaggatcgccgcgactacaccaagcacatgctgcgccttcgccacgccagccagatcaacggcgccgaggcgaacgagatcatcctgctcaactcgcacgacggcaccagcagctaccagatgctcgcgggcatgttcagattcgtctgccacaacggcctggtgtgcggcgacaccttcgccgacgtgcgcgtgccccacaagggcaacgtcaccgatcacgtgatcgaaggcgcctacgaggtgctgcacggcttcgagcgcgtgcaggactcgcgcgacgccatgcgcgtcatcaccctcgacgacggcgaggccgaagtcttcgccaggtcggcgctgaccttgaagtacgacgagtcgggcaaggccttgcccatcacggagacgcagatcctgcggcctcgtcgtttcgacgacaaccgtgccgatctttggtcggtcttcaaccgggttcaggagaacctggtcaagggcggcctgactggccgtgccgccaacgggcgccagcagcgcacgcgacccgttcagggcatcgaccagaacgtccggctcaaccgggcgctttggctgctcgcggatggcctgcgtcagctcaaagcctga

SEQ ID NO: 170008 - DNA, 657 bp, Enterobacter cloacae
atgcctgcaccttcttcccccaagacgctctatcgcatcgacgaatgccccgacctgatggccgatggcgtcgtcggtgacgagaacggcaacctggtcttcatctccctctgggcgcgcgacaccgccgtccaggaattcctggcccgcctcaccctgggccgggacgaacagggactggatcagttccacgtcatcaccgagcagggcgccagcatcccggtcttcgtcggcaacgtcgagaacctggagaaacgcagcgcacgcgcctaccggcgcacgctgttcggctcgctgaccaacatctggctgttcgatcggcgctgcgtcaaacccgacaaggccaacgccagcgcactggcgctcctgcctcgcgattccacgcaccggctcgaccggctgtggacgctggtgcgggacacgtgcccgctgccgcttctcgatccctggcgcgacagcgtactggaactgctgcaggcgaagtcgatgctgacgcgcctgccgttcgccctcgggcctctggaaggccatcggctcgccatcgacgtgccgacgctgaccgaggtgctgggcggcctgatccgcagcggcgcgctcgtcggcggcgcacccgccagccgcaccccctcggcgcaaccgctcgaagcggtggcttga

SEQ ID NO: 170009 - DNA, 1116 bp, Enterobacter cloacae
atggccctcatgttcccgcggctcgcccgcaacttcgtcaagaacgggtacttccccacggatgaacccacgctcgaaagagcactcaccgcactggcgcccgccgaggcctcggccgggccgctgtgcatcctcgatccctgcgccggcgaaggcgtggcgatcgccgaagccgcgcacgccctcgggcgcgagcaggtccaggccttcgccgtcgagtacgaggccgagcgcgcacgccatgcccggcaactggtcgatcgctgcatccacggcgacctgatggacacactgatcagccggcagagcttcggcctgctgtggctcaacccgccgtatggcgacctgtccaaggacaccaacggcaacgtcggctaccagggccagggccgcgctcggctggaaaagctgttctatcagaaggcgctgccgctgttgcagtacggcggcgtgctgatctacatcgtcccgcactacgtgctcgacgccgagctggtcggatggctgacccggcacttcgccgagttgcgcatctaccgcgcggtggacacgcagttcaagcaggtcgtgatcttcggtcgcaaggttcgccagcgcgaccaggcatcggagtctgtcaaggccacgcgcgcgctgctgctgcagataggtcttggcgacgccgaagcggaagagctgccagtcgaatggccgttcctgccctacacggtgcctgccacggccgagccggagcacttctaccgcgtgacgatggagcccgagcagttcgccgaggaagtcggccgactgcaagggctctggccgacgctcgacacgcacctgggcgccgcgcagcagtcgctgcggtccccggcgcgaggtttatcgcattggcatctcgccttggcactcgccgcaggtgcgatctccggagtggtgaagtccaagacgggccgcgtgctcgtcgtcaaaggcgacacccacaaggagaagaccttgcacacggagtacaccgagcgcgacgacggttccgtggccgagacgcgcatcctgaccgacaagttcgtgccggtcatccgtgcctgggacatgacaccaggctcgccgacctgcggcgaggtgttgaccatccgctga

SEQ ID NO: 170010 - DNA, 2283 bp, Enterobacter cloacae
atgtccctcgataccgaagtcgttcccgccgctgatggcacgcccgtccagagcgacgtgctcgaagcgactgcttctcccctggcgatgagccttcaggatttcgttgccgaattcggcgacgagctgctggactcgctcaaccgcgccaaccctcccgtctacaccggccaggcccggccgcatcgccagctcgtgctggccagtctcaagcgcaagctgttcggcgcgcaggccgaggtggtgcatgccgttaccgagctgctggccgaccgcggcgaacgcgccgcgatcgtcaatggcgagatgggctgcggcaagaccacggtcggcatcgccacggcggccgtgctgcacgccgaaggctatcgccgcacgctgatcctctcgccgcctcacctggtctacaaatggcgccgggaaatccaggagacggtggccggcgccaaggtctgggtgctcaatggcccggacacgctggtcaagctcatcaaactgcgcgagcaattgggcgtgccggtacgcggccaggagttctacgttctcggtcgcgtgcggatgcgcatgggtttccactggaagcccgtcttcaacgtgcggcgcacgcggcacggcgaagtgggcgcatgcccggactgcggccaggtcatcaccaatctcgacggcgagccgatcaacccggtcgaactcgaagccgaggactaccgccgccggtgcagccattgcgccgcaccgctgtggacgctgatgcgaccgcggagcctgtccgccagcgaccagtccacggccgtcttcaaagccttgcagcgcatcccgaccatcggagaggtcacggcgcataagctgatgaagaagttcggcgacggcttcctggcctcaatgctgggcgacaacatccacgagttcatcaacctcatggatgccaacggtgagctggtgttctcggatcgtcaggcgcaccgcatggagcgggcgatggcgaacatggagttcggcttcggcgagggcgggtatcagcccagcgaattcatcaaaaggtacttgccgcaaggcacgttcgacctgctcatcgccgacgaggcgcatgagtacaagaacggcggtagcgcccaaggccaggccatgggcgtgctcgcagcgaaggcgcgcaaggccttgctgctcactggcacgctgatgggcggctacggcgacgacctgttccacctgctgttccgagccctgcctgggcgaatgatcgaagacggctaccgcccgaccaagagcggcagcatgacctcggccgcgatggcgttcatgagggatcacggcatcctcaaggacatctattccgagagcacgggcacggcgcacaagacggccaagggcagcaaggtctcggtgcgcacggtcaaggcgccgggcttcggcccgaagggcgtgctgcgttgcgtcctgccgttcacggtattcctcaagttgaaggacatcggcggcaacgtgctgccgtcctacgacgaggagttccgcgaggtggcgatggacacggcgcaagccgcggcttatcgcgatctgtcgtttcgtctgacctcggcgctgaaacaggcgctggccaagcgcgacacgacgctgctcggtgtggtcctcaacgtgctgctggcctggccggattgctgcttccggtcggagacggtggtgcacccgcgcacacgccagaccttggccttcgttccggctcagttcaacgagctggaggtgatgcccaaggagcgcgagctgatcgagatctgcaagcaggagaaggctgcgggtcgcaagacgctggtctattcggtctacaccggcacgcgcgacaccacgtcgcgcttgaaggtgctgctggagcaggaaggcttcaaggtggcggtgctgcgcgcaagcgtggatgcctcccgccgcgaggactggatcgccgagcagttggaccgcggcatcgacgtgctgatcacgaaccccgagctggtgaaaaccggcctggacctgttggagtttccgacgatcgtgttcatgcagtcgggctacaacgtctacagcctgcagcaggcggcccggcgctcatggcgcatcggccagaagctgccggttcgcgtgatctacctcggctacgcggcttcctcgcagatgacctgcctggggctgatggcgcgaaagatcatggtctcgcagagcacgtcgggagacgtgcccgagtcgggattggacgtgctgaaccaggacggtgattccgtcgaggtggcactggcccggcaactcgtcgcggcctga

SEQ ID NO: 170011 - DNA, 612 bp, Enterobacter cloacae
atgcaaccactcacctgcgtcgctcaccgcttggctgtgcctgccttgctggccggctgcgtgctcatcaccggctgcgccgccacgggcacgacgagccctcccactgtccatgactcgctccccgagcctgcggtgttggtcagaaccatcgccccggagcccgagccgggcctgatcccggtggcccgctacgggcgctacacgctggtcgagatggtgccggaaccggcacagcgcgacctgctgcgacaggtgatcgagatttcgattccgccgatcttggacgcgagcgtcggcgatgcccttcggcacgtgctgctgcgcaccggctaccggctctgcgacgcgacggaggcgaccgcgctgtacgcgttgccgctgccggcggcgcacctgcggctcgggccgctgccgctgcgcgatgccttgctggcactcgccggcccggcctgggagttgtccgtcgatgacgcttcgcgcgcggtgtgcttcacgcgcgtgacgactgcgcgtgcgccgagcgcaagcccgattcccgcggctccggcaccgagcgcgccggccgccgaacccgccgattcccacgtgccccaggaggcccagccatga

SEQ ID NO: 170012 - DNA, 645 bp, Enterobacter cloacae
atgaccatcccgcagcttcccgacgagaacgccggccgcgcgcgctggttgaagatcacagcggccgcatggctgctgctcgtgagcatcctggccgtggtcaacagcgtgggcctgtcgcgcctgagcgagcaaagccaggccagcgcccaggatgcccacgtgcaggcgctcaacacgcgcgtcgccgaactcgaacagcaggcggcggcctcgaagaaccagcccaagcccgtcacccaacccgacttcgaggccgcccgcaagttgctggacgaacgcctggcacaggtggagcacacccagggcgcagacgcccatgccggcgacttgcaggcgctgcaggcgcgcatgggcgacctcgaagctcgcatgaagcgaaccgccgcgcctgccgcggcaccccggcgcaccgccgagccggccaagcccaaggtgcccgaaccgccgttcaacgtcgtgggcgtggagctgcgcggcggcgagcgcttcctgtcggtggcggcacccaaggcgtcgtcggtgctggacgtgtggctgctgcgcgaaggcgatgccgtgggcgcgtggcatctgctggcgatcgaggcgcgcgccgccgtgttccgcgtggatggacagacccagcgcctcgcgctgccgtag

SEQ ID NO: 170013 - DNA, 732 bp, Enterobacter cloacae
atgaagcacgccgcgatctgcttcgccgccatcctcgccgctgtcgcaggaacggcaggcacggcctcggcacagtcggcgccggtcgcgtcctcgcgcacggtgcccgcccagattcagaacagcagcgacgccgcgctggacgaacggctggcgcgcgattggggcctgcgctccgatgagtgggcgcgctaccgccaactgatgcaggggccgctgggcatctattccccgaacctcgatccgctcacggcgctgggcatcgaggcgcgcagcgacgaggaacgcaaccgctatgcggagctgcaggtgcaggcggaatcgaagcgcgtgggcaagacgctggcctaccagcgggcctacgacgcggcgtggaagcggctctatccgggacagcagcgcgtgaacatgccgggtgcgaaggcgccgggcgccggcaaccggggctcgggccggctggcggttttcgtgaaggccgagtgcccgtcgtgcgagcagcgcgtgcgccagctgcaggtggccggcaccgccttcgacctctacatggtcggcagccgccaggaggacgcccgcatccgccagtgggcgacgcaggccggcatcgacgccggccgcgtgcgctcccgcaccatcacgctcaaccatgacgccgggcgctggctgtcgctcggcctgcccggcgatctgcccgccgtggtgcgcgaggtcaacggccaatggcagcggcagtaa

SEQ ID NO: 170014 - DNA, 585 bp, Enterobacter cloacae
atggcagcggcagtaacccgccgtgcaggctgcgcggccttggtcctcggcctcagcgcccatgccgccatcgtcttcggccaggaggtgccaccacccgcctaccagctcgccgcccagcaggcgggcgtgccgtcgccggtgctgtatgcggtggcgctgcaggagagcggcgcccggctgcgcggccggctgatcccgtggccgtggacgctcaacgtcgccggccgcgccgaacgctatgccacgcgggccgaggcctgcgccggcatccgccgggcgctcgcccgcacgccggtcaaccgcatcgacgccggcctcggccaggtcaacctcggctaccacgcgcaccgctacgcgcatccctgcgagctgctcgacccataccgcaacctcgccatcgccgcggaaatcctgcaggagcagcacacgccgggcgaggactggctggtcgccatcggccgctaccaccgccccgcgggcggggcgcccgccgcccgttaccgccgcagcgtccaccagcacctgacccgcgtgctcgggccgggagcctcacttccctctgcccggagtcccatgccatga

SEQ ID NO: 170015 - DNA, 555 bp, Enterobacter cloacae
atgaaccgcatcctcgtcgccgcgactgcggcgctgctggccaccaccgcagacgcgcaggaccgcggccccgttaccaagaacagttccccgccgctgatcgtggtcgaggacaaaggcggcacctcggcgctgccgtactaccgggccttgaatccgcaggatgcgcagcccggtcagccagccacgccgcaaaccaagccgcgcattggcggcccggccgaagccgaggcggccatgctgccggtgcgctcgatgcggctgacacccggcgacgagccgcgccgcgtgatccgcgcgccgggcctgacgccgctgttcctgatcggcgacgacgaccgctcacgagcctggctccaacgacggggcaaggacttgcaggcgctacgcgccgtgggcttggtggtcaacgtggcgacgcccgaagccctggccgcgttgcgtcgcctcgcaccgggcttgatgctgtcgccggcctcgggcgacgagctggcgcagcgcttggggctcaagcactacccggtgctgatcaccgccaccggcatcgagccctga

SEQ ID NO: 170016 - DNA, 2160 bp, Enterobacter cloacae
atgccccagtcccaagccgtcgaagtcttgctgcggccagcggtggagctatacaccgtcgcggtctgtgcgggcgccgcgtttctgtgcctggtggccccgtggtcgctcgcgctgagtcccttgctgggcctgggcagcgcgctcgctttcctcaccttcggcgcgctgcgctttcgcgacgcctgggccatcctgcgctaccggcgcaacatccggcgcctgccgcgctacgtgatgaccagccgcgacgtgccggtcagccagcagcggctgttcgtcggccggggcttccactgggaccagcgtcacacgcaccgactgatgcagacgtatcggtcggagttccgtcgctacgtggagccgacggcaatctatcggatggcacggcgcatggaagagcgcctggagttcgcgccgtacccgttgtccaagatggcgaaggccctggcctgggacagcccgctgaacccggcgcggccgctgccgccggtgggcggcctgccgcggctgcacggcatcgagccgcacgaggtcgacgtcaccctgccgttggccgagcgcgtcggccacagcttggtgttaggcaccacgcgcgtcggcaagacccgcctggccgagctgttcatcacgcaggacatccggcgcaaggtcaatggacagcacgaggtcgtgatcgtcttcgatcccaagggcgatgcggatctgttgaagcgcatgtacgtggaggccaagcgcgccggacgcgaaggcgagttctacgttttccacctgggctggccggacatcagcgcccgctacaacgcggtgggccgcttcggacgcatctcggaagttgccacgcgcatcgccggccagctttccggtgaaggcaacagcgcggcgttccgcgagttcgcctggcgcttcgtcaacatcatcgcgcgggcgttggtcgagctggggcagcggcccgactacctgctgatccagcgccatgtcatcaacatcgatgcgctgttcatcgagtacgcccagcactacttcgcccggaacgagcccaaggcctgggaggtcatcgtccagctcgaagccaagctgaacgacaagaacatcccgcgcaacatgatcggccgcgagaagcgcgtcgtcgcgctggagcagtacctgtcgcaggtgcgcatctacgaccctgtgctcgacggcctgcgcagcgcggtgcgctacgacaggacgtacttcgacaagatcgtcgcatcgctcctaccgctgctggagaagctgaccaccggcaagatcgcgcagttgctggcgccgaactattcggacctcgccgacccacgcccgatcttcgactggatgcagatcatcaggaagcgggccgtggtctatgtcggcctcgatgcactgtcggacgcggaagtcgcggcggcggtcggcaattcgatgttctccgacctcgtatccgtcgcgggtcacatctacaagttcggcatcgacgacggcctgccgggtgccgcgacgggcatcaaggtgcccatcaacgtccatgccgacgagttcaacgaactcatgggcgacgagttcatacccatggtcaacaagggcggcggcgcgggcgtccaggtcacggcctacacgcagaccctctcggacatcgaggcacgcatcggcaaccgcgcgaaggcgggccaggtggtgggcaacttcaacaacctgttcatgctgcgcgtgcgcgagaccgccacggccgaactgctgacgcggcaactgcccaaggtcgaggtctacacgacgacggtgatgagcggcgccaccgacagctcggacccgaccggcaacaccgccttcacctccaacacgcaggaccgcatcagcagcaacagcgtgccgctgattgaaccggcgcacgtggtcgggctgcccaagggccagtgctttgcactgatcgagggcgggcacctctggaaggtgcgcatgcccttgccggcgcccgaccccgacgaggccatgcccaaggatttgcaggagctggccggctacatgcgccagcactacgtcgaggccggcgattggtgggacaacaatgggcttcccggactgcaggaccaagcactgcccgacgacttgctcgccgacttcaagcagatggccagcgcggatgaaggggccacggcatga

SEQ ID NO: 170017 - DNA, 750 bp, Enterobacter cloacae
atgagcgaccccgccgtcgccgtccagcgccagcaggttcgccagcagggcctgatcgcaggcctcatcacgctgccgttccggctgttcggggtgttggccggttcgctggtgctgtgcatcgcgatcgagtgcatcggcatgcacttcttctggcccgagcagggctggcgccatgcgcagggcatgctgaactacgagctgtcgcaggtctcggagcatttcacgcaaagcgtgctggtgcaggagccggggcgcagcgccctccagctcgtcgagtgggcctaccaaggactgttcgtgaaaacgggcctgctggactggatacgcgacgcggcggcgcaatcgcgtgccggcgcgcgcagccaggcgcaggacttccgctactacatcggtcagctctacgtgcatgtcgagagctacctgatcgcctcggcgtacacagtgctggtgttcctcgtgcggctgctggtgctggtcctgaccttgccgctgttcctgatggcggccttcaccggcctggtggacgggctcgtgcgccgcgacgtgcgcggcttcggcgccggccgcgaatcgggcttcgtctaccaccgggcgagagccagcctgatgccgctggcggtgctgccctgggtcacttacctcgcgctgccggtcagcgtgcatccgctgctgatcctgctgcccagcgcggcgctgctcggcgtcgcggtgtgcatcgcgtcggcgacgttcaagaagtatctgtga

SEQ ID NO: 170018 - DNA, 870 bp, Enterobacter cloacae
atggatgaagcggatgtcacacagaaagcacgggcctttgttgcgaaggttgatgtgtccggcatccgagaagacctgacgccctatgtggtcgcggccaacgccaaagtcaagaaagaggagcttagtgagggggagtccggctacacgatcaccaagccgaatggcaagcacgtgatcacggtgaattcgctggagacagaagaacgccaacgcttcaccatctgccacgaaattgcgcatatcgtccttgcgctggaatcgagccacgaagaggtgccgtcctggtcctatgcgaagcggcatccgaacgaaatcgcatgcgacactttcgccgccgagttgctgatgccgtatcagcaatggctatcgcttgtgcccaaggaagaaccttcgctggagctgatccagggcatggcggcgcttttcagcacatcatttcccgccgctgcgtcgcggttcgcctccctcagcgacatcccttgcgccttcgtcaccatggagcgcggtgcagtgcgctacgcggcacgctccaccagtttgcgacaggctggggcttggatatctcccaggtctgccattcctgtcggctctgtggctcaccgtctccgttcttcaggcagcagtgctgccgacacagatgaggttgcacaagacatctggttcgacaactgggaaaagggcctcgatctctgggaactctccaggcactacgcacgtactgacaccacgacctcgctgctctggttcgacagcgacgatttacctgaggtcgaagtgaaccgcttcggtgtacgcgtcgaggacgacggtggcttggctgaactcactgggcagctaccgtggccgggacgcagcaggcgccgctga

SEQ ID NO: 170019 - DNA, 387 bp, Enterobacter cloacae
atgtcacaaacaggcctgggcgtcgccctcaagacgctacgcgagcgcagaaccctctcattgcgcgaaatcggtcaactgtcttcggtggaccatgcctatgtccaccggctggagtccggcgaaaagacaaatccgtcagtggacttagtcgagaagctgctgaaggttctcaaaccaggtgaaagagatgctgcgctggtgatgtggcttgtcgaccatgcggaggccgatccccgccttgttgaattcgtgctgaacgatccttccatcagcatcgacatcttttcggctgcagcaggcgtgaggcatcgtggaaatacaaggcccgatcccgcgacactgatcgcccggatacagcgagcattcgaggacgaggatgactga

SEQ ID NO: 170020 - DNA, 1143 bp, Enterobacter cloacae
atgctgaacctgagcccgcttttctttaccaccgtcgatgacgaatcctgcatgcatgacgagctggatctgtcgcccgagcaacgagcctggatcgccagcgcccgaaatgatgtcaggaactgccttcgcaccggaattccgcgcgtgctgcgcgaacgcgggtacacggacgacgtgccgcagccacgcttcttcacgcaaggatcgtgggcgtacaagaccttgaacggcccggcacaacggccccagcaggcggatgtcgatgatggttgctatctgccgttgagttttgtctcgcagacgaagcgtcccagcagggccacaacggtgttctttgcagctgctgaagaagccttgaggctgttggtcgaggagaagcactggaagcttgtcaccgacaagccgacatgcatccggattgtcattgcggcctatgcccacatcgacattccgttgtacgccatccccgacgaagaattcgtcacgctcgcgaaagcctcgatggagcgatacggctatgactcgctgacggaggcggtgaacatggcagagcgggatgcctggacggcattgcccgctgataaagtgctcctggctcaccgcgagtgcaactggatgccctccgaccccaggcctgtgaaggaatggtttttgggcgaggtggaggccaagggcgaacagttccgccgcgtgattcgctacttgaaggcgtttcgcgattggcggtggtcgagcggtggaccggcttcgattctgttgatggccgctgcggctccgctattcgagaagcgggatcggcgcgacgacctggcgttgctggatgtcgtcgcggcattgccggcccggctgcgcgcgggggtgaacaaccccgttgatgagtcggagtcgcttactgcacgccttggtaaagagggcgtcgaagaggctgcgaaagcgttcgaagcattcgaaaaagtgctgcgcggagccaccaacgccggcagcccttcacaggcctgcgtctggatgcaaggcgaattcggtccgcgttttccgaacgagccggaccgggtcaaggtggtatccgttgtcgccaccattgccgcagcgccggctacggctggtccgagcgaattggtcgggcgcacgaaggccggatga

SEQ ID NO: 170021 - DNA, 1629 bp, Enterobacter cloacae
atgagcagcgtcgccgtggtctccgatgtggtcgaagccttcaggctgcaaggcttcgagtttgtcggcaagacggacgacggctggttcaagctgagggggccgttgatcccgtgcggcgcggacgatggcattccatgtgaggttcagctcgaccctaccttcttcgacctgcctcgcattcggctgctcgaaattccgcctgaactgcccaatgcagttcctcatcttggcgcggagggcggcctttgctatctggccaagggaactgtcgtgctggacatctacgatcctgtagggcagtccttggcgtgcctgcaacgggcggcagcggtgctcgggcagatcttgaagggcgagatgatcgaagatctcgccgaagagttctttgcctactggaacggctggctttgttttgtggacatgcaaggcgaagatctggggcgacaaaactgtatcgttgcgcaagccaatgggaatccactctggttcatcaccgacaacgaagatcgaacaacaagaaagttgcattcactcggctaccaggtcactgataaaacggtgctgacataccgggtcaagaccaccgcgcaaccccgcccactaaccagccactggccccccgaaacggtgggggacgtcttggcttggcaaagcaccctggacccacggtgtcggcgcaagattcacgaacgaatcaaggaagggcaaagcaaaaaagcaaatggcgtcctgatcatcatcgaatcgccactgatgacctacggctttgccgtgctctttgaccaccaagtgagtcaaaagaccaagcttgctgatcgcagggattcgagttttgggctgaaggtaatgcccgtctcagtgatcaggatcgatgaccggtatctggcccagcgcaacatccccaagtcgaaaacgttggcggggaaacgaatcgcacttgtgggttgcggcacgatcggcggatacctctcggacatgctggtcaaggccggggcaggatcatgcggagggaaactcacgctggtggattttgatggcctccttccacagaacatcggacggcatcggctcggcttcccggacctgttgtcgaacaaggctgaggcgatggcgaaggaactcaagcgcttgtcgccaggcgtcgaggttcatgcgctccccgtggacgtgagacaggcccaactgggaaagctggacctactcatcgatgccaccggcgaagaatccctcgggcattggctgtgcggccgctacagggctcccacgcccatgctttctgtttggatcgaagggccgggaacggctgtgcgtgcgctcctgagaacgaacgcatcgggtgcgtgctaccgatgcctatggcagagccacagaagaggcgaacttcgctcgaccattgatgctctgcctaacatcttggcaggccacgggtgcgagggcttgtatgtgccatttccggcttcggtgtcggtgcaggcagccagcttgggtgctgagatggcccttgattgggtcaagggcgtccactctcctgcattgcggacccggctgatcgaccagacccatcatctggccacgcctgactgcgatcctctgcgagatcatgattgccctctatgcaattcctag

SEQ ID NO: 170022 - DNA, 477 bp, Enterobacter cloacae
atgcaattcctagggtcctgggcaactggcgacaagagcaggttgctgcatttttcgacccagacgctggagacattcagtcagcatatccaggctagtgatgccgactgcgaagcgggcggactcttgcttggttctgtacatggagcccatttgctcattgagcaggcgacggttcctaccgcgtgggacaagcggtttcgctatctgttcgagcggatgccgtttggtcatgaggctattgcgttgtcgcgatggacggcgagtcagggaactgtccgctatttaggcgaatggcatacccacccggaagaccatccccagccttctagccttgacagatctgaatggactttgttggcagcgcagcgtcgggacaagcggccagtgctcgctgtcatcatcgggcgtagatctctgtatgcagagttggtgccgagatcaggcgaagggtcgatattcttccccgtggagtag

SEQ ID NO: 170023 - DNA, 408 bp, Enterobacter cloacae
atggaaaccactcgcaatcccgcgcaggttcggcgcttcgccgtcgaggcaccctgggccgtgcgtgttgccgcgctgctgcttgccgctgccggattgcagcccgccatcgccgctgacgcctccgacaacgctgcggagcgcgagatgctcgccgcggtaacgcgccagctcgaactgctggaccgcctcgccgagcacgccgccaccaccgcgccgcaggagcgcgcccgctaccacttcgactacgcgcggctgcgcgccgacctggagcgcgtgcgcaccggcgtgcgcgactacctcgttccgcaacgcgcccagccgcgtgatcccgtgccgctggccggtgactacacgcgcagtaacgcggcgcctgcgacgtcgcccaaggaggcgccgtcgtcatga

SEQ ID NO: 170024 - DNA, 240 bp, Enterobacter cloacae
atgacgccttccgccgatcaggtcgccgccttcacggccaacggcggcttcgcgcccggggccgtctccaccgtcgtgctcggcttcgtcttcgccatcctgctgctgtggggcgtgtgggcgatgcgcactgcctatgtcggctgggccgagcaccacctgacccaacgccagttcctcggcgtcatcgtgcgcttcgtcgcgatgtacctggtgctgggctttttcctcctgtcctga

SEQ ID NO: 170025 - DNA, 378 bp, Enterobacter cloacae
atgaacgctcccgctacttctcgccgtcccacgtcgcggcccgccgcgcgcatcgccgcgctgctgatcccgctgggcatcgccgccacgccgctgccgtcgttcgccgaccttcccacgctggaagacccgtcgcgcggcaccggcagcggcatcatgcagacgctgcaaaactacggctacgacatcgtgctgctgatcgcgctgctcgtcgtcgcctcgatgttcgtcggcgtctgctaccacgcctacacgcgctacgccgagatccacaccggccgcgcaacgtgggggcagttcgggttgaccgtcgcggtgggcgcgatcctgctggtcgtcggcatctggctgctgaccaaggctaccggcgtcctgtaa

SEQ ID NO: 170026 - DNA, 429 bp, Enterobacter cloacae
atggccggcgccctggagagtccgtcgcgcgacgggctcgtgaccttcctgccgcaccgcctcaaccgccacccggtggtcgtgcgcgggctcacggccgacgagctgtgggtctgcgccgggctgtccggcgcggccggtctcgtggccggcgtaccgctggcctggctgacgcacagcatcgcgatggtgcccacgctgatcgtcgccggcatcggtgtcggtgtcttcgtgggcggcggcctgctgcggcggtggaagcgcggccggcccgacacctggctgtaccgccagctccagtggcgcctcgcgctgcgctaccccgcgctggctgcgcatgcgggcgggggccagctcatcacccggtcgggctggtggtccacgcggcgcctgcggcccgatccgtccctgcgtcgaggtagaccatga

SEQ ID NO: 170027 - DNA, 693 bp, Enterobacter cloacae
atgagccgattcaagaacgaggtcgcgcacctgcaggcgcatgtgaagaccttgcgcctggctggcgccgcactgttcgtcgtggcgctgctgctcggcttcggctggtggagcgcacccaagagcctgaccatccacgtgccacccgacctgcgctcgggcagcacgcgcaagtggtgggacgtgccgccggagagcgtctacgccttcaccttctacatttggcagcaggcccagcgctggccgaccaatggcgagcaggactacccgcgcaacctgcatgcactgtctgcgtacttcacgccgagctgccgtgccttcctgcagcaggactacgaattccggcgcagcaacggcgagctacgccagcgcgtgcgcggcatctacgagattcccggccgcggctacggcgacgagccggccatgcgcgtgcgcaccgtgtcggccaacaactggatcgtcacgctggacgtgagcgccgacgagtacctgggcgccgagcaggtcaagcgcgcgctcgtgcgctatgcactcaaggttgtgcgcatggacgtggaccccgagcgcaaccccttcggcctggcgctggactgccatgcacgcgcgccggagcgcatcgagaccccgccgcctgcggcgccgcccggccgggccgcaagcgccggctccaacttgcagggagacaccccatga

SEQ ID NO: 170028 - DNA, 921 bp, Enterobacter cloacae
atgaagtccctcgggaagcgttcatctgcggcggccctggctggcctgctgctgtgcctggccttcgtgcctgcggcccatgccgtcgaaatcctgcgctgggagcgcctgccgctggcggtgccgctggtggtcggccaggagcgcgtggtgttcatcgagcgcaacgtgcgcatcggtgtgccgcccacggttggcgagcagttgcgcgtgcagagcgctggtggcgcgatctacctgcgcgcgagcgcgccgatcccgcccacacggctgcaactgcaggacgtggagtcgggcgcgctgatcctgctggacatcgcggccgagccggcgaaggcgggccagcctgcactcgaacccgtgcgcatcgtcgaaggcgacgtgccggcgacgcgctacggcgagccggccaagccggcggacgacgatgcggagcgcaccgtacccgcagcgaagcgcgccacgccggtggcggttgtgctcacgcgctatgcggcgcagaacctctacgcgccgctgcgcaccgtggagcccgttcccggcctcggccgcgtcaatctgcgccgtgggctggagctttccaccttgctgcccacactgccggtgcgtgcgcaggcgctggccgcttggcggctcgaagaccagtgggtgacggcggtgaagctcaccaacgcctccgggcgctggctcgacctcgatccccgcgcgctgcagggcgactttctcgccgcgaccttccagcacccgaatctggcgccggccggccgcgccgccgacaccacggtggtctacctcgtgacccgtggccacggcctggccgagtcgctgctgcccaagctctcaccgatcgacgcgacggtgaacctgccgccggccgcggcggccggccaggccgaaggaggtgcccgccatgaaaagtaa

SEQ ID NO: 170029 - DNA, 1470 bp, Enterobacter cloacae
atgaaaagtaaccccctcctgaagtggctgctgatcccgatggcgctggtgctgctgttcgtcggcatcaagatgttctccggggatcgcggcgccaagcccgttccggccggcagcgccaactcgctcacgcccgaagagatgaaggcgctgggcatcgagggcgacacgccgcgcgataccgttgccacactggtggcccaggtcaagcagttgcgcaacgagctgcagacggcgctcaacgacaacaagaaccagaagagcgagaacgagcgtatgcgcgcgcgggaaagcgcgatcgaccagcgcatccagtccgcgctggatggtgaacgcggccgcctgcagcagtaccgcgagcagttggccggcgaccgccagcagacccagggcctgctgcaagacctgcagcggcgcctggatgggctttccggcaagggcggccaggccgatctgccggtcgggctcggcctggaggacggcgacggcaagggcttcagcggcagccagggcggcgccgcgcgcagcaccagcggcacgcgctgggtggaaccggacgatgcgaagccttcggcgaagaacggcagcagcggcggcctgaactttccgaccagcttcgggccggcgcagaagacgctttccgacacggccgacaacgtggccagcaccgtcgcggatgcaggcagccgcgccgtgggcacgtcgtccaagccggtctacacggtgccgtcgaactcgacgctgatgggctccatcgcgatgaccgcgctgatcggccgcgtgccgatcgacggcacggtcaacgacccgtaccccttcaaggtgctgatcggcccggacaacctcaccgccaacggcatcgacattcccgacgtggcgggcgcggtggtcagcggcacggcctcgggcgactggacgctttcctgcgtgcgcggccagattcgctcggtgacgttcgtcttcaacgacggcacggtgcgcacgatgccggaggacggcaaccgcaaccagagcggcggcggccagggcaatggtgcaaacagcacgacgcaaggcggcctgggctggatcagcgatccctacggcatcccctgcgtcagcggcgaacggcgcagcaacgcgcagcagtacctgggttcgcaagccctcatcaccgcggccggcgccggcgccgcttcactgatcaagtcggacaacggcagcgtggccgtggtcgctaacagcaacggctcgcttggcacggtaggcatcagcggcaacgaggcgatgggccgcatcctggccgggggcgtccgcgacatggccgattgggtcaacaagctttacggccaagccttcgccgccgtctacgtgcggcccggcgccaaggtcgcggtgcatctggagcagccgctcaacatcgactacgacgccaaggggcgccgggtcaatcaacgcatcggaggcaagcatgcgtcggatttggattga

SEQ ID NO: 170030 - DNA, 435 bp, Enterobacter cloacae
atgcgtcggatttggattgaatcggccgcgatcctgtgcgcggtcctggtgctgggcggctgcgccaccagcaaggacaagttgctgccgcacggcgatcacaccatgctcgacgtgtggaatcaggagacgggcggcagcgccggtggtgggcaggcagcgcggcaactgctcgatgcacgccaggacttgcgccggccgctgaccgaggccgacgtgcaggcggtgcccgccgccgctgccgcctacacgcgcaccgcggccaacgagatttaccgccagttccgacgcctgccgaacccggacctagtgatgtacgtgttcccgcacctggccggcaccgacccggtgcccgtgcccggctacaccaccgtgttcccgctctaccagcgcgtgcagtacgcgatgcctggcgagcgcctggaggactactga

SEQ ID NO: 170031 - DNA, 2883 bp, Enterobacter cloacae
atggcttggtcgttgccctgggcacgcaaggccgtcacgcccgccggccccgacctggatgccgatgacgcctggtcgcagcatgtctcgacgctggccgcgcacggcattcccgagcccggcagcgcgatgggcagccagccgcgcccgccgaccaccgaagcggacctgcaggcgctctacggcgtggcaccgtccttcgccgacctgttgccgtggatggagtacctgcccggctccaagagcatgttgctggaagacggccagtcggttgcgggcttcttcgaactggccccggtcggcaccgaaggccgtgagatggcctggctgtggcaggcacgcgatgcactggagaacgcgctgcaggactcgttcgacgaactcgacgagaacccgtgggtcgtgcagctctacgcccaggacgaatcgacctgggacacctacctgcgcgggctggccgactatgtgcggccgcgcgcccagggcagcgccttcacggacttctacctgcgtttctttgggcaccacctgcgcgccattgccaagcccggcgggctgttcgaggacaccacggtgacgcggctgccgtggcgcggccaggtccggcgcgtgcgaatggtggtctaccggcgcgcgaacgctacgaccgcatcgcggcgcggccagtcccccgagcaggcgttgacgacgatctgcgaccggctcgtgggcggcctcgccaacgcgggcgtgaaatcccgccgcatggaggcggccgacatccacgactggctgctgcgctggttcaacccgcacccgacgctgctcggccccagcgccgacgaccgcgagcgcttctatgcgctcacgcgctaccccgaggcagtcgaagacggcgagatcgagctggctagcggagacttcgcgcagcgcctgttcttcggccagccgcgctcggacgtggcgaacggcacgtggctgctcgacggcatgccgcaccggatcatcgtgatggaccggttgcgcatgccgcctgcgaccggccacgtcaccggcgaaacgcgcaagggcggcgatgccgtcaacgcgctgttcgaccagatgcccgaggacacggtgatgtgcctgaccgtcgtcgcgacgccgcaggacgtgctcgaagggcacctgaaccacctgagcaagaagtcggtcggcgagacgctggcttcggagcagacgcgccgcgacgtgcaggaagcgcgcgggctgatcggcagcgcgcacaagctctaccgcggtgcgcttgccttctatctgcgcggacgcgacctcgcgcagctcgacgcccgcggcctgcaactggtcaacgtcatgctcaacgccggcctgcagccggtgcgcgaggaagacgaggtggcgccgctcaacagctacctgcgctggctcccgtgcgtgttcgatccggccaccgacaagcgccagtggtacacgcaactgatgttcgcgcagcacgcggcgaacctcgcgccggtgtggggccgcagccagggcaccggcaatccgggcatcacgttcttcaaccgcggcggcgggccgatcaccttcgacccgctgaaccggctcgaccggcagatgaacgctcacctgttcctgttcggtcccaccggctcgggcaaaagcgccacgctcaacaacatcctgaaccaggtgacggcgatctaccggccgcggctgttcatcgtcgaggcgggcaacagcttcggcctgttcggcgacttcgcggcgcggctaggcatgaaggtgcatcgcgttaagctggcccccggtgccggggtgagcctcgcgccgttcgccgacgcccaccggctggtggaaacgcccagccaggtgcagacgctggatgccgacgccctggacgaggaccgcgacgaagcggcacaggcagcggatgccgacgagcagcgtgacgtgctgggggaactggaaatcaccgcgcggctgatgatcaccggcggcgaggacaaggaagaggcgcgcatgacgcgcgccgaccgcagcctgatccgccagtgcatcctcgatgcggcccagcgttgcgtggccaaccagcgcaccgtcctgacgcgcgacgtgcgcgatgcgctgcgcgagcgcggccgcgatacggcactacccgaggtgcggcgcgcgcggctgctggaaatggccgacgcgatggatatgttctgccagggcgtggacggcgagatgttcgaccggcccggcacgccctggcccgaggccgacatcaccatcgtcgatctggcgaccttcgcacgcgagggctacaacgcgcagctttccatcgcctacatcagccttatcaacacggtcaacaacatcgccgagcgcgaccagttcctcggccggccgatcatcaacgtgacggacgaggggcacatcatcaccaagaacccgctgcttgcgccctacgtcgtcaagatcacgaagatgtggcgcaagctcggcgcctggtactggctggcgacgcagaacatcgacgacctgcccaaggccgccgagcccatgctcaacatgatcgagtggtggatctgcctctcgatgccgcccgacgaggtggagaagatcgcgcgctttcgcgagctgaacgcggcgcagaaggcgctgatgctgtcggcccgcaaggaggccggcaagttcagcgagggcgtgatcctttccaagagcatggaagtgctattccgcgcggtgccgcccagcctgtacctggcgctggctcagaccgagccggaagagaaggccgagcgtttccagttgatgcagcagtacggcatcggcgaactggacgccgctttcaagatcgccgagaagatcgaccgcgcccgcagcatcgagccgctggtgctcgatgcgctggcgtga

SEQ ID NO: 170032 - DNA, 747 bp, Enterobacter cloacae
atgcgcatccctcgcttcgcgccgtcccgcaccgtccttgtcgtcgcgctgctgatggccgcggccctgacaacggccgcatggctcggcctgcggccgcagtcgccgcccgccgaacccgattttccttcggcagaagcaacgcctgcgccggcaacggcaccagccggcccgccctggcgctatggccgcgccgatgcgcgcttcacggtggtcgagtacgccgacctcgaatgcccgttctgccgcgcctacttcgcagtgctcaagcgctggatcgacgcgcacccggacgtgagctggcaatggcatcacctgccgttgccgttgcacgagccggccgcgtctgccggtgcgcgcctggtggagtgcgtcggcgaggccggcggccaggccgcgttctggcaggccgccgagtgggtctacacgcacacccgcggcgacggtcagggcctgcccgagggcctgcgctatcccgacctcacgccggccgcgcagcagtgcctcgacagcgaccgccccgatgcgctgatccgcgcacagtcggcgagcgcggcgcaggagggcatcaaggtcacgcccacgctgcgcctgcaggatcgccagtccggcaagacgctgctgctgcacggcccggtcgaaggagatgccttgctgtccgcgatcgacctgctggcggccagtgcagcggccgagcccgcatcgaaggaaatgcctgccgagtctctcggagacatgcccaggtag

SEQ ID NO: 170033 - DNA, 495 bp, Enterobacter cloacae
atgtcctatgtcgtcgccgactcgcgtcccgagtcgctcagcctgatcgccgcccagcacgaagactggatcatccgccaggccatcgccttgctggaacaacgcatcttcaaggccggcccgatgctgaacagtcccgccgccgtgcgcgactacctgcatctgaagctggtcgcggagcccaacgaggtcttcgccgtcgtgttcctcaactctcagcaccaagtcctcgcctacgagccgatgttcaagggcacggtcgatcaaacctcggtgtacccgcgggtgctggtgcagcgcgccctggccctcaacgcctcggcggtcatcctggcccaccagcatccatctggcatgaccgtgccttcggccgccgatcaggcgctgaccgaccggctcaaagccgccctggcgatagtcgatgtccgggtggtggattacttcatcgtcggcaagggcacgccgtactccttcgccgaatccggcctgctgtag

SEQ ID NO: 170034 - DNA, 447 bp, Enterobacter cloacae
atgacggctcccttcttgaaacccatcccgcggctgcggtgtacgcgcatcgcctgcgcgggagggctgctgctgtgcctgctcggccaggacgcatccgcagccgacgtgctggtcgtgaccgacagccgccatcccgtgcagtccgcatccggcgcgcgcgtgatcgagctggatctgcccgagcgcatcgaggccgaactggccgcgggcctgcctgccgatccgggccgcgcggccgcgctcgtgcagcaacgcctgcgcgatggcagccaggcactacagcgccgcatcggcagcgcctaccagggcgtcgccgatgcctggggcttggggctggccaaggtgcctgccgtggtggtcgatcgccgctacgtggtctacggcgagcccgatgtcgcgcgcgccgtggcacgcatcgaatcacatcggagggcacagccatga

SEQ ID NO: 170035 - DNA, 951 bp, Enterobacter cloacae
atgaaccgcctgctgtcggcgtcgtcgcgccgggcccgccttgccatcgcttcggtgctgctcggcggcgccgcttcgagcttcgcgctgaacacggctaccatcgtgtcctcggccctgtcgcccgactgcctggaatatcgcgtcgtcggcatctgctactggctgttctgcacctggacgggctgcacggtgcgcacctcggtgaaggtgcgccactacattcccgacgcggtggtgtcgagctacagcaacaccggcgagaacccgtggatcgaggtgcgcgccatgagcatgcccaatcccacggcgcaggccggcggcgacgggacgacgaaccacgacaacgagaacaacctggcgaagttcaagaacgccgacgtgatcgggcatcccggcggttcggtgttcagccagttcgccagcgcgtccggctacgcctgccagggcgcaggcacggccttcatgccgtacctgctgagcaccctcgacacgctggcctggcgctacaacgtcccggagatggtgtaccccgaggcggtgatccccggcatgcgcgagatcggcggccgcacgacgctcaacctgtggggcaacgtctatccgcgcggcggcttcctgcatcagaccgacgactacaagagcggcgccgtcgtcgcgcagcgcgcgggcgatgtcgtcacgcggcgcatgcagccgcacgtctaccagccgctgctcgcgagttcgagcgacggctattggccggccggcgccctggtggagagcgatgcctccaccggcaagtggcaggagctgacgccgaccctctccaactcctgcgccgtgttcccccactccaacacgcgcgtgcaggcccagcaaggcgactacgcctgggcgctgtggcggccctatgcctgctgccagcgccgcgggcaggtcttcctcggcagcgtcgatttcctctga

SEQ ID NO: 170036 - DNA, 1404 bp, Enterobacter cloacae
atgaaagcgtctctctcccgtttcgcacagcgcgccaggccctacgcgctcagcatcgcgctcgcctgcgccgtcacggccgcagccggcgtcgcgtgggcgcagacccgcatcagccccaccggcgtcggcgtgagcggcagcgtcatcggcgacgacgtgctctacagcatcggcggcggccgggccgtgtccatgggcggcgccgggaacatgcagagcatcggcgtgggcatcggctggaacagcaacctgatctgcggaaacatgagcatcacgacgacgctgcagaaccagttgaacggcctcaccaatggctttcagcagatcatgtcctcggtgatccagagcgccaccagcgccgtggcgtcgctgccggccctgatcatccagcgcgccgatccgggcctctacaacctgctgaccaacggcgtgctgcaggctcggctcgatttcgaccgcagcaagttgacgtgcaaggcgatggccaaccggatggcggacatggccggcggccaggccgggtgggatcagctcgccgaaggtttcgcgctgcgcgatgcggtgagcagcaccgatgcggtgtccgccgtcgagcaggccgaatcgaacaagggcaacaacggcgtgccctgggtgggcggcggcaacgcgggcggctcgggccagggttccatcaaggtggtcggcgacgtgacccgtgccggctacaacctgctcaacagccgcggcgtcagcgacacctcatccatcccgcgcgcgtcctgcggcaaccggctgacctgccaaacttggtcctcgccgcaggccgcagcggacttcgcaacccgcgtgctcggcgagcgcgagcaacgcacctgcgagacctgcaccaagacgcagaccacgcctggcgtcggcctgacgccggtgatccaggaagagtacgagaccaagctgcaggcactgcagggcctcgtgacgggctcgacgccgatgacggtggcaaacctcgaagccgccggcagcaactcgctgccgatcacgcgcggcgtgatcgaggcgctgcgcgacgagcccgatcaagacctgctcggcaagcgcctggcgtccgaagccgcgctgtcgagcgtgctggagaaggccctgctgttgcagcgcacgctgctgaccggcaagaaggagccgaacgtcgccgccaacgagctggccgtgaaggcggtcgatcaggagaacaacgcgctggagcaggagatcaacaacctcaagaccgagctggagctgcggcgcacgctggccggcaattcggcgatggcgatcgtgcagcgccacggcacccgcgccgcgggctcgcgcggcatcttcgagggcgacacgacgcgcgaccggctcaaggaagtgcagaagccgcggagcgggccatga

SEQ ID NO: 170037 - DNA, 354 bp, Enterobacter cloacae
atgaccagccgggcctggctgcggccggcacggctgctcggccgccgcgttggcatcgtgctgctgtgggtgctgctggtggcgggcatcgcggtcggcgtgaacgtcgtcggcctccacatcgtcggcagcatcgacggctgggagcagtggctgcgcgagcactcgggccacttcctcgtctggcggctgctgctctacgcggcgacggcctacggctggtggtggatgcgtcggcgcctgcgcgaacgcgagccattggccgagacccatcagcgcctgctgcgcgccgagatcgcggccgtcgccaccctcgtgctgctcgaaggcagccagctactgcgcaatggctga

SEQ ID NO: 170038 - DNA, 1518 bp, Enterobacter cloacae
atgacgctcaacacaacggactacctggagtattacctgaccctggtcgggtggatcgtcagcaacggcatctggaacatcctcgtggccagcggcgtattcgcgctgcccttcgtggtcatggtggtgcaggaatggctgcgcgcgcgggccgagggtgcggacgagggcaacaagggggtgctgtcatcgatgcgcatcgagaaccgcgtgtgggtggcgatcgtcgtcatcctgttcgccggcatccccttcattccggtcgacctcagcaccatcaagttcgacacgacgcgctccgcgcaatgccaggtcagcgtcccgcagcccaccgacacgggctggtcgaacgcctacaccacgctcaacaaccagagcgcgctggtgccggtgtggtggttcttcatgcacgccatctcgaaggcggtgacgggcggcgcggtggcggccatcccctgcggaacggatctgcgtcagatgcgcatggacgtggatgccacgcgcatcgatgacccggtgctggcccaggaggtcggcgacttcgtgcatgactgctacggcccctcgcgcgccaagctgttcatgtctcggcccacgctctccgacgagcagatgaatgacgtgacctggatcggttcgagctacttcctgaacaacgcgggcttctacgacacctaccactcgaacacgccacgcacggcctggccctacgacgcgacgcgcgatgcggggctggcccaggtggatagcggcgggggctaccccacgtgccggcagtggtggtcggacggcggcagcggcctgcgcgcgcgcctgctggcccaggtcgatcccgacctgctgacgcgcatcggccgctgggcgggcttcctgtcgcagagcgaggtgaacgactcggtgatccgcgccgtggtctcgccgcggcagcagaagatgaaccagggctcggtctacaccgactacggcggccagatcgagaagacgctgcccaacgtcgtgacgcgcggcgccggcgacctggggctgaccatgggctcgctgggcttctttccggcgatggacgtggtacgccaggcgctgccgatggtgctgtcgctgctcaagatggcgctggtgatctgcatcccgctggtgctggtcttcggcacctacgagctgaaggcgctggtcgcggtgagctgcgtgcagttcgcgctgttcttcgtggacttctggttccagctcgcgcgctggctggacagcacgatcctcgacgcgctctacggctgggggttcggcgcgaaccggccgcacagcaacttcgatccgctgatcggcctgaacaacgccttcggcgacatgctgctgaacttcgtcatggcgacgatgttcatcgtgctgcctaccttctgggtggctgcgctgggctgggtaggcgtgcgcgcgggaacggcaattcaagggctggcggcaggaaccagggatgcccaagctgctggcggcaggggtgcgggtgtcgctatgaaagcagcgaagtaa

SEQ ID NO: 170039 - DNA, 372 bp, Enterobacter cloacae
atgaagaccgccgcacagaccaccttcgcagaacgcctcggccggacactgggccgggcgtggagaggctgcgcgcgtctggatcggcgggcgcagggctggctgctcgcgcagggatgggcgcctggcattgccaaggccgcgctgctggccgtcaagctcgctgcgatcggtgtcctgctctacaccgcgttctggctggcactgctgcttgcgttcgcgctggtcggcgcctgggtagtccgcaacgacgatgggagctacgacgaggaacacaagccggaatggcgatacggccctgccgggtacggcctctacacccatgacgattaccggatcgacccccacgatccagaagacgagcaagcctag

SEQ ID NO: 170040 - DNA, 465 bp, Enterobacter cloacae
atgcagcggcacggttggacgctcctgttccacgagggcgtgatcgagcagttgcgcaagctgcacgcggccgcggaacgggccgaacagaacgacccgcaggggttcgagagcaacgccaacgtcaagctgttccgggcgttgagccagttgatcatggatgtcgtgccgagcgatcctgcgcgcgacgaattccgccagggcaacaccttggggccggcctaccggcactggcggcgcgcaaagatcgggaggcggttccggctgttcttccgcttcgactccaaggccaaggcgatcgtgttcgcctgggtcaacgacgagcagaccttgcggtcgtcgggcagcaagtccgacccctatgcggtgttcgagaagatgttgggacgcggcaacccgccggacgattgggcggcgctggtggccgcaagccaggccgactggcgcgcagcagacaaggactag

SEQ ID NO: 170041 - DNA, 318 bp, Enterobacter cloacae
atgcccgaaatccacgaagtcgcgacgctgacctccaagggtcagatcacgctgcccaagtccatccggcaagcgctgggcgtggacaccggcggcaaggtggcgttcgacctgcgcggcggcgaagtcgtcgtgacccgcgccgacgccgaccatgaagacccggccatcggcgccttcctggggctgctggaagcggacatccgggccgggcggcacgtccagtccctgccggacgatctggcgcgggccatgctggccaacgcgcaccacgcggtgaacctcgatgaagacatcgaaggcgaagtggcgctctga

SEQ ID NO: 170042 - DNA, 1923 bp, Enterobacter cloacae
atggggccaaggggaaaggccctacccgaaaaggccaaaaggctctcccgaccggcccgccgtctggggttcgccatgctctcgctgttccaacgcaaacgggtgccacctgccgccagtgcgccaccgcccaaacctcccgccgagcccggcaaagggctgatgcggccggagccggccgcatcgctgctggcgacgccgcgccggcagaagctgctggaacacatctggcagcgcacctcgctgtcgcgccggcagttcgccacgctgtacctcgccccgctggaacgctacgccgagctggtccagcaattccccgcgtcggaggcccatcaccacgcctatccgggcggcatgctggaccacggcctggagatcgtcgcctacgcgctcaagctgcggcagtcgcatctgctgcccgccggcgccacgccggaggcgcaagccgcccaggccgaggcctggaccgcaggcaccgcctatgctgcgctgctgcacgacatcggcaagatcgcggtcgacctgcacgtcgagtacgcggacggcacggtctggcatccctggcacggcccgctgcggcggccgtaccgcttccgctaccgcagggagcgcgaataccggctgcacagcgccgccaccgggctgctctacgcccggctgctcgatccgggcatcttcgactggctcgccgactaccccgacctgtgggccgcgctgctgtacgtcctggccggccagtacgagcacgccggcatgctcggcgaactggtcgtgcaggcggaccaggcatccgtcgcccaggaactcggcggcgatccgagcaaggccctggcagcgccccggcacgcactgcagcgcaagctgctcgatggcctgcgctacctcctgaaggaagaattcaagctgaaccagccccaggcctcggatggctggctgacccaggacgcgctctggctggtgagcaagaccgtctcggacaagctgcgcgcgcatctgctgtcgcagggcatcgacggcatcccggccagcaacacggcggtgttcaacgtgctgcaggatcacggcatcgccttggccacaccggacggcaaggcgatctggaaggccaccgtcaccagcgatgccggctggtcgcacagcttcaccttcctgaaactgtctccggccatggtctgggatgcggccgaccggccggcgccgttcgcgggtcgcgtgcaggccgacgaggaacaaggggcgccgacaccgcaggcaccggcatccgaagcgccaggcttggaaagcgccgatacggcgccaccaagcatcgcgccgaccgtccctatgcccagcgacaacggcgtggctgcgctgctcgatctgctgagtgacacggccccacccgtagcgccggaggccccgagcgaacccgagcctgcctcgccaccggcgcctacggtgctgccgcagataagcctcgcgccatttcaggatcggccggagccatccggcgagcatttcatggcctggctgcgtcagggcatccagacgcacaagctcatcatcaacgacgccaaagccttggtgcacagcgtcgccggaacggcctacctggtgagccccggcgtcttccagcgctatgcgcaggaacatctgcaaatcgccgcactggcgaaaccggagaacctggagggatggcagtgggtgcagaagcgtttcgagaagctaggcctgcaccgcaagcaagccagcgggctgaatatctggacctgcgaagtcacggggccgcgcaaatccaggcgactgcacggctacctgctgagcgctcccgaagcgctgttccaggaaatgcctccggacaatccatacctgcgcctcctcaccgaggccgtaaagcgcgaaaattcagccgccggtaataagaacgacaacgaacaggggtag

SEQ ID NO: 170043 - DNA, 306 bp, Enterobacter cloacae
atgcaaaagcgttcgattcaaagaggccggcccaccgggacaacaacctacgaagcggaaccagccatcgcgtttggggcctccgtgcgcgaagaaagaaccagtcaaggcatcgcccaggaaacgctggctcatctgtcaggaatcgagcgttcgcacatgggaaagatcgagcgtggcgagcatgtccccacgctccccctcattctcaaaatcgcccgtgcgctgaaatgcagttctgcccacttgatggcgctgactgaagccaagctggcagagacggctccgcctaaatcagcggactga

SEQ ID NO: 170044 - DNA, 627 bp, Enterobacter cloacae
gtgaaatcgagcgatgcctccactgaaatccgggtggctgtgctcggcgagtgggtgccttcaccgcttgccgacttgctggcgttgcagcgcgccgaagagccagagaccgccaccgccttgatcggatgcagttccacagcgcaggcgcaggaactgccgcacgataactttgacttggccctgtccacagccgcctgggagtggccaggctgggtgtgcgagccgttgtggcatgacacgctggcagtcgccgtcgccaagcgctcgcacctgctgtcctaccgtgaagtgcctcgccaagagctgctcaagcagccgttgatctgcgcgcagtcaacggccgacgagccgtggcgcgcggtggcgcatggcctggtcgaggatgcaccgcagggccatgagcagaccgtcagcaccttcgacatggcgatgacgctcgtctccgcgggctacggcattgccgtcgcacccgccgcgagactgacctgctacctgcgtcgcggcatcgccgcgcggccattggctggcgcacccatcatcgtgatggcctacctgcttcgcccgtcctcgtccttgaccgagccccaggaaagattcgcccgccgcgcgcgctccgtgtcctga

SEQ ID NO: 170045 - DNA, 1857 bp, Enterobacter cloacae
atggcactctcagacttggtggtccgccaagccaaagccaccggcaaggcctacacacttccagacatcgatggtctctccctggccgtgacggccacgggcagcaagagctggcacttccgttactactggatgaaggagcccaagcgcatgtcgctgggcacctatcccgaggtgtcccttcgtgaggcacgcgccctgcgtgacgaggcgcgcgccttggtggccaaggacatcaacccgcgccttcaccgcaagcaaaagcgcgccgcggtcaaactcgccggtgaaaacaccttcgaggcgatctacaagaagtggcttgcccaccgcgaacgcggcctcaagaagggccggcagaccaccctctcgatcctccctcgcgtcttcgccaaggatgtgctgcccttgctgggcaagcgctcgatctacgacatcaaacgccctgacctgctggaagtgatcgccaggatcgagcggcgcaaggcgctctccgtcgccgagaaagtcaggacgtggttcaaccagatgttccgctacgcgctggtggtcgtgccgggcctggagcagaacccggcttccgacctcgacgtggtggcgctgccgctgcccccggtgaaccacaacccgttcctgcgcatggccgagttgccgaagctgttgcagcgcctgcgcaagtatcgtggccggctgcagacccagctcggtctgcggctgctgctattcaccggcgtgcgcacgggcgagctgcgcctggcgacgccggatcagttcgacctcgatcggggcctctggatcatcccgcccgaggtcgtgaagcagctccaggtggacatgcgcaggaagcgccagttgcccaaggacattccaccctacatcgtgccgctgtcggtgcaggccatcgagatcgtccggcacctgctcgaacagctcaaaccggcccagcactatctgttccgccacgacagcgagttgaagaagcgcatgagcgagaacacgctcaacggcgcgctcaagcgcatgggctatcgcgacctgctgaccgggcacggcatccggggcacgatgtccaccgcgctcaacgagatcggctacccgaaggtgtgggtggacgcgcaactctcgcacgtcgatcccaacaaggtcagtgccacctacaaccacgccgagtacgtcgagcagcggcggcggatgatgcaggattgggccgaccggctcgatctcttcgagcagaacatggtcgaggcagcgagcatgccgctcaccattcatttggagggcgtgcccgtcctctcggatgaggaagccgcgagtgcgccacccaaaccagcggccgcgtcggcgccgctcctgatcgtgaccaggccgggagacgcgatgccactggtgtcagccgagacgcatcggctgcccgcagtgccgttgccgcgttccgtcatggaggaaccgctgtccgacatacagcgccagcggatggaactggtcgatgtcttcgaggcaccacacaacctgccagtcgccgagtacgcgaagatggcgggcaagtcccgccggtggatcagctacgagatcaaggccggcaacctgctggcgctgaacctgggcaaccgtggtcagcgcgtgccggattggcatctcgatccggtcaagcacgcgctgatccaggcggtcctcaagctgaccaggggcgccgacccttggcagatctacaacgcgctcctgcagccgcgcgcgaagctgcgcggcggctcggctctggaaagcgtcagtgccacaaatctcgacaagatcatcatggcggtgagcacgacggtgaaggaaagcgagtggtccccgcagcaggtggcgtttgcgtag

SEQ ID NO: 170046 - DNA, 951 bp, Enterobacter cloacae
atgaaaaccctcaaaggtccctctctccatctggcccagttcagcgatgacgcggccccctttaatgatttgcctgcgatagcccggtgggcggcagaaacgggttttagcgccctgcaaattccggcatgggatcgccgtctcttcgacgtggcgacggccgcagaaagtcagacctactgtgatgatttggtcggtatgctggcggagcatggcctggtggtgagtgaactgaccagccatatcttcggccaactgatggcggtcaaggcctctgccaggcttggcctcagcgatctgggtaccttttctggctcgctggcgtggccctatttgttcccgttcccgcagcgcccggaagggttaattgaaaccgcctttgacgagctggccagacgctggatgccggtacttaacgcctgcgaagagcagggcattaacctctgctatgagatccacccgagtgaagatttgcatgatggggtgacgtttgaaatgttttatcaaagggtaaaagaacatccccgctgccggatacttttcgaccccagccacatggtgctccagcagcttaactatctggagtttattgatatttataaggacatgatcaacatgttccacgtgaaagacgctgaatttaatccgaccggtcgtcagggtatttatggtggctatcagtcatgggttgatcgtgcaggacgttttcgctcattgggtgacggccaggtggatttccgggccattttctcgaagctgacccaatacgattatgctggctgggcaaccctggagtgggagtgctgtctgaaaaacccgctggatggtgccagagaaggggctgcgttcatccgcgaccatattattcacattaccgataaagtctttgatgatttcgccggtgcgccggttaaccctcagcaaatcaacgcactactcggcattcgctaa

SEQ ID NO: 170047 - DNA, 741 bp, Enterobacter cloacae
atgaatattttttcatttgattgcttcgatcttcgagttgtccttaatccgcataatttttacgtagagcaagctaaatctagacttctatcacaattttcagatcttagtgctgaatgtgacctggaagaggaaagatatctcgaacgtacggctaaatactttgaccctgaaagagatgatccagcagaggcttgcgaaaatgcgacacaaataggtatagcacatatgcatgcattgatggatatgaaaaatactgtcactctagctatgaatgctggaatgtatcaccagttcgataaacagttacgtgatttaattcttcgagagtttcgtcattggaataaattaaaagctataaaagatattgtctggcgtactagttttgagcgaattatagaattgatggagtggataggtttcgatgtaaaaaataaaccatattttcatctactagatgcctgccgccttgttgtaaatgtatataaacatggagatggggtgggtcatgagaccctgttgcaacggtatccaaagtattaccagaaattatttggagaagcgttagctagccatgtgaatctacaaataacagaatccgattttgacgagttcagtttagcaatagtaacgttttggcaagatcttcaacaacattgccaaagcgaactagccttaggtatcaatccaacatggtggcctgaaaaggctattaacaaagatgttagacgaaagtgctaa

SEQ ID NO: 170048 - DNA, 768 bp, Enterobacter cloacae
atgctgcaaagactgcaggaaagcagaacccttgaacatgatatggctctggcgatcgatcacaatgaattcgttgtgtattaccagcctattgtcgattcattcagcaatgaaatttacggctatgaagcgcttattcgctggatacacccggtgaaagggatactcgcgccagattattttatttccgtcgctgaaaaaacgggaatgatcaatgagatcggcaagtcggtgcttgagatggcctgccgggaagcggtgtcctgggcggtgccggccaggatctcggtgaacgtctcccccgttcagctaggcacgaaatcatttaccgcgatggtgcagtccatcctgaaagagacagggctaccggccagccgacttgagctagaggtaacagagtcttcgctcttcagtgacagcaacatgccgatcactattctcaaaaagctccgggcactgggtgtcaaaatttctatcgatgatttcggaacgggatattcctcgctctcacgactgagtgaactgaattttgataaaattaaaatcgacaaatcctttgtgaacccgatatccacgcaggatgatgcccttaatatcgttaaattgattaccggcatggcgaagagcctcaacatgcgggtcattgcagagggtgttgaaaccgaagcgcagcttgaacggcttcaggcgcttggctgcgatcttgtgcagggatacctgttcggaaagccacaggctgagattgacaggaagattagatacggttga

SEQ ID NO: 170049 - DNA, 261 bp, Enterobacter cloacae
atgttcgatttttacactgagaaaacctatagcagaacggaagtcatgagtgcgcaatctcccgttcgcgtagctgttggtgctgctaacttttgtgatgttgctctcgccggttttccattcaccggaatcgacttcttgatgtcgcccgcacacaaccagctcaacggcctgcacttcgccggtatcgtcacgctgaatggagccggtgaaacgcagctggatgccgtcaacgctggctttacccatctaattaaataa

SEQ ID NO: 170050 - DNA, 630 bp, Enterobacter cloacae
atgacttcaaaaattaataaaaataaaatccttcttgtagaaggtcgtgatgagattaatttttttgatgctttattgaaaagctgtacgcttgatactattcaggttattgaatcaaaaggaaaagatcaatttccttttgaattggaactgattgtgaacgatccgggatttgctaacgtaacctcaattggaattgtgcgtgatgctgacaatagccagcaatctgcagtggagagtattagagcacaacttcaaaagcataaattgccttctccgactggtcaccttacattcgtcaataatggtcaaatgaatgtagggatatttatagctccaggttttactgatacgggaatgctcgaaagtttaattttagagtctttgggagagcatcctgtgaaagtagcatcaggaaattatattgataacttgcgtggtttattgcatccagaaaatgaaacttgtcagtataaattcccaactaatatacataaggctcgcatgcacgcttttttagctggaatggaaaaatatgttccaagcgctggtatggctgccctgaaaggatactttgatttaacgtcaccgatctttaatgatgttcgtggttttttgcgacaaatgtaa

SEQ ID NO: 170051 - DNA, 1089 bp, Enterobacter cloacae
gtgttaaacaaaataattttagaaaactttaaagggtattcctttttagagttagataaacttaaaagagttaatttaattgcgggcatgaataacataggaaaaacctcaattcttgaagcaatatacatgcaacatgataggttggctggggatctatttattgcaccacttgttcgtcgtggtgctcagcattttgatttgtctgcagagtatatatttcatccttattttaatgattttaattttcacaatccttttaaaataattacagaagatagtggctacaaaacgatagcaacttactcgatggtctctccattaaaccagaaagttgagattaataaaaatgatctttttatgaattcagtgttgtcatcgtcaatgaacattaataatgttatggagattgcttatgcatctaataacaaaccgcaaggaaagtctcggattcaaatagtaaataatcaaattgaaatgaatgttgaaaacttgatgcaagcgaatcgtcaagtggttttcgttcctgcgtcagcgagaggtaatagtgttacagatgcccagtttatgagtaaactggatttggcaaatggtattgaagagttcatatcatatttaaaaatgattgattctcgattaaaaaacgtctccttgctttctataggaggtatgccaaccatttatgttgatgttgggttaaagagaaaaatcccaatgattcaaatgggtgaaggtataagtaagctaacatctatattaacggcaattctctcaaatcagaatgcaataatattaattgatgaaattgagaatggtattcattattctttgatgcccaagatttgggagatattattcgctgcagcacaaaaacagaaatgccaaatctttgcaaccacacacagtcatgacgtaattgaaggggttgcaaagtacatgaataaatgcagtgagtctaaaagtgatattgaacagcagtcatttagctacataagattggatcgtgataaggaaggacttgttgtaccaaagtattatggcccttctacgctgttggcatctgttgaacgtgattgggatattcgctaa

SEQ ID NO: 170052 - DNA, 1071 bp, Enterobacter cloacae
atgctcaatcaatcatcctttcttaaaaaatgtgaaaacaacaactgttgttttttcaaaaactttaatactcttacaaagactgtaaatataaaaaaccttgataatatcaaaagcgatctcaatgatcttaaaaatagcattacaaaaaaaggagcccgtttccctttaactcttggccccgtagtaaaacgatataataagaaggtgagcaaaaaagaacagtttaaaggaaaaccttacttacaagatttgaggaatggagataattctctccttttggaaccacatgaaaccgtttctattcttagtaatgaatatgttgaaacagataatgaaacaggcgcacttatttttccaagattgagcctagccgatgtgggtgttgctttaataccaacttatgtcgatccattttggaaaggcatactccaaatgacacttgttaataacacaaaaaaaacaatcaaaattaagctgggtgaatcaatcggggtcatcttttttaatgaaatagatgaagccttagatgacgattaccaaaacgccttcccgacaacaagtcatcattttgggcaaacatgggaaaaaataatagatcaagatgcagagccattcttaaacaagaaaactcatgcagatataaatttaagagaacatattaaattaacactccaagaatacaaagatgcaatattcaaggttattagttttgcaacttttgtatccgtaatattcacagctggttatggttataatcaagtattagagttaaaaaaatcagtagatgagttcaaagaagaaaaacatacaccatatacaggaataacacaactgaccataaataaaggtgaaaaaaacatatccaaaaccatcgacataaatataaaagcaggtcttaacccagttgtacttacaaaatctataaataagatgaataatgatgatatccatgctacaatagctgaggcaaaaggtaacgtagttacaaagatatctctcactcttaacttagataagaagtcgacagataccaaagtaatagatgttcaatggatattaataccatga

SEQ ID NO: 170053 - DNA, 1779 bp, Enterobacter cloacae
atgaccggagaagccgcacgcggcgacggcattaacgcgctattcgacctgctgccggaaggggtgattatggcgctgaccatcgtcgtctggccgcaggatcggctggaggaacatttaagccgcctcagcgaccgcgccatcggtgagaacgtcgaatcggagtacaccaaaaaagactgtcaggaggtgcgccactggctgaaggacggccacaaactctaccgcagcgcgctggcgttttatctttccgccccggataacggcgaactgacccgacgcgtgcgcagcctgaacagcctgctgctgaatgcgggtatagtgccggtgcaggaaaatgacgaactcgccccgctcagttcatggctgcgctggctaccgatgtgcttcgatccggcgcaggacaagcgccagctctatacccgcttcagcttcgtacagcatctcgccaacctgctgccgctgtttggccgcgagagcggcaccgggcatccgggtgtcagctactttaaccggggcggcggaatgctgtgttgggacccactcaaccgcgaggaccgcgcccagaacagccacctgttgctgctcggcccgactggcgcaggcaaatcagccaccctgaacgcaaaaattgcgcaactgatggcactacaccgcccgcgcctgtttatcgtcgaggcaggcaattccttcgggctgatggccgattacgcccgcgagcatggcctgacggtgaataaaatcagcctgaaacccggctccggcatcacgctgccgctgtttgctgatgcctggaaactggcggaaagcgacgtgcttttgccagaaccagatgacgacgaccccgaagataccgacaacgagcagcgcgatctgttgggcgaaatggagatcactgcccgtctgatgatcactggcggcgagctgaaagaagacgcgcgcctgacacgctccgaccgggcattaattcgcgaagcgattctgctcgcagcccggctcaccgcccgcgaacaacgccagacgctgactcaggatatccgcgatgccctgtttacgctggcacaggatgccgcgctaccggaatcccgccgtaaccggctgtgggaaatgggcgaagcgatgaatatgttttgctccgggtttgaaggggaactgtttaaccgcgagggtgaggcgtggccagaggcggatatcaccctggtggatctggcgatgtttgcccgtgaagggtacgaagcacaactggcgatcgcctatatctcgctgattaaccatatcaacaaccttggcgagcgtgaccagcacctggcccggcccatcgtcaatattaccgacgaggcgcatatcatcaccgtcaacccgctgctggcgcggtttctgaccaagggctcgaagatgtggcgtaagttggggatctggctttggctggcaacgcagaacctgagcgacttcccggatgatgcgaaaaagctgctcaatatgattgagtggtgggagctactggtgatgccacccgaggaggtggaacaggtcagccgctttaaatctctgacgccggaacagcgccagctcctgctcagcgccaccaaagcgccggggaaatataccgaaggcgtggtgctttcgccgcgtgttgaagcgctgttccgcgtggtctcccctgccctgtggctggcactgggaatgacggagaagcatgaaaaggcggagcggatgcagattatgcgggagtttggatgtagtgagctggaggcggcgattaagatggcaatatcttaa

SEQ ID NO: 170054 - DNA, 279 bp, Enterobacter cloacae
atgttaccactcttcacatgcgctgcccccctcactgagcgcgaagagctaaccctgtccctcaaccaactaatccaaatcgaagcctcgctcaaccgcgcccagcaaagcgccagaaccggtatcaacgagcgctactacttcgactatctgcgcatccacggtgatatcgccaccctgcgcagcgggattgaacattacctcacccccacccgcgcccagccgagagatacggcagcgcttgtcgggcaataccgtgaggagaaaaccacaccatga

SEQ ID NO: 170055 - DNA, 372 bp, Enterobacter cloacae
atgactattgaaataaagtatgcgaaagacgttggcaatattgaaaaagaacgtttagtacttaaagcaacctctgatgatgaaattggtaattatgttctttttgataccacttatttagaggatggcagagtttcaaatgaaatgagacattctctttggtttcctgatagagaggtcaaagaaaatgaccttatcgtcgtttacaccaaggctggaaaagattccaaattagagaataagaatggcacatcatctcatttcttttacatggggttagggaatagcatttggaataaaaatggggattgcgcagttatcatgaaaataagctcatgggataacaaactaattatttccgagagtaaataa

SEQ ID NO: 170056 - DNA, 684 bp, Enterobacter cloacae
atgcccgaacatgcgtcaccgccgcctgcacgccgccccggactaattggctggctcgcattgttacccggcgtgctgattggcttttgcctcggtgcatggatgctggcgatagcgctgaactggctgggcgatgcgtttttctggcggagcacctgcgccagccatagcgaacaggtattgaaggcaacatggcagtggtggcggagttccgctggcgcaccggtgtggttagtagaaaatctggcgattgtcagcgataagctgcaacaagggatcgcggcgctaattgtttcactcaacgggcaaagcgggttgttctggacagagacggtcactacggtgatccgttgcgcattgctgtcttcggaaaatatcaccctcacctttctgctgcgactgtctattttgttgcaggccctgccgctatttgcgctggctatcatcatcgggctgattgacggactggtaagacgtgacttacggcgattcggcgcaggccatgagtccgggtttgtttatcatcatgccaggcgtatgatcggttccagcctagcggcaacgggaatagtatggctggcgttgccagttttttttggcctagagtatgtgctagtgttgggagcgatagctaatggtatggcaatatcagtagctatatgcactttcaaaaaatatttatga

SEQ ID NO: 170057 - DNA, 276 bp, Enterobacter cloacae
gtgcagcgggctgaaggggtcactgcccgcgtagggttacgcgcgatttctgtcagcaatgtaaatcgcaaaaactggcgcttgcgcacaaacggatcccgttgttatccggtgggcaccggaaaaatgcaggaagtccgggcggatagcgagacggctgtcggctggctatccgcccggaatgatattgaacaggagcgtaaagggtgttttgcgcgacgggagcgtcacgagcgcgaaccagcaaaacataccgcgctgttgggtatggcgtga

SEQ ID NO: 170058 - DNA, 1272 bp, Enterobacter cloacae
atgaagagtgcagaagggtatgtgtgcaaaatatacgaacgattagttaatgtttatcccgataaaccttggaataaatcctatgaatcaattgaacgaatgcgaggaggttttttactaaggggagggcaggctgaattaagtaattcgattactactggcttggcgtattttgaccaaagtggatatgatgattctgactcccaaggaaaagaccttatagaagaatcgatttactttattagtcaggtaattccatattgtgaatcagtattaagtggagggcatggtccagcgaatattgtcaagcgtttgcgtggtgcattttcaaatgataatgatatgagggctatacgatttgaatttttgatggttaattattttcgatataaaggctgtggtatttatttccctgacgaatctggaggcgatgaaacttatgatctgttgattcaaccaccatatgggttaccatttgaggtagagtgtaaatctttttctggagacaaaggagtcactgtttcacttgatgaaggggcgagtgttttagatgtcttaattaaacgacatggggatgagattagtagcatctctcctggtaaaggaagagttaaaattattaacattattctttcatctccagttcctactaaaagggattctctccatgatttgactggaagtattatggagacaattccggcaagcgggttattcgcttcagatgttttctctcttgaggttaaaacgcttaatgattttgatatggattcatatttagttgatgttgggaaaggtgaaaatgcattttctggtagagatcttctctgggatgaagctttaaaatttcaaggcggaatcgcaggttttattgtccatgagtgcggggatggtggtttggtttgttttcgagtttctagttcgctgaagaaaaaatattggaaggaaattgctgaggtagcaaaaaaagcagccagagaacagttgacaggaaaacgacctggtgtagttgctcttcagtttatcaatgagtcagttgagtacttcagtggtatccatttgaaggacaataattttaatatgctagctaaccgatactttaaattaaagcatataactaattttgtttttgttggggatatattgagaagtgcgattgataattttcctattaaagtagactctgtgctggttagagctataagaaataaatcttcttattttgaatctggagggatatatttgttgcttgatgataatgttaaactatga

SEQ ID NO: 170059 - DNA, 2313 bp, Enterobacter cloacae
atgaaaatcgcgccttacctgataatactgacgctgccgtttatctcgttatctgccagagcgaattaccatacccatattaacgccggagattctgtttctggcgatgttgttgatggctcaaagggtaatcagcatgtctatggcacgctgactaactccacgatcactggtccctatgcctatagctacattggcgatggcggacaaaccaatcacatcactgttaccgatcacggtgaactgtttctggaaccgggcggcagcgcttatgacacgcagataaccgccgatggtgttctacaggtcaatggttatgctgaaaactcctatgtggatagtggcggacaggtttacgttaacgccggaaataatggcgctgaagatccagaacaaggcggccagattgtgaacaccactattggcgctggcggcctggtcgttaatagatatggcatcgacacaaatacgatcgttgaagctggcggagaactggataccggctggaattacccttatgaaacccgcaacactgcaatttcccgtaatgccgtaatacaaaacggcggcattcagttggtcagcaacggcggaacaagcgaaggtagtcagatagaagatggcggtacattaatcgtcactggcacatggcactacaatgtcgtcaccgacactcagccttctgcctggtatcgcggcaccgctgatgacacggctgtttatggcacgatgcaaaatcagggcggtctcgataaaaacaccacggtgcagtccggtggacaatacgcattgggcggttatggtctctcccagcagctcaccgtagcacagggtggcagcgcccaaatcaataatggtgctctggatagcttctggctctatggactgatggacgtcagcaaccaggcaacgctgacaggcacaggcacagtgggtagcagcggcgaactggtacttagcgaaggcgcaaaaacttccggcctgaccttagcgctggatggcgtactttccctgcaaaacggcagtgatgctggtccgcatcattatcagattgcaggcctggagatggatggcgggacggtgctatttgacccaacctccttcgccacactgagtatgaaaacgctctctggcagcggaaatttctggatgaataccaatatcgccgcacaacagggcgatatgattaacgtctccggggaagccaacggcgattttgggatctggataaacgacactggcgaatctcccgccgctccgcagtcgctacaggtcgtacagactggcggcggcgacgcgcagtttacgctgttgaacccaaaccagctggtagatatcggcacctgggaatatggcctcactcccgacggtcagggcaactggtcactgacgccgcaggcaactcccacaccatcaactgaagccgttctggcgatggtaaacgtcactcccaccatttttcaggccgaagccagtgcgctgcaaacccgcctggacgttactcgttctcgtccgcatcagggagaactatgggcgcaggcgctgagtaatcgctttgacgttaaccacacaggcaatgcagcttatcgccaacggctcggtgggatgatgatgggctatgacagaagtcttcctcgccagactggcctgcttacactcggtattgcaggcggctacagccgttccgatcttgatctcgccaacaacagcaacggcttagtagacagttacagtgccgcgttatacgccagctattatgatcaaagtcgtttctggctggacggaatactgaaaggcaatctctttcaccagcatcttaatgcccgcatgagttccggcggccatgctgacggcagttacaccatccccggtatgggtggcagcctggttgctggatatgacgccagatttgccaacaccaccctctccccttttgtcggtttcactggcttcatctcgcaaagcgatgattactggctgtcgaacggtatgcaggcgcatcctggtaaggctaaatccgcgctggggcaagtcgggttccggctgcgccagaatattactactcgcagtggtatgcagttcattccgtggctgaaagtcgcgctggagcaggagtttgtgcataacaacccggtcagggttaatgacgataatttcaataacgatattgccggaacaagaggcagttatcaggctggcatcagtgccccgatcacgccgcacacgcatatttacgccagcataaattatgataaaggtgatgggatggaatcgccttggactgggagtctaacttttgctgaggaattttaa

SEQ ID NO: 170060 - DNA, 1515 bp, Enterobacter cloacae
atgcccgactggaagcgaatccagccagtgccagtatggagcgactattcagggtatttaccgtgctgggtgttgaaatggtactctcttctggaccacagatactttcctctatgtcatcttcaacaatggatgaatcagaacaacaaaaagattcacctgccagaagggaaaaatggtgacgatatgcgtcgaacacagcagcgtttagcaatatggatgaatggaatccgggtcggattctgggagaaggccagaggcgaggattcattacaatatcttccagaatgggtagttgatgaacagggaagacctttatcgctttctttgcctttcactcccggtaatcagctttggcgcggtaacgttgttcgtgactattttgataatttattgcctgacagcgaaggtatacgcaggcgtttagccgtgcgttaccagtctgaaagccttgagccttttgatctattggctgagctgggaagagactgcgttggcgcaatacagttactggatgttgatgaagagcccacggatttattttccgtaaattatcgcccactttctgaagctgatatagccactacattgcgtaatactacggcggcatcgttgcctggtcggcaggacgaaactgacgatttgcgtttatcaattgccggtgcgcaggaaaaaacggctttattgtggcatgaagaacaatggtgtttaccagaaggtaataccccaacaacgcatatcttcaagctaccgcttgggttggttgggaacatgcaagcggatatgagtacatcggttgaaaatgaatggctgtgttctttgcttcttgagcactacgggatccctgtagcaaaaacgcagattgcgcagtttgaagatcaaaaggcattagtggttgagcgtttcgacagaagatggtcaggcgatcggcaatggatcattcgtttgcctcaagaggatatgtgtcaggctttaggtgtttctccgttacgaaaataccagtctgatggtgggccgggtatttccgatattatggacatattgagtcattcagatcaggctgagcaggacaaagagcagttcttcagggcgcaaattattttctggttgttggctgctactgacggccatgccaaaaatttcagtatcgctattgagccacaaagtcattaccaccttacgcctctttacgatgttttatcagcatggccggtaattggtcatggtaataatcagatttcctggcagagatgcaaactggcaatggctgttcgcggtagcagtaattattaccacatttatagaattcaacggcggcattggatcaatcatggtgaattaaccggattgggaaggcgacaagttgagtccatgatggatgacattatatccagcacgccagaagtcattgagcgtgtatctacgttgcttccagagtcgtttccacctgagcttgctgagtgtatttttgaaggtatgcggcagcagtgtaggcgtttggctggaagggaataa

SEQ ID NO: 170061 - DNA, 672 bp, Enterobacter cloacae
atggctttcgaatggaaagaaattatcacacctgttgcgacgctgactgccgtttggctaggggcgagatttacactgcgtaatgaattgcgaaaaaaaacgctggaaattcagtctgaaaaactagaactgctcttcactgaatgctccaacgttttgaaggatattaaccgtgtgtcgttggctgtattacatacccttgatgattttatacctactactgaatcggaagggagtgttcctgaacaggcaattcaggaagctctaagaggatatagggagaaaggcgttgttattgattttgatgccattactgcttgccagcataagcttgaatttcatcggcctaaagagtaccaggcatggattgtagcgctcataccattgcttgggactctgacgaaaatgacaccttataacaatatgaatcctatcgccgaagctgataaccgaaaatggagtcaccaggagttaacattgtaccgtcaggagttagacgagaaacggaacacactgccaatactaagaaagcgtttaactagtgctatggcttctgactatcgtcaactcgggctcagcagtgagccagcaaatttttgggtatatgtggagcgctggaaaagagtcgtgaatgccttctttcacaagccgcctacgtcacctttaacataa

SEQ ID NO: 170062 - DNA, 357 bp, Enterobacter cloacae
atggccaggggccagcatggccatacgctcaacgcctggctttgtggattcaaaaatggtcagccattcctggaggctacgggtaccaacaccggcacggctggagcctttgcgggcattggccatctcagcagccttaagcagatgtgcaggcagtgtacctttacgagactcgatagagatgtagttaaccgctgcggtacgggacatcccggcatcgcgcagtttctccacttccattgccagaacagcacgagcatcggcgatctctttctgtttatcagtcagagagcccacttcacgctcaagaagagccgggcactggcgaatcagagcaagtttaccgttatcagatga

SEQ ID NO: 170063 - DNA, 972 bp, Enterobacter cloacae
atgagtaagatttatgaagacaactcgctgactatcggtcatacgcccctggttcgactgaaccgtatcggtaatggacgcattctggcgaaggtcgaatcacgtaacccgagcttcagcgtaaaatgccgtatcggtgcaaacatgatttgggatgctgaaaaacgtggcgtactgaagccgggcgttgagctggtggaacccaccagcggcaataccgggatcgctctggcttatgttgctgccgcgcgcggctacaagctgacgctgaccatgcctgaaaccatgagcatcgagcgtcgtaagctgcttaaagcgctgggcgcgaacctggtgctgaccgaaggcgcgaagggcatgaagggtgccattcagaaagccgaagagattgtggccagcgatccggcgaaatacctgctgctgcagcagttcagcaacccggctaacccggaaattcacgagaagactaccggcccggaaatctgggaagataccgacggccaggttgacgtctttatctccggcgtaggtaccggcggcacgctgaccggcgtgtcacgctatataaaaggcaccaaaggtaaaaaagagctgatcaccgttgccgttgagccgactgattcaccggttatcacccaggccctggcgggggaagagctcaaacccggcccgcacaaaattcaggggattggcgcaggcttcattccgggtaacctggatctgaagctgattgataaagtagtcactatcacgaacgaagaagccatctctaccgcgcgtcgcctgatggatgaagaaggcattctggcaggtatctcttccggtgcggccgttgcggcagcgcttaaacttcaggaagatgaggcctttaccaataagaatattgtggttatccttccttcctcgggtgagcgttacttgagcaccgcactgtttgccgatctgttcactgaaaaagagctgcaacagtag

SEQ ID NO: 170064 - DNA, 438 bp, Enterobacter cloacae
atgattcatctcgatacgttgtcgacccttgttgccgcaacgctggtgttactgcttggccgtaagctggtacatagcgtttcccttctgaaaaaatacaccattcctgaacctgtcgctggcggcctgctggtggcgctggccctgctggtgctcaaaaaaagcatgggctgggaaatcgattttgacatgtccctgaaagacccgctgatgctggccttctttgccaccatcggcctgaacgccaacctggcaagcctgcgggcgggcggtaaggtgctcggcgtatttttgattgtggtggtggggctgctgctgatgcaaaacgcgattggcatcggcatggcgaccttgctggggactggatccgctgatggggctgctggcggggtcgattacgctgtcaggcggtcacggtaccggggcggcgtggagtaa

SEQ ID NO: 170065 - DNA, 558 bp, Enterobacter cloacae
atgcgtaaaattaaagggttacgttggtacatgatcgcactggtgacgttaggcaccgtgctgggctacctgacgcgtaacaccgtcgcagccgcagcgccgacgttaatggaagagctgcatatctccacgcagcaatactcctacatcattgctgcctattccgcggcgtacaccatcatgcagcctgttgcaggctacgtgctggatattctcggtaccaaaatcggctatgccttcttcgccatcgcctgggcggtgttctgcggagccaccgcgctggcgggcagctggggcggcctggcgctggcgcgcggtgcggtcggtgcggcagaagccgcgatgatcccggcgggactgaaggccagttccgagtggttcccggcaaaagagcgctctattgctgtcggctacttcaacgtgggctcgtccatcggggcaatgattgcgccaccgctggtggtgtgggctatcgtgatgcacagctggcagatggctttcatcatttccggcgtgctgagcttcgcctgggcaatcgcgtggctggttttctattag

SEQ ID NO: 170066 - DNA, 222 bp, Enterobacter cloacae
gtgtatcggttccgaacgggcggcattagctacagccgcgacaaaatggacagcaattttgcctccgtgcgggagcagagcggaatatccgcaggctccggcgggtttgacgtcacggtgggcggccacacgcagctggacggcggggtgatggcctccacctccacgggggataaaaaaccgcctcgacaccggcacgctcggctggcgggatacccataa

SEQ ID NO: 170067 - DNA, 732 bp, Enterobacter cloacae
atgaaaaagcatgctttcgttatcgcaatactactgacattgactcaaagcactcttgcagcaccgcgtttaattgaggctgggagttataaccttaagatgtctgaacgcccgaatgaatgttttccacatttagggaaatataactcatcccttacggcaaccggagatggtgcagaataccccattaagctttcacgacaccatattatcccctataatttattacgtgatttttataacgctgttatagcagacggaaaagttacccgactcgctggctttctgaataaattgagcagcaaagcagtcgagtataacgcgtcaaattgccatagcgatgacattcaggggggggcctcgcttgcagcgatgatcgccagtggaagcatcaccgagaataaagacaaaacggagtctccagattataaagatgatttcttttcattatatatctggatgcccggaaatctcttcccaggtccggaatccaaaaaaaggtctgacgatccggaagaagcctttgaatcaaaggcaggagatattgtgggcccagattttacccattatcaacagctcatcaatgagatgaaagattatataaaaaaccatgatgacacaaaattatccgggataaatgctaacctggaatttatcgcaaacaagacaacaagctatcccttagacgcaacaaaatgggaaaaaatagacgaaaaatatcgactgaaatag

SEQ ID NO: 170068 - DNA, 285 bp, Enterobacter cloacae
atggtgcttcacaatgacagtgttaacaataatcacggcgtttaccaccacggattcgatacgctaagattaattctttcaattgcaattttattcctgcattttaattggaaaaatcttcctcagggatatttgtctgcggatatgttttttattctttctggttttttgatttctgtttcagcaagtcgcaaaacatcacaaccaagaataattggaatatttaagaaactataccctcaatatttcatttcaattgtgaagcaccattgttatctttcctga

SEQ ID NO: 170069 - DNA, 498 bp, Enterobacter cloacae
atggcaattattttgggtgttttatttgtgataacattaacacttagcatctatcagttgcggaagataagaagactatcatcccgaattaacacattggaatccgttatcctgggtgaacggacgggaaagacaattccttatgaatcgttgcaccttctcaatattttgagattacaggcacgacaatggactagttcggaggaaaatcccgctttattaactatccggccagtttgtattgaactgctggatgattatatgtctaaacttttagcttctattccagaattgaatttgatgatagaacctcgtccttcatatgcatcgctatacagtatcaattctgtaatgttctacatcgatagtgagaaacatgaaaagttgcctattcgctttcattgcgccaatcaagacctggcagagcgcattgcaaacttgttgctatcgaagggcattgaagctcgcgcagcgattgaaatgtcacacgtagattag

SEQ ID NO: 170070 - DNA, 252 bp, Enterobacter cloacae
atgatgacacttcttttttcgatttactgttccctggtcattatcgcgggcgctttctttagctggtttcaacgtgaaactatcgctacccgctgcattctttttggcggactggtgatagtagcagcgatcaagctaacaacggattttacgactgtcgctgtttccacggttctgattgagggatttttgctaacggcttatgttattgctgtccgttttattcagtgcattgtaaacagggctgcataa

SEQ ID NO: 170071 - DNA, 207 bp, Enterobacter cloacae
atggaactatcaacaatttctgaagcgttgattggtggtttagttggtggcactatcgcagcaggttccatccgggtattattcattccagaaaagtttgagtggatattgttagcctgtgttgtccttgccactgttgttacctttttctttggccactctataccaaatccatttatgatgataagcaacatgtatagttattga

SEQ ID NO: 170072 - DNA, 456 bp, Enterobacter cloacae
gtgaaacccaaagcagagattcgagcagacagcaccgcccgcgtggtggagactatcggcaaagaaatggcggagtggcagcaaactgattacagcatgtctctgctacctaatttctatccgggagaacgtcagcgctgccatgatggacagctgatcgttatcgaccgggcagacttcacccgctcaatgtggggcggctctccacagttcgctgccgatgcccgtaaagcacaggcttttaagcaggaaaaacgccgagaacgggcttactgcggcatctgcgacgctgagcgagaagcgcttgccactgccctaatgctggatctcttcggcatcactgaactcgatccgattctggcccagctgcctcacctcgatgcgctggagctgctgacggtcgaggacagggataaaaaggctatcgcggaagcgtttagcggatggctggggtag

SEQ ID NO: 170073 - DNA, 861 bp, Enterobacter cloacae
atgagtattcaacattttcgtgtcgcccttattcccttttttgcggcattttgccttcctgtttttgctcacccagaaacgctggtgaaagtaaaagatgctgaagatcagttgggtgcacgagtgggttacatcgaactggatctcaacagcggtaagatccttgagagttttcgccccgaagaacgttttccaatgatgagcacttttaaagttctgctatgtggtgcggtattatcccgtgttgacgccgggcaagagcaactcggtcgccgcatacactattctcagaatgacttggttgagtactcaccagtcacagaaaagcatcttacggatggcatgacagtaagagaattatgcagtgcttccataaccatgagtgataacactgctgccaacttacttctgacaacgatcggaggaccgaaggagctaaccgcttttttgcacaacatgggggatcatgtaactcgccttgatcgttgggaaccggagctgaatgaagccataccaaacgacgagcgtgacaccacgatgcctgcagcaatggcaacaacgttgcgcaaactattaactggcgaactacttactctagcttcccggcaacaattaatagactggatggaggcggataaagttgcaggaccacttctgcgctcggcccttccggctggctggtttattgctgataaatctggagccggtgagcgtgggtctcgcggtatcattgcagcactggggccagatggtaagccctcccgtatcgtagttatctacacgacggggagtcaggcaactatggatgaacgaaatagacagatcgctgagataggtgcctcactgattaagcattggtaa

SEQ ID NO: 170074 - DNA, 3006 bp, Enterobacter cloacae; identical to SEQ ID NO: 10984

SEQ ID NO: 170075 - DNA, 156 bp, Enterobacter cloacae
atgaataataatcacaatgtttttccttgcaatgaattgggtatgggtgattccaaatcggaattggaaagactccttgaattatgtgaatccactccgcaaacaggcgagcctaacccccagatagctaatatgcaagcattttggaatcgataa

SEQ ID NO: 170076 - DNA, 636 bp, Enterobacter cloacae
atgatcattatttctcatagagggtattggaagttgagcagtgaaaaaaatactgctttggctttcaaacgctcattttctttaggttatggtactgaaacagatattcgtgactataagggtagtttagtcatcagtcatgatataccagatgagagttcattaagcatagactctttttttgaaatttataatcaatatgatgtcaaaggccctttggcattaaacgtaaaatcagatgggctgcaaaaactaataaaagaaaaattaaacgagtacaatgttagtaattattttttctttgatatgtctatcccggatactcttgggtatttatcagaaaaactaaatacgttcgtgcgtgttagtgaatatgaaacactaaacgatctctatgaagatgctgatggtgtttggattgacggtttcaaagaaaatattataacagaatctttactcgaaaaaattatttctgatgggaagcgtgcttgtattgtatccgctgatctgcataaaaacgatccagctacgcaatggaagcttttaaaaagttttaaaacaaatattcttcagtcgtcaaatattattctttgtactgatttacctgaaaaagcgtcggagtttttctatggataa

SEQ ID NO: 170077 - DNA, 264 bp, Enterobacter cloacae
atgaaagagtttaagggtacgcccggcgaatggaattacagccatgctcgcggcgaggtggtaagtaagcctgaaggcctcatagcagagcttgtcgttaacgggtgtgaggataataacggcagcctgatagcagcagctcctgatttgctcgaagctttgcaatcaatcattgagctgcagactcgcggctatgttgttcttggtgacaaatacacagacatggctcgtgctgccatcagcaaggctcttggggaggagtga

SEQ ID NO: 170078 - DNA, 378 bp, Enterobacter cloacae
atggataaatatgcaatggtaaccgatggctcagtcgtaaatgtcgttgaatgggacggcactggaacatggaatcccaatgaagcaggagctatcctgtgtccagtcgaagttgctgttgggtggctttataatggctcatcgttcaccgatccaaacgtaaagactgatgctgaactttacgagaaagaaatggaaggaataaacataagatatgaatcagaaaaatcaattctcgcaacagcatttctcaatgcgggtcttttcgatggcaccgcagaacagcaaaagaaagcggacatacaactaaaactgcagacacttaatgattggtatgttcagagcatagaggagttggataacaaatatggcgaatga

SEQ ID NO: 170079 - DNA, 1059 bp, Enterobacter cloacae
atgttaaaaagcattcactatgctagagggatggcagcactactggttgtgctttttcacttttcattcatgtacattggaaaagtagagccatataacaccatgttccttaatggtggattcggtgttgactttttctttcttattagtggatttatcatttcttttgtgacacagaagaaaattagcttgcaagcgtttttgttaaaacgattcttcaggatttacccgttattcctgttcattctcattatttcatcaatttatcttgttagatataacgtgcatcctttatggagcatgatgaaatctggacttctaattttgcaggactacaatagaccagcgccagagtttgactttaacttcattgggcctgcatggacgctatcatatgaggcatggttttatcttatctttggtatttctatgttcattaaccataacaaaaggattgagatagcttcattgctattaatagcgcaggtattcatattgcaatttacattctctggctcgatttcgcttaactcttcctatgtaggttctataggtgactcatcttatttagatcatgccattaagtttttcagcacatccttacacctggaattcatagctggcatgtggttgttcaaggcgtttagcagaagttctctaggaattttcggtagattcacattgccgcttgtgttttcccttacagctgtatcaatagcattatacttttctacgttagtttatggctctggattcaccagtttttatataattgcgcttccactgtttatcgcactgatattgtgcgaggctaatttcaaattaccaaaatcaagaatactgactttcttcggtgacatatctttttctatatacattacccatttcttcataatgtatttattccttgagcatttcgctgacttcctctcatcctctagcaatgtgatgaagcttgtcgtgccaaccatagccgcaatagtatttgcttatgtgctacataaattagttgaagcgccggtaatcaaggcgtccaaaaagattattaaccataagtga

SEQ ID NO: 170080 - DNA, 1167 bp, Enterobacter cloacae
atggcaaaaaaagtcaagaaacatgacgggcgtacatcggacttaacgtttaaatggatgctcaccacccttggccctgagtgggagcaatggcaggaattagccgctgagtggatggcgacacagcatgtgggggttgaccacaagctttccgcgttgagccgtttttttgagtcctacctgttggagtgcgctccctatgcaactgatattggtctgtttttcaagggctacaatggccatatctgctccactgaagagctagaagctactgtgagaaaaactattaacgaccccgtcaaagtatcaaaatctatcaaccacctcggtgacttcattaattacgtcattgagcatcatctatctgaagaagatgatagcggcaacttaatgccactggttcgcaatccgctgagcaaaattaagaggcaacaatcacacactgaaaccgtgcgtaacccacttccgtatcgttacatccaagacctgcgccaaattctgtgtccattgccagataaagcggaactgacggtgattgagcaaaacctaccacaaggcgagtcgttactgcctagctatcactaccgacatttcaagcattggacatgggcacaagagcaggcagggcaaaggaaatcaggtggcgattggtttgaagttgagcctgacttgattgacaaatctgaccccgattgtgtgtggcgtaccaaagaggtgactagagataataaaagaatcaccctccaccaaatctggtcacctgtcaaagcgatggttatatttatgaagctgcatctgccactgcgcacctatcaagtgcgtatgttagacagtggtgaagcggatacgtggcgttatgaaagcggtcgttggaagctcaatgacaagcatgactttgcgctcggtagcgaaaaacgcccttttggtaaaggcatcattcgccgtatccatgacaccatgacaggccagtattccacaggtttatatatcaacaccaacaaaaccgctgaccaaaataaagacgaacttgagcggggctacatcatcccttggcagaatgaggaagtattatattggctggaaaaactgcgtaactggcaggaaaaatacaaccctatagtgaaaccgacagactgcaccacgctgttggtaatgactccaacttaa

SEQ ID NO: 170081 - DNA, 363 bp, Enterobacter cloacae
atgaccggtgagtctggcaacgtgctggagctcacgaccatctttacgacaaaggcgcaggcgatgcatgtagttcaggcgaagtgggacaggataacgcatgaaacccttgccagattcatctttaagcctagcgagatagtgccagccccgcccccccttctaagcacaaccaaggcaatctttggctataacctgcttcggcaggttttattattcttctggcgtggccattcgtggacactacgcaatctgcgtggacattctatggacactgaagtaaaagaccaccttcttagaaggtggctttccagaatgccccctgtaaggggggctattgtttccttcctgtttctactctag

SEQ ID NO: 170082 - DNA, 258 bp, Enterobacter cloacae
gtgtgcgctcatcgggtcttccgaactaacctttttgatgttaaagaaataatccttcgtagcgacctcgctcagcggcacgattttgataccatctgccttaccggcgtgacggcgaaatgcctgcacaccagagacccgaaaccgcaaaagcaaaaggtgaagctcaaacgcaaaccgaaagagaaatacctgtgcgcgctgcagcacccgaaagccgtcaaagcaccggcaaagagccaggtgaaaaaggagtag

SEQ ID NO: 170083 - DNA, 2028 bp, Enterobacter cloacae
gtgaacgttgaccaatttagagtactatgtgacagtgttatagaaattgatgcccccataaatgataaccaaaaagatgcttatgatttaattaaggatatttgcaaggggcactctgaatatatatcaaaaaaaagccgctctctcctaaagctattcatatttgagagtgttttttatgaaagagaattatttccctacatgagcatcttgaaaataatatttgatgcatctaggattgatgataaaaaagagaatcaccaagacgtctctgaagctataattaatgaaatatggcgccagattgtagaaattgcatataacaccagagaatcatcatcgcattaccaagacaactcactcccaggtgtttacagtaaagaatttgacttttccttaagctgcaaaaaattagcggcacgtgggataaagttcactttcctagacgatgacatcttaatcgataaaggctcttatcatatcgttttagaggaaatagataggtatattaaagccattggtggaattaatatacttggattatcatttcaatctctggcaaaaaactatgtatcctttcaagagagatttcagatatttagaaaaaccactcaaggcctaaatcaaccatccccagacattccatggggatatataattgctctaggcacaaagaaccactctgtaaatggaagcttaaatcgcgcatcgacatatagagagtttctttcctttgtagattatttaactgatattgtgtgcacatttgaaatacagccatacattatgtgggaagacgtctatgtcgataacctaaaagctgtagagttcctccaaaggaacatattgtttgataatctcatttcattttttcaactcaaaagcagctatgcaatagatttaattaataacatttcatcttattggaaacaagatttcttaagtagttataagcataaacttgatgacataataaaaatcggattgagtataattgaattatcaaacccacaaacaatctccttcctcagtaaatcaagcatcagcaagcgaagcggactccaactcaaagcagcagaaaacatcattaacgatatattcactatatcaagtaatatcgatttaggattcccgccagcaagtgaagctattgatcatgtattaacaccacttattcctcataaaggctcttaccttacacttccgaaagggattacaagcctttcagttctgaattgtgtgcttaatcaaataagcaaaccagatgggatatttaacaaccctaaagatagttccattgggaactttctggagaaatttgtatggggtaaattaaatgcccatggtataaaatgttacagaggtgattttctctcaaaggataaaaagattaaaggtgattgtgacatccttattaaagccgatgattgcatttatttatttgagattaagaaaaaagcattaactcgaaaggcaatgtccggaacagatattcagataatcaaagatctcgcagatagcctgatgcgctcacaatcacaatgtgcgaaaattgaatatgtgttccttagtgataaggagttgacactaactgatgacaacatagaaacaacaatatcatacaataatgagcgaattttcaaagtttctttaagcctacatgattttggggcattacaggatacaacaattcttgcatccattttacgtttctccatgcagataacattcaactcttcagatgaaagagtatctgatatgctttcgaattgggccaactatgtcagcatctttactgattacacacttaaatcaagagaactccaaccggttaaagatgattttttccgagataatattttcatgagcatcccacaactattaactattctagatgattgtcatgatgaaaatcagttcagcgacatatgtaaaagacgacaacacatgagttactctacgcgatgtttttacaaagaatatagtgaacataaaaaactgaaagaatatagcgaaaataaaaaatag

SEQ ID NO: 170084 - DNA, 225 bp, Enterobacter cloacae
atgctcgccctgaccgatatagtgttagctgaagggcagaaaacgcatgtgttacgccatacatttgcgagtcattttatgatgaatggaggtaacatattggtacttcagcggattcttggtcaagcgaacatacgtgagacgatgcgttatgctcattttgcaccagatcatttagaggaagttgctcaattgaatcctgttgcaaaccttattaatcattga

SEQ ID NO: 170085 - DNA, 1005 bp, Enterobacter cloacae
atgtctaccaatcgtactagatactcttttttaagcccaatgagtgtcagcgatagcgccagtgttttttttgcggccctcgattttttttcagtcactgggcaggccaaggtcagggcaactgtagctatacctcaaaccagtagtgatatacttcctctacctgctggtcatttcatggattatattaaggcattgaagattttggctgagcctgatcgccacatgcaaaatatacgaaagttgcttaataaaatggaagaggtaggtttgttagtacctatggggaattccggtagtgtgcttttcccaaccaactattacttcttgaaagaattaactgagagggaaatgaatggccggttctggttgtctgaatgcttggggcctgagtatgtgtataagtttttcggtaacttaataatgcatatcgtaggattaacttctgagggagacgaacatggaggtacgggagttattatcagtgataaactgcttttgacatgtaagcatgtaattgatgaaatgaatatcaatgatactcaaaacattaatggcaccgattttaaagtagtcgacactcacacacataaagaaattgatgttgggattattgaatttgaaccaaatagtttcagtgtgaatgggaatgtgtgttttgattctccacatttaaatgatgatgtatacgtattaggttatccaccaattccatattcaaaagaagcagcccctataatgcagaaaggtgagattactaacccaaaaattactacgttagataaccacactgtgtttcttttctctgctatagctagacctggcaatagtggaggtccgattattgctaggaatggcaggatccttgggatagtcacaaaagagctatcacttcaagaaagtaataatttcccgttctttgcggggattccaacaaatgtaatagtgacggcactctcggatatggggtttggagggatactgcctattgaagattatcaatag

SEQ ID NO: 170086 - DNA, 540 bp, Enterobacter cloacae
atgagtacagccaacgtccatctcatcgtcacctgcacgcgccgcaaaaccgtggctgcaggtgatgcggtctatccggatgatagtgacgtggagagagcttacgggctctggctggaaaggctggcgcaggcccgtcactgctcgctccccatgagcgccggcgagctgtatacggggcagcactggagcagggctgctgcagcagcggcgcgtaatggtgctgagatgtggattatatccgcaggcctggggttactgcatgtcactgatcacgtggtcccgtatgaggcaacgttcacctcgatgccgttctgccatcgcactcactgggaacgacttacaacgcgtccacctacggaacgacggtgtacctccctgagtacgctgatgcaggagaggcctgacgatcgattcgtggtggtagcttccccggtgtacctgcgtgccgttgaatcagaccttctcgcgggaagggacgcgctacgtgcatctgaacagctgcagttgtcacttcgaaaggctaccaggggaagctga

SEQ ID NO: 170087 - DNA, 597 bp, Enterobacter cloacae
atgagcaacatcgacaaacgcgcattacgtgatagcgcagaaagcactatcagcattctggaaaatatcgccgggttcgagccatctgatatcgatggcgactctgtagagctccgctttgaaactgaggacggtttcgatactggttgtgactttagcattgttgaccagtgccagaaagcggctgatgtaattcgtgcgctgctggatgagctggaagccaaagagaaatatgccaaagaccgcgacgctgaaaatgaaggcctgatgcttacggttggtcggttgcgcgccgagagggaagccgcagagaagcggattgctgagctgtctggcgagttctttgcgcttccgcctctgaatgatgatctaatagctatccttggacgcccgaacttcacctgcacccatcttgccgaactgcttcgtaaaaatggtcagaatattcgtagaaaagctgaatatgagcaggcagcagttatctattggttcctcgacctgtacctgaaatatggtgataagtgggaaagcatagcaaaagacgatattcaggcgcgtgcagcgatgattacagccgcagccggcaaaggagagtga

SEQ ID NO: 170088 - DNA, 567 bp, Enterobacter cloacae
atgacgacgcgggtctttaaacccctcaagctggaccatacctggattaacgtcccgaaagcggaagaggcgcattacgcctggggataccgtgagggtaaagcggtccacgtttcgccagggatgctggacgcggaagcctatggcgtaaaaactaacgtgaaggatatggcgagctggctgatagccaacatgaagccggattctcttcaggctccctcactcaagcaaggcattgctctggcgcagtctcgctactggcgcgtgggggctatgtatcaggggttgggctgggagatgctcaactggccggtcgatgccaaaaccgtcgtcggaggcagtgataacaaggtggcgctggcaccattgcccgtggcagaagtgaatccacccgcgccgccggtcaaagcctcctgggtccataaaacaggctcgacgggcgggtttggcagctacgtggcatttattcctgaaaagcagctcggcattgtgatgctggcgaataaaagctatccgaacccggcacgcgttgaggcggcataccgtatcctcgacgcgctgcagtaa

SEQ ID NO: 170089 - DNA, 555 bp, Enterobacter cloacae
atgtcttataactacggctattatcatcataaacgtgagtatgttcacttagaatcattacagatgatgttattggctgaattacacctaagggaaaaattcagcttagaagtcaaatgccatgatatcttatcagaaaatgatgataaccatgggatacaatatgattttttgttcacaaataacaaagaatcaattttttttaccgaaccttccgtattaataaagaattttgaatccagagaaaatcaacgttccggaagaacttttttcccttgttataaaaaggagttaatggatatagcaatcacaagaaaagatttgccaaagtttattttttctcattgtacttttaatcgttgggcaaacaaatttatagttactccacaatctagtgaaataaaaaataacattgagattaacacagagttagatcttgtgtatcaatattataagcaatgtggtttattaatgactgatgaatctacttttaagcaaaaatataagagcgtatggatagaattaggtttagcctcatcagagcatcaagtatga

SEQ ID NO: 170090 - DNA, 357 bp, Enterobacter cloacae
ttgaaaaggctgatcgcggaaggttattcgaacgacaaggttactctccctcatcgagacgggtttatcacgttacttacagccccatatgacgctgagttaacaactttccgcgccgatgtcgtcgacagcattgtgtgcacgccggtttatgaagacgaagaagaagcgaaagctgattctgtcgcagtaaaagggcgctacaactacgacactttcaaagccgcatcaaagccgctgatccaatggctgaacgaaaacgccaaccctcacgcatcggtcattgttgattgcacaggtgcagagctcctcgtcggggaaattgccttcaacaccaaagagttcctgaaagactga

SEQ ID NO: 170091 - DNA, 540 bp, Enterobacter cloacae
atgaaccattatgatgatctgcagcgctttcaagaaaaaacgcggacgcaaaacctcaactttcaggatctttcttcgcaagccgccacgcgggaacacggcgactgggcgatcctcaatcagctaaatcccggcgccgagaaatcctcttctctggcgctgggaggctcggtctccgcgccgttgccgcagtcggtgcccgcggatctgttccgccaggtagaggcggccgtagcagcggcgccaacctctgatcctgttgtgtctgccgcttcggtcgcgcctgctacctcccagccggtcgtggagaccgccgcagccgcaccggatccggtcaggcaggagcctgcgccgacccctgcgccttcaattccggcgtcggaaccggccatggcgccgccgccgagaatggccccccgacccgcgcccgccgctgagaactatgcccacctgttcgccgcgaaaagcgcggagccggtggcgaaaaataaagaccagcctttgaaatcacttctggaaaggatcgcgacatgccgttga

SEQ ID NO: 170092 - DNA, 798 bp, Enterobacter cloacae
gtgaacgtcggcgtgcgcgactcgacctacgtgctcgacggcctgctgtatcacgaatccgacctgcggatcgaggagcactacaccgacacggcagggttcacggaccacgtcttcgcgttgatgcacctgctgggcttccgcttcgccccgcgcattcgtgacctgggcgacaccaagctctacatcccgaagggcgatgccacctacgaggcgttgaaaccgatgatcggcggcacgctcaacatcaagcacgtccgcgcccattgggatgaaatcctgcggatggccacctcgatcaagcagggcacggcgacggcctcgctgatgctcaggaagcttggcagctacccgcgccagaacggcctggccgtcgccctgcgtgagctgggacgcatcgagcgcacactgttcatcctggactggctgcaaagcgtcgagctgcgccgccgcgtgcatgccgggctgaacaaaggcgaggcgcgcaacgcgctggcccgcgccgtgttcttcaaccgcctgggggaaatccgcgaccgcagcttcgagcagcagcgctaccgggccagcggcctcaacctggtgacggcggccatcgtgctatggaacacggtctatctggagcgggccgcgaacgccttgcgtggccacggtcaagccgtcgatgacggcctgttgcagtacctgtcgccgctcggctgggagcacatcaacctgaccggcgattacctctggcgcagcagcgccaagatcggcgcgggcaagttcaggccgctacggccgctgcaaccggcttag

SEQ ID NO: 170093 - DNA, 285 bp, Enterobacter cloacae
atggaacaatttccagccctgaatactgactgttttgatcaacatattgccgaacgtctgcacctgcaggagcccccacggattctgatcctgtatggctcagtaagggagcgctcctacagtcgctttgccgcggaggaagcaggtcgcctgctgacggcgatgggcgcggaggtgaaattctttaacccctccggtttacccctgccggatgatgccccggatacgcaccctaaagtctccgagctacgcgggctggtcagatggtgtgacgggatggtgtag

SEQ ID NO: 170094 - DNA, 1035 bp, Enterobacter cloacae
atggctaactcattcaagcaaatgaccaaggccggtgtaattaagcgcaccgataccgggatgtttatcgctctttcagatatccacgttcgtgaaggtttcaacaagcgtgaagatgatgaacgcacccgccaggctgatgatgacctgttcaactacctgatgaacggcggatcagttccaccgctggaagttatcgcacgcgatgaaggtggtgtgtgggttgttgaaggtcaccgccgtcgtcgctgctatgcgcgctgtgctgaagctggcaagccagtagaccgcatccacatcatgccgttcaacggtaacgatgttcagcgccttgctcgaatcatgaccagtaacaaccagctgccgctctccgacatggaacaggctgcagttattcaggagctacataacgccttcaaccagaccaccagcgaaattgcaaagctggttaataagtccgtggccaccgtcgagaagttattactcctcagcacagcaaatcatgatgtgcagcgggaagttaaatccggtgcagtatctgttgacgttgctgtggaccgtgtccgtgagtatggcgaacaggcgggtgaagttctccagcatgacaaagcagtcgctgctgcccaggggaaatcgaaagttacccgcagttctatcgcccccgaactgagcatcaagaacgcgcgccgtttcgttgagcttatggctcaggctgcaatcagtgatgaaggtgttttcactcttgaaggtgtagcgctggctgaagcactggcaattatcgacgagcacaaagccattgctgaagcgcgtgaaacgtatcgcttgtcacagccagtcccgaccacagaaattcgcggacgaactctgtatgtgatgctcgatggtaaagacattggtcgggcctcactgtatcgcggaaaaaccgtttggctggacatgggtgacaaaaccattgccgctagccagtcaaaggctgtggcccacttcgttaagcaacacaaactgcagcagggaaagaatcatgaaagccaataa

SEQ ID NO: 170095 - DNA, 495 bp, Enterobacter cloacae
atgaaagccaataaaccgatgaccggcgaacaactggatgaacttatgactgttgcagtcaacatgcagcgcgatgctgagaccgattgtaaccgcccttccgctatgttcgcttatgcagttcaggttgctgttctggaactgcgtaaggttcgcaatgatgctgcgacgctggctgcggagaatgcggggctgaaggcggcttgtgaacgagtttcgatgtggaatgagtttcctcaggcgacgttgagaagcaccggggaagtggtgccttacgttgttgcgtacggctcaaacggcgagcgcgattatttgcgcaatattgcagctactgcgcttaaagaaaccccggcgacagacgcttttctggatgaagtgcgagctcagggtgttgaagcgttcgcttcagtccttgaagcgcgcggaaggcatcatgactatgttgagattgccaacgcatatgctgcccagcttcgcaaaggagtgcagtcatga

SEQ ID NO: 170096 - DNA, 501 bp, Enterobacter cloacae
atgagcaacatcgacaaacgcgcacagaaagagctttatgcgacagttgagaagcaagcccacaagcttcgcggaaatcctatcgcataccaagtagtcacgggaatgtgtcccgttaacgttatcgaaatgcaagcacagaaagtccaagcgctgctggatgagctagaagacaaagacaagcgcctgaatgagattctcacgccgaacatgctgctaccggtgattgacgatatggatgaagacaatctgcgtcacgtcattaagacagtatgcgaaaactactcgttgctgcacgcgaaatgggaagccgcagagaagcggattgctgagcttccagggcagaaacgcttaatcggctggcggatggcagactacgccgatgaaaccgcagacccagcacttgctaagaattgggccaccgctgtagatgtgctgccgatttttgaaggcgacgtgaataccaaacttagccccgccgcagccggtaaaggagagtga

SEQ ID NO: 170097 - DNA, 162 bp, Enterobacter cloacae
atgaaatcacttattactgatgttatcgggctggctggtttcggtctgctcacgtccggggtttacctgcgttttggtctggccccggcgctcatgttctcgggtggcctgcttttgctgggtgccctggcgatggccagaagggggaagcgtgctgcttga

SEQ ID NO: 170098 - DNA, 594 bp, Enterobacter cloacae
atggaacgattcacattagcgattaggaaggcaatagagcaagaaaattggtttgcggcactcttcattggcttggctatgcctgatatttgcggagctctcgaggcgccaggcgctaagccaggtgagcgatatcggaaatggtttgatggttatcttaaaaagaaataccaccatgaaaattattttgaagctcaatatgcaaatgatcctgttggcactgaagagagaatgagggatcctggttttcgtgaatattacgaaaagcaaaaactaaaaccgcttgaatcttctctgaactttactgcaaaggattgctatgcatttaggaattcctgtttacatagcgggatgtctaaagataagaaaagagcatttgttttaatccctcctccacagtcaggaggacgggtccacagaaataatattgaaggtgttcttcagctccaaatagacatcctttgtgaagatatatgtttggctgtagaagaatggtgtcgtgataatgcagacaatgatcaagtccagaaacgcatttctgagttgattgaaattaaattcgatcactttcgtgcagtgagaattggtaaatga

SEQ ID NO: 170099 - DNA, 204 bp, Enterobacter cloacae
atggatcgcgaggagttacgccgtttaatggcagagcatgatgaaactgaggtcaacatacatccgcattatgtaaaaacgttacgtcaacttgcagatgatcttgaatcggggaaacaaaccggaatcgaaggttgctttgtaatgtcacatgatgagcctgggataataaggtactcagtagtgaccaagttcaatggttga

SEQ ID NO: 170100 - DNA, 546 bp, Enterobacter cloacae
atgctgcatacagtacattttttcagcccagtgactatgtcttccgtatctttgttacaagatagatgcctcactgccattggaaacggcgctacacatttgaatttgcatatttccagttcaggaggagacaccgtcgcagggtttactgcatacaattttctaaaatccttacctattccgatcactactcacaacattagcaatgttgaatcaatggctaacatcatcttcatggctggttcagttcgcaaagcgaacccaatgagtcgttttttactccacccgcttcactggggtttcaatggacaagttgaccactccaggcttaatgagtggtctgcttgtctcaatgatgacttgaatcgcttcatcaacatcatggagttagagactaatggcgccaagagcgttgagcagtggagcgaaatcattacctctgccaccttagtcagccccagcgccgccgctgaaatggggattttgcatgagataacacctgcaacgctggcagattcggcattcaatttttgggttacatgctga

SEQ ID NO: 170101 - DNA, 663 bp, Enterobacter cloacae
atggactctaataatttaacgattgcagccactatttttgttgcattaatcacaggtctgctcgcctatacatccgcactctctgccaaagaaaaagaggtgaaattatcagtatatgaaaaattgggtattgatcttcatgctgctctcgagtcattacagaacaatactgaatatctaatgcagatcattttattttcaaaaaaaactaaccggctagctttattagatgctaacaaaaaagtaccagcagacctaagtaagctcagagaacttaaagttcgcgttatgttttttgatatgaaacttttcaaaaaatatgacgaaatcttaaaaaaacatggaactcttacgccaaggttatttggcttaggttcttcatcaggaacaagaccaatcaatccgaacaaatatctcacaacttatgaaaagaagagatatatatttgagctcgaaaaaacattatctttaattgaagagacaaaggaaattttaatagctgaaacctcaaagaggtacaataataccttaagttcctcacgacccatcaataaagtaatctatgcactagtaattattatattacttgttgttgttttccttccagcaaagaaagaagaggaaaagaaaagcagcactacaaacatttacattcttagataa

SEQ ID NO: 170102 - DNA, 351 bp, Enterobacter cloacae
atgccaccgcgcacaccgaaggcttgtcgcgttcgcggctgtcggaacaccacaacagccccgtctggctactgtgaaaatcacaaaggtgaaggctggaagtcctataagccaggtcaatcacggcagctgcgtggatacggaacaaagtgggaagtcatacgggagcggatacttaagcgcgacaaagggctgtgtcagaaccatcttcggcagggagtcgtgaagcaggcgtcctgcgtggaccacatcaaagcgaaggcccacggcggcactgatgaagacggcaaccttgaaagcctgtgctggtcgtgtcacgccgcgaagaccgcacgtgagcggctcaagtga

SEQ ID NO: 170103 - DNA, 633 bp, Enterobacter cloacae
atgacagattatttgaatagattttttaaaattcaagttgagtcattgtatgatgctagtcaggaagttgatgaagatgtacgattttctatagagtcaatgtggagaagagcacatgaaaccagaagatcaaatgttaattcagatagaaaaacagagccccacgtaactgatattttaattagaaatgatgttgaaaattaccttggggttattgggaagagaagaaaggaaacctcttctgaattaggttataaacactggtggttgacaacagataaattggcttggatgataagacgtgatatcagagagaaaattaaaaaccctccgtcttctccattgatgtcattaaattttatatcagtaatgctttcatttagtaccattaggcataatataaaaaaagatgacaggagaactttacctttgtttttcaatatcgactctacatattacatgcctaaagatttaattgatattgcaaatgaagtcagaatgaataataaagataaacctgagcatattataagacgaaaggttagagatgcttgtgatcatatgaagaggcgatatggtaagtatgcatcttctggtaatgatataatgaatgaaattttggatgtcaaatga

SEQ ID NO: 170104 - DNA, 363 bp, Enterobacter cloacae
atgggacgttcaataccggtgaagattggtcagaaggaatttgcatcaaaacagaaagcccgcggctattacatggatcaacgacctgacgtgaaagctgtcgggatcatttcagaaggtgactattttgaagagctgaaggaactgttcaccctctattgtgacagttgtccgggctgggaactgaacggtcgtctgattaaacattttacggttcagaatgaacctcgttttacgaatggccgctgggtgtcacatccctgctataaggtccagctgagcaacggtgagctgagaccgttttcggttgaaaaggcaatagacgccatcgtaaaagcagctgcagctgatcaacagaaatag

SEQ ID NO: 170105 - DNA, 810 bp, Enterobacter cloacae
atgaaagacatgatgattgatattgaagcggaacgatttaatgaatggcttgaggaaaattacccggatattgtccctgagtctgaagcatgggaggaggccgcgaacctgtattactgggagcaggaggcgcttgctgatcaggctcagtgggatcatgaacatggactgttcgtggtttccctgaacgatgttcatcagcgtcaccggcacgcaagacaggagctgcagaagctacatgccctgctcgacagagagcagccagaactggtgtacaggatgtctttcgtccatgcagtgactgtcatggaagcatacctgatgtactgcgccagggctctgctggaacatgactggcctcttaaacgcttcagggatgaatattacctgaattcagaacgcgtcaaaaaaaacaaaaagcagtctgtgcgtgagatggaacttgatatgttcaggcccgccgcacgcaattatgtttcccgaatgacgtttcataacgttaaaaccattgagcgctatttcagcgccgtgctgcatactccgcccgtctggccggttaagccgctggacattattgcagactggcgaaacgaccttgtgcaccgtaacggggtggatgagcatgatgtgccaagaggtatatcagcgcagcagctacagaatgctcttcagagagtgtctgaccttatagaggcagcacaccgttccctgtgccaggaggtggactatttcggaaactggcgtagtgaggaaaaccgggaaatcattgcttcagcgctgaacatatcaacagacagagatgtatcctga

SEQ ID NO: 170106 - DNA, 204 bp, Enterobacter cloacae
gtgcgtctcttcttcaagcggctcaaaccatttttctttagcgacttcattgaacttcttacaaatggtgtaaagagttacgttagaaagagcatagttacgggaaaactgacgggcaaaattggcactcttggcctatcgctcagcgcctggttaatgcgcgcaccagtgttccagagcttcgacagcagcattttgtgctaa

SEQ ID NO: 170107 - DNA, 498 bp, Enterobacter cloacae
atgagtagggacgattgcaattttgctatctattattcatatactctggaaagaatgaattacaccctgcttacgagaatagataagctaatcactttggtacttattgtcgtaggcttctcggtgttttcttcatttaacaactatttcgtttttggagtatttgtatcggtcctttctgttctacagcttgtttatcatttcggacaagaagctgggtcttctaaagagcaaatgaaacaatacaaaaggctactggctgagtcaccatcgttatcagacgcagagctaaccgaccgcttcattaaagcccaggacacagacagcaacccgtggcgatcattggagaacgcggcatatctaaaagcctgcctttatttcaatcttcctgccacttacaacctgactatctttcagaagtgcatgtcattgttagccggtgacttgccgcgaaagaaagacttcgaggaaaaaacagatgagcaaatttgcaaatga

SEQ ID NO: 170108 - DNA, 882 bp, Enterobacter cloacae
atgggaccattcaaagcgcatgaagtaatcgaagaaagaatgagagatcaagctttatgtagttacttggtaggttttgatattaatgatacaggtgtatcctactataggatggatcctttgattatgaagattttatcggccctgcatgagttcgcttatgggttccacgaaggggagcagactgataacacacaaacattatctaaaataatagatgcggctcgttcaatttataaaattgatgaatatcagaaggttaaagatatttatctgaattcaggtgaattgactgacgatgttgctaataaataccttaagcgaggtgaatttggtgaacttattctgcatctgattttgagagattttcataatacgatcccacttctttccaaaatttatttcaaagattctatcgggcataccgttcacgggtttgatgccgtgcatatcgatcctgtcaataaaaccctctggctaggtgaatctaagttatatattgatcccaagaaaggtattggtgatttaattaatgatgttgaagagcattttaaagctgattatttaaattctgaatttaatttgatagcgaaaaaaatacgccatgtacaaaactctccagaattagaatattggttggacattttatcgacaggtggaaaactatcagataagcttacgaaaattaacatcccgctgctatgtacctatagctgtgattcatttttaaaatatgataacgaaaaatcaccggatttttctgcttattataaaaataaaatacttatgctaaaaaaatattttgatgaaaattacaaacatcctttaaaaaatcatttaaatattattcttatgctttttccagtgagtaataaaatataa

SEQ ID NO: 170109 - DNA, 585 bp, Enterobacter cloacae
atgaattctggcgtaattggggggtatgctgcattgcagtacacccaccctcagaaccagcaggtttaccactactacgaagttaacaagcgagacagctatgtgatcgtcgcgcagctgtgcccggagtttaccgcccgtctggttgaccgctggcaggaactggagagcggggccgggatggtggtaccgcaaacactacctgaagcacttcgcctcgctgccgaccttgccgaacaaaagcaacgcctgagtgaagaattggccatagcagcgcctaaggctgaatttgttgatcgttatgtcaaagccactggctcaatgacgttccggcaggttgccaagctccttaacgccaaagaacctgagtttgcgatgttcctcattgagaacggcatcatgtaccggttaaaccgtgttcttacaccaaagagcaagcacatcgaagcagggcgcttcgaggttaagacagggaccaccaaccagactaactacgcattcaatcagtcccgctttactgcaaagggcgtgcgctggattggcggcctgtgggctgaacatattgctaagaggcaaattgcgtga

SEQ ID NO: 170110 - DNA, 801 bp, Enterobacter cloacae
atgaagctcacatcaaagaataatcgtattgaagaaagaagtttgtatcctaatacaatttttcattttacaaatgataataatgttattttagatattattaaggcgaaatattttcgtgcgtcatatgcaaaggaagtaatagttgggccaaatggaactaagagaacttttggtataccaatggtttctttctgtgatattagattatctaaccttaatgaacacatgaagaaatatggatattatggtataggtttaaagaaaagttgggccattaaggaaggtcttaatccggtaagttatcttaatccaaattgttctatgttccaatattttgacgaacagcttagatatatgagtgaggaattgctaagtattgacgaaaaagataaacataaagtggaaagacagaaatatttgcaccttcagaatgtgatgcgttacatgaaaaattacgaaggggcgctaaaaagaggagaggaacaccataaaaaatatcgattcgcaaatgaaagtgaatggcggtacgttcctgatattactactcctgatattatacctgttaagatagtagaaaaaaataattcaaactggaaagctaaggcaaatcaagctctttgggcatcagagttttcacgcttaagatttgaatatagtgacataaaatatattctcattccaacaagttatatggctttcgacttaatcgaaggtattaaagagtttgttagtgacgaggaatatatttacttaatatcaaaaatttttgattcacgttctatataccaagacttataa

SEQ ID NO: 170111 - DNA, 354 bp, Enterobacter cloacae
ttgaaaaaatttgcatttgttaatgatgctgctgagagagaatacaaagcacttcctgctgatgtgcaagacgattttggaaaagatttacgtcgtattcagttcggtcaagatcctgaattacctattgattttatggatagcattggtataggcgttatcgaactaaaaataaatggaagcccggcatatcgatgcacctacgtcactaagtatctcgataccgtggtagttttgcattcctttgagaaaactaccaacggtgttgatcggcaggctaaaaaagtagcagaaaaacgactcaaggaacttatggccgatgtcagagaggctgaacgctgtaaaaaacgttaa

SEQ ID NO: 170112 - DNA, 273 bp, Enterobacter cloacae
atgttgtgtgcctgtcttttcaccacatcaggctcagtggtattctcggcgttctcacacaccaaaaaatggaatcaaaaaatgacaaaagaagaaaaaatcctctatttgttcgagttatcagtaaagacccacaccgcttaccagactgctgctatggttgctaatgagaaatacacgacgtcagaaaagcctatggacgacatcagtaagctgtatgacaaactcgaaactctactcgacaaaaagtttgctgatgctgggtttaagtga

SEQ ID NO: 170113 - DNA, 177 bp, Enterobacter cloacae
atggctgacgttaacaagcaagaagatattttacgggttagcgctgaagtacttgatctgttgaagagtgaacttaacgcccgaggcgttacgcccactcaagaaaatttaagttgggttctgtcgattattcaaaaatcacttaaacccagcatcagcaaactttttgtcgagtag

SEQ ID NO: 170114 - DNA, 561 bp, Enterobacter cloacae
atgatatttggagatccctatcgttttgccatttgggttgaatttatccccgagtggaatgatacatttatgaatggttttttttatatcttcataaatggtgaaatgtatcctgatgacatcaggacatcaacactgtcggttgatatatacgatattcttgatgataaaaacccgttaatatcattccctgcaaataaaaaagtctttgatatggatccagctaaagcttttgctgagttgatggatttagcgcatcctgaatctacagatgaaaatgaatatcctgagcagaattttgatttttctattttgacatcaaatataaactcatcaggaatgacgttatttgcagtatcggacagtgctaacataaaaatacttggggctaaaacagataaattagtaaaagaagaaggtcgtgacagatattattggattaagaatgaagaaatacatgttaatgaggtggttatctctaatcacgaggtaaaaaatataatagaaaaattaaaggagtacgctttacctatcttacaaaatactagatatactaaataa

SEQ ID NO: 170115 - DNA, 1458 bp, Enterobacter cloacae
atgctgagcggggcagacagcagcggcagcgcggagggcaccacgcgtgctgcggttgaaaatggcacggtgattgtccgtgataaagcgaatcagacgcaggacactgccgccctctcccgcgacacggcaaatgcaaacggcagcatcgacgctatcttcgataaggagaaagagcagcgcaggctcgacgaagcgcagcttatcagcgacatcgggagccaggtgtctgatatcgcccggacgcagggcgaactgaacggggacgcgcagtccggcaccggcagcgacatccagcgggccatccaggccgccaccgctgctgcacaggggattgccgggggcgatatcagcgccgcgctggccggagcggccgcaccgtacgtggcggagattatcggtcaccggtccgggctggacgacggtatggaaaaagccgctgcccacgcggtggccagtgctgtactggcagcagtgcaggggaaagacgcgcttgcgggtgccgcgggtgccgccgccggagagctggcgggcacgctcgcgctggagatgtacgggaaggatgctactgcgctgagtgaaaatgaaaagcagaccatcagcgctctggcgaccctcgccgcaggcatcgcgggcgggctgacgggtgacagcacggcatctgcggtggcaggggcgcagaccgggaagacgacggttgagaataactatctgagcagtaagcagatagacgcctggtccgctgaaatgaagtcctgtcaggccagtggtggcgactgtggcagcatcattaagaaatatgaggagttgagtacatcccaacagcagcagttgatcagtgactgcgcagccagtccggcgacttgtcagcagaaatatggtgacgtgttggccgatagcatggcggtgaagcaagcgctggatcaagctcttggtcaggacattccagccaagatggcttatgacttgacggcaacttggatgcatcagatccaggcagacggcgtaatttctaccaataaagtctcggaagctcttcagaaagaatatggtctggatgcgattcaggcgaatattgtggctagtgctgcggcggcagcgtttgggggggttagtaaggctggaaaaggaagtgccttaccagtgccatcggctgtaaaaactgcgaatggccttagctatcaatctaacccaaaacatacgccagggcagtcaggatataaccgcaatgctggaactgagcctaacaactccgttaatttattcgaaaactcaattacatctggaaagaaaagatatgctatagataatgatggaaatgtacatcaattcactaataccaacgatggaacttggcattggtctggtagtaccggtgatacatctgtacctattaaaaaaagtgaaatacctaacagcgtacgcaaagaatttggtttgcctggaaagtggagatga

SEQ ID NO: 170116 - DNA, 426 bp, Enterobacter cloacae
atgccaactagccgttcacccgcctcattccccacgcttatgaaacttgcggaagatgcttatagcacttacaaagaaatcctcaaagaatgtggcgcaagtgataccatcgggacctgcatgttcgccagcatatctctttgtgagttggcactcagccggaactttgaggcgataatacgaggaggagatggcataaacaatggtggccttttcaatgagtttggaggacacggacactactggtgcgaaataactctcgatggtttatcattttatattgatatttccgccgagcagttcggttattcctcttatattgtaaaaaatgtcaatgatgttactggctggccgcgttatatacccggtgaccaaacacttattgatcatcacatccacctcgcatttacagagggtttactgtag

SEQ ID NO: 170117 - DNA, 366 bp, Enterobacter cloacae
atgaccgatgtaacaatgaatgaaagcgagcataaggtacctgacgtaaatacccgctcccctcatgcgtccgataatagccgtagggtcgtgcaaagtaaaaatgaacattacggcatggctacagtaactattaccccaggcacgccagactttaaccgatttctcacggcacgtaatcgttccgtaataagagggtttgatgatgtcagtattgccatttcatccttattcagaacggtcaatgcagttaagcaccccgaactagtgcaggcaattcaagactggttcaatgaattgcacgaagaaaataatctaaggaaggtgcgaataagcaggtcatttcttcccaagctgactcgctga

SEQ ID NO: 170118 - DNA, 525 bp, Enterobacter cloacae; identical to SEQ ID NO: 112539

SEQ ID NO: 170119 - DNA, 1278 bp, Enterobacter cloacae; identical to SEQ ID NO: 112540

SEQ ID NO: 170120 - DNA, 2370 bp, Enterobacter cloacae
atgcgaagtcacttgaaagataatgctgaatggggagatgcctacaaacatcttcatttgaacactgacgttcactgggcatgggataagcagaacctgggtaagtccctgtatgacaactttggctacgaaggggtgtttattctctccccggaaggaaccacgcgatacagcgtgcttgacgggaaactgaagcttcaggatctccggcgctggttagataaatcaaccaaggagcgattactccgtgaggtgagcgttaacaatggattgccggtttctatactcacgcttatcgattccgttccagccattgtttctgctgaatggataacaacgggcgatgacgcgagcgtacaacccttgccggggaaaccgtcggtaatggtgtttgtagacaagttaacggctaaaaaactcctcgcgattgggcaggatgccggtattaaaaatgttcgtacgtcacctgatgcagtcacttctcaaataaacaatcaaacagaatttaccttaaacacccagaatggtgatgtgcaaattatctgggacggtgaaaaccccggccaggcgttgattatttattttttaccattactcattctttcagttattctgacggtatcgatgacggttattctcatgcgccatattatgcagaaggcgagaatgcttgacgaaaatacctttctcctcgagcaggcgcggttgaatcttatcaccagtgaaaaacgattccgggacgtcagtgaaacaaccagcgactggttctgggaaacagatttatcgttaaagataacctggctttcaggtcgtttttctacagtaacgggatatgaaaatagcaaatggataggccgcaggctggatgaactctttcctacgtcacgcggattattacaaaactgtgtgaggctcagggaattaactgaacgctttgaatttaagaactgtccttatattcatgcgcaacaatccacggcctattgtacgcttctggcaaagctttctgctcagcctgatggaacggtggttttgcgaggcgcggcaaccgacgtttctctggaagttgaagcaactaaacgggtggagttcctgtcacgtcatgatgaattaaccggtctgccgaaccgctatcatattaaggaatttctggcaggccagttggctaaagaagaccttaaccattatccctttgccatgatttgcctcgatttagacaagtttaaacccgtcaatgatatttttgggcactccacgggggatgcgctgcttggcgaggtcgctctacgtcttaaaaattgcgttcgtcgaggtgattttgtcgcacggcagggaggggatgaatttatgcttcttctcggcaataccagccaaaaagaccagattgatgaggtgtgtcaccgcatcgtacaggaactcaaccgtcctttctccattgagggtaatgatgtcgcaataggcgtaagcatggggattgcgctggctcccctggatagcagcagcgcaaacgatcttttacgctatgccgatattgcgctttaccaggctaagcaatccggcagaaacagatgggtctattatcgcccggatatgtcggaaaagttaactgaacggagaaaactggaactcgaactgaaaaccgcgattcgcgaagaacaactctatctggtgtaccagccccgttataacctccgatattctaagatagaggccgtcgaagcgctggtacgttggcagcacccgcaccgagggacgatgatgcccgatcagttcatcccgctggctgaagaaacaggtctgattattaacctcagcaactgggtcatacgcaaagcgtgtgcggagacgaaagataaattgccggggctatcggtatccgtaaatatttccgctatcgaattccaggcaagcgatcttgctgaaaggataaaagagatcctgcacgaaacagggctagaacctgaccgactggaaatagaagtgacggaaaatgtcacgctttccgatcctgaaaagaccttgcagaccatgaaggctctcaaaaaaatgggcgtccgtattttgattgacgatttcggtaccggctatgcctctctgagctatctccggaagtttcagtttgatggactcaagctcgacaagagttttatttttaccctggccgattcgccgcagaaccaatcagtcgtagaaaaaattatcgatctgggtaaggcctattcaatggcggtcactgcagaaggggtggagaccaccgaacagctctcttttcttaaaaaaaatagatgtgatgaagttcagggctacttgcttggaaaaccggcttccattacggaattaaatttaaacgcaaacagaatagatctttaa

SEQ ID NO: 170121 - DNA, 762 bp, Enterobacter cloacae
atgcttccaaatgaaattgctattctgtgtcctggttggtttgatgtgataaaactttcaaatgatattgttgctcttaatccggatatagaaattgatggagtcatgatctctcctatacctaaaaacaatgagaatctttggcttgctttagttaaactatttttaattaggagagtcccctctaattttaatactagacagaagctattgcgggatttccttcaagagttaaatgttgctgcaccctatactgaatcgttgtctcctaaaaaaatattgaagattattaataaaatatcattatctgtggattataattgtgaaattgatgtttggttgagagaggttataacgagattttgccattctattaatttgagcataagtaatgatagctactattatcaagaaatggaacttttgattaatgccacattgaaaagaatgttaaagtataatatggcttataaagcaaatgaattacatttgtttttcaattttagaagcggtgttaaaatcacaacttgtcattcgacaaaaggtgatgagtatgaagtggtcatttgcactggattactaaatggaaaaatacctaattggaatgatattatagattgtagctcagagcatcaaaattatgttgcccgtagacttttatatgttgtttcttcgcgtgcaaagaaacatttatatatgatatcagagagaggttacaagacaaaaaggggatatccatatcagacaaccccacagctttga

SEQ ID NO: 170122 - DNA, 396 bp, Enterobacter cloacae
atgaataaatatttttactctccgggtacacgtggtttttaccagtctgatatccacaccgtaatacctgatgatgctatcgaaattaatgttgatgaatatcatcaactgcttgatggccagcaaaaagggatggaaatagcaccaggcgctggcggccgccccgttcttaccgagccagtgattgattatgtagcacaggcacagcaggtaaaaaactcgcttcgactggcctccgacgctcagatagcctggaggcaggatgccgttgatgctgggatagcaacggaggatgaaaccgcttctctggcagaatggaagaaatatcgggtgctgttgatgcgcattgatacttcaaaagcccccgatattgtatggcctacacctcccagctaa

SEQ ID NO: 170123 - DNA, 396 bp, Enterobacter cloacae
atgaataaatatttttactctccgggtacacgcggtttttaccagtctgacattcacatggaaatccctgtggatgccatcgaaattgatgccgatgagtatcatcgactgctggaaggtcagcaaaacgggctggaaataactccaggcgctgatggaagtcccgtacttaccgagccagtgattgattatgtcgcacaggcacagcaggtgaaaaactcgcttcgcctgactgctgatgctgaaatttcatggcggcaggacgctgttgatgcagggatcgcaacggcgggagaaaccgccgcacttactgagtggaaaaggtaccgggtgctgctgatgcgtgttgatatatcgaaagcgccggatattaattggcctgaaacacctgtatga

SEQ ID NO: 170124 - DNA, 324 bp, Enterobacter cloacae
atgcttctgacaatggaagaaattaaacgtcagttgcgcctggaagaggattattcggacgaagattcataccttgaaactctcggcaaagcggcgcaggccagaacggaaacctatctgaaccgaacgctttatgattcttccacaggtgtttcagataatgatcccgatagcctggttttaaccgacgatatcaagcttgggatgctgcttctcgtaacgcatttttacgagaaccgctcatcggtatctgaggttgaaaaaacagaaatgccgcaatcctatacctggcttgttggcccgtaccggtttattccgttatga

SEQ ID NO: 170125 - DNA, 405 bp, Enterobacter cloacae
atgaacagcctgaagcacgcgattgacccagcatatcgcggcggtccaaaattccgttgggcatttaacgacggtacgcttcaggtgattgaagagatggtggatgatcagaaacggccattgtggcttcctgatgttgttggtggctccccggcgaccgttctgggtattccatatgtgatcgatcaggcaattgatgcagcggcggcgagtaagaaatttattttcctgggcgattttaaccgcttcatcgttcgccgcgtttcctacatgactctgaagcgcctggttgagcgttatgcagaatacgatcagacggcgttcctggcattccaccgcttcgattgtgtgctggaagatacggcagccatcaaagcgctggtgggcaaaccggctactccataa

SEQ ID NO: 170126 - DNA, 756 bp, Enterobacter cloacae
ttgcaaaatgttgataataagtatgttaaaggcactggctcgcagataagtcacaaccctagaataccgtcagaaaacactgatatgcgagatgcaaaattctacttttcaacttcatcggaagaaaaaaggaagcaatttacttggttgttttcattatataatttgaatcttgatttttatgatatttcgaatctactaatagaacctcaaattgatgcaccaacaattgaatctgaaaaaatgttggtttcccacccgattaaatttgcatcaagatttataaagaaaaaaccatttattgttgaagatacaatgctctttatagaagaatttaatcaaaactatgacgtaaatcctgaattaccaggattggatactaagcggtggtggagacagttaggcaatgatggtgtattaaaattattgtctgaatccaataaacggaaagctaaatatgtttctcaaattggatgttatataaacgcaaagcaatattattttggtcgaggagaattgagcggtgttattgctcaaatcccaagcatatcagatgaatcaataaaaaatttccccaagaccaacccgtggttttttcatcagatattcattcctgatggctataatgtgcctctttctttactatctgcatcagatttcacgatggtagattatcggagaaaggctttagaaaatttattgaataatctacatgatgacgttcatggagattctgagcagttaaggttaatataa

SEQ ID NO: 170127 - DNA, 330 bp, Enterobacter cloacae
atgttgatgtgtgatgcgaccggtctgtcgcaacgtcgtgcctgcaggcttacaggtttatccctgtcgacctgccgctatgaggctcaccgtccggctgctgatgcgcatttatcagggcgcatcactgagctggcactggagcgcaggcgttttggctaccgtcgtatttggcagttgctgcgccgtgaagggcttcatgttaatcataagcgcgtgtaccggctttatcacctcagtggcctgggcgtaaaacgcagaagacgtcgtaaagggctggcaacagaacgtctgccgctgctccgtccggcggcgcccaatctgacctga

SEQ ID NO: 170128 - DNA, 249 bp, Enterobacter cloacae
atgaaaaacttatccgtcggtatttcaaaaattcttttgtcatcatttagtgccgttacgattattttgtcggtcttcctgatatttcttatttacgacatgtgggtgcatgaaggcattcctccgttcgaaaatttaaaattcagcacggctcttttctttataatcataatgctacttattatctgccaatgcctgaaatatttcactgatatggcagtagatagtcgcaataatgctaaccgataa

SEQ ID NO: 170129 - DNA, 303 bp, Enterobacter cloacae
gtggtctggaatgacggcggaacctggaaaacaacatcattcgacgccgcgatgaaacaggggatcatctcctctgaagaataccgggaagttgaaggtgaggtggttttttttatggtttcctctgccattcagaaagcacagctgatcgccccgacagtgggatcagtgatcggtatgttcggtgggcaactcgtatcattgagcgttacggcgttccgcgattcgttgctgacgtcgaatccgcctaccgatacccagaccccgagtgcccagccggaaacgtcatatataccctcctag

SEQ ID NO: 170130 - DNA, 720 bp, Enterobacter cloacae
gtggttttttacatcattggacctcgaacccctaatactgccggccgtcggcgggcattccgtccggagcgccggcaactgctggatgcgctgttcatccttttcatcaacaaagtcgatctggccaccagtgtggtgaccatcaatgtctctgccctggcggccgcgctcagcccgcgggatgcggatgaccacatcattgcggagcaggctgtgacaacgtcacgcgtttcgcgcctgatccacgagctggagcgctttggggtggtcgaatgcccgccggcggaatgggactgcgtgaacggctgccgttttccgaaacacgtcattatcactgacgcaggctggcagctgaccggggtgaacatggacaggctgcgcgcggagcaggagatgcgtcttcaggccatcgacgatggccagctgaagcccggcgaaaccctgtccctgaaagccgcccgtcgccgctggtacgaacgctgccggcatcagacccttctcagccgccggacccgggccatcgaaggtaaaatgcgtcagaaactgtctgacctgccttttgatgaacgcaagcgccaggtgtcagagcagctctggcgcagtctgaagggccggacgcagcacctgacgccccgccagtttgagaaaatggtctggtcacagctgtaccagctggaactggtcgacctggccattccgggcgcttccccgccgcactga

SEQ ID NO: 170131 - DNA, 126 bp, Enterobacter cloacae
atggtcacacagacgttgctgtggcgtgagtcgaccagctttgcaatctcacggctggacatcgttatttgctgccccatcgctccggcgtggtggctcggacacattacggtgatattcatctga

SEQ ID NO: 170132 - DNA, 762 bp, Enterobacter cloacae
atgaagatgaaatgcaataacaggttactcagattatctgcctccctgaccttaatttcgttggtggtgactgcggctaatgcaaataacggccaggcggggatatctcccgttgcggcaatgacgatgaaagaaagtattcttttcgctctcgatcgcgacccctcggtgagtcagcaggcggcacagctggggatcggccaggcacaaatagacgaagcgcgcagtggctggatgccacaaatagccctgaacgggagtacaggtcacagccagaccaccgattcaagcggctcgttgcgaaattccgcagcctggggcctgagtctgacgcagctggtgtacgattttggcaagaccaacaacagcatcagccagtcttcagctcagcgtgacagctatcgctaccagctgatgagcacgatgtctgccgtcgcggaaaaaacagccctcagctatgtggaagtgaaacgctacagcgatctgttgcaggcggcaaaagagaacgtgcaggcgcttaaaaacgttgagcagctggcaaaactccgcgccgacgctggcgtaagctccacctctgatgagcttcagacccgcacccgtattgccgggatgcaggcgacggtagagcagtacaatgcgtccctgaacagcgcccgcgcgcggctggcggtattaactggcatacaggctgaacgctattcaccggttccgggaggtctggccgtggagccggattctctcaatcggattgattattactga

SEQ ID NO: 170133 - DNA, 366 bp, Enterobacter cloacae; identical to SEQ ID NO: 121602

SEQ ID NO: 170134 - DNA, 123 bp, Enterobacter cloacae
atgtccgcaatcgaaactgaagtaaaaaacaacagcaacgaaatcagccttcgtggttacctggaacgcactggtaacggtgcccgtaaaggtaacggcactgttgcaaatagtcggtggtga

SEQ ID NO: 170135 - DNA, 219 bp, Enterobacter cloacae
atgagcatctactatggaagccggctcctttgtcagttccttagtaacagtcgtgacagttgctacccggttttccccaagttcttctgtgattttccgaatacctgttactgctttgttgtgagcctgaaagtcagtaagaatacgattcttgttatgaacggcttcattcccatcaagcgagacagagaaggttatattccgctctttaacccatga

SEQ ID NO: 170136 - DNA, 453 bp, Enterobacter cloacae
atgaaaaaaaaaattctggcgatcctgcttctgcccactctcgcatccgctgcacagaagttcccccctgaggtatccgctgcccttcagtttaataagtggtacatctcgcaaattattatcgggaaagagcccctgaaaaactatgaagcgctgaggccatatgtaacccgcgaaactatcagcaaactcaaagccatggataagctggatccagatgaatatgacgtgcctgacgtcgatatgttcatcaaggctcagggatatgaagatgactgggacatcgtcagtgcgcgggcgctggattacgatgccgcctgtatgcaggtttatatctcattcggcaaaaagcgggatcacaccgtgattgactgcatggtcaaggaagatggcgtgtggaaagttgaatccgtggccagtatgaatatttcagacaacctgatgatggaataa

SEQ ID NO: 170137 - DNA, 609 bp, Enterobacter cloacae
gtgaggggcataaataccgaccaccctctcgatatcttcctcgtattcgttgacctcgtccgtcaccttacgggcgaccctgacggcctgagcatcacgcttaatgtttgctcctccctgcgcgatgatatacaggtcaaattcaccttcatcagcagcagcccggacagcctcgacacggtcgtcaaactcactggcgatactcacgccgcgcggcagcttccgcagttcgcggtaagcgcccatcgtcgggaggccaattggtttgaactgcgggatgcgccatgtagacgcccatgcggtcacggcggcggccgtatctttcagaggcttgccggtgtcgtgatccagctggccgtcgagcgcgtaaccgtcgatatttttggcaatgtatttagcgatataacccgccgcgccgccctgattaagatgacgggactcaaagcgctgttttgctgcgcccttttcatgtccgtcctctttgagggcataacgacgcatgatttcgttaatggctttacgctgaccgggtttgcaaaacagcatcatgtgccagtgcggcgtgccgtcgtggtgcggttcgacaacacgcatcccgtaaacctctaa

SEQ ID NO: 170138 - DNA, 480 bp, Enterobacter cloacae
gtggccgtagcaaccgcgaggaacgtgtcgacatcgacatcagtcatcaggcgctcgccggtggcatgttgtgcggggacggccagtggcggcagattgtcaccattgaggacgcgctcgccggtggctgcaccctgtttaacctcgaccagcttaagcaggaaaacagcgcggatgacttccgtaacctgtttatgtgcgaattcgttgacgataaggcgtcggtattcccgttcgaggagctgcagcgctgcatggtcgatgcgatggaagaatgggaagacttcgagccgttcgccgaccgtccgtttaactggcgcccggtctggattggctatgacccgtcacacaccggcgacagcgccgggtgcgcggtactggctccgccgctggttgccggtggcaagttccgcatccttgagcgtcaccagtggaaaggtatggactttgccgcgcaggccgaggccatccgggcactga

SEQ ID NO: 170139 - DNA, 315 bp, Enterobacter cloacae
gtgcgctcattcttcccggcggcgcgcgccatccgctacacgccggaaatgaaaaccgcaatggtgctgaaagcaaaagacaccattcgccgcgggtgtctggaatacgacgccggtgcaaccgacatcacgcagtcatttatggctatccgcaaaaccatgaccagcagcggccgcagcgccacctatgaagccagccgcagcgaggaagccagccacgcggatatcgcgtgggcgaccatgcacgccctgctaaacgagccgctttccgccggtagcggtatgcaatcagcctccattctggatattaactaa

SEQ ID NO: 170140 - DNA, 315 bp, Enterobacter cloacae
gtgcgctcgttcttcccggcagcgcgcgccatccgctacacgccggaaatgaaaaccgcaatggtgctgaaagcgaaagacaccatacgacgcgggtgtctggagtatgacgccggtgcgaccgacatcacgcagtcatttatggctatccgcaaaaccatgaccagcagtggccgcagtgccacctatgaagccagccgcagtgaggaagccagccacgcggatatcgcatgggcgaccatgcacgccctgttaaacgagccactttccgccggtagcggtatgcattcaacctcgattctggatatcaactaa

SEQ ID NO: 170141 - DNA, 135 bp, Enterobacter cloacae; identical to SEQ ID NO: 121898

SEQ ID NO: 170142 - DNA, 135 bp, Enterobacter cloacae
gtggaaaccctgaaagccgggaagctgtatatcgattacgactacacccccgtccctccgctggaaaacctgaccctgcgccagcgcatcaccgatacctatctggcagacctgtcagactcggtcaacagctaa

SEQ ID NO: 170143 - DNA, 177 bp, Enterobacter cloacae; identical to SEQ ID NO: 156107

SEQ ID NO: 170144 - DNA, 324 bp, Enterobacter cloacae
atgctggtgaaaagtgccagaccggccgtgatcccgtttgtaccgcgccgaaaagcagatggcacagggtatgagctgcttattctggaagatatcagcgataccttgcagggaggcgataaagcgtcggtggccacgcaaatgaacagagcgattgagcgcgccgtgatgatggcgcctgagcaatatatgtggctgcatcgccggttcaaaacccgccctgaaggccagccggaccggtataaacgcaaaaaacaggtcgcgtctactgcaagaaccttatctgccagcgatatttcggaccggtcgagtatccagcagtag

SEQ ID NO: 170145 - DNA, 483 bp, Enterobacter cloacae; identical to SEQ ID NO: 155439

SEQ ID NO: 170146 - DNA, 633 bp, Enterobacter cloacae; identical to SEQ ID NO: 30074

SEQ ID NO: 170147 - DNA, 294 bp, Enterobacter cloacae
atgagaaagaagtttagacctgtagattttcaaaataacaatatgggtaataactatatcactatcgaaggaatgctttcagcaccttacaaagaacatacggctaaacagtttgttaaatgcttaaaagaggtttcaaacattaataggttaatgattgataagcggaagtgcgataatgaggaacattatcaaaaagtgttgatgatggcagacttttgtttagctatggcaatgattgatagaatgttaggcatcgttaatgaagaaaatagtttctttaatagaaaataa

SEQ ID NO: 170148 - DNA, 1545 bp, Enterobacter cloacae
atggctaaccctaattttatttatgtaaaagatcaggggccgggaaaatcaaagcaatatatgcctgttattggtaaaaacagtgtttttgcttggggtgttcatagcgaccaaaaaactaaaactcactctcatatatttaggcatacgcataccattactgataaaaactatgaatacaacccaaatactggtgaagtaatcataaatcagttaaatcctgacgcaagaagaataacagcaagtctttcattaaaagataactttgtaagaacgcaggttcttaaaaatatcaatgacaatcttaaagccgctggtttacctcttttagataacatttacttatctaaaggtaaaatgctttctccagaagaaatcaaagcacaagaggttattgatacaaataataaagaatatcttgatgatttatacactacagcaagagaaaaagctaaagaagagtctattaaaaatcaagagcaaattccaaaagaacttattgaagatgctgttgttcaaaatgaaataaatgaaatagatgctcttatcaagcaaaaacaaaaacttgctgctgaatacgccgctaaagctattaaagaaaacaatgagatacaaggctttgaaaaggctcgtgaagctgttatagctcttcatcaagaaaaacgtgttaatcaggaacttactacagagctgaccaacactaagcaatcacttgaagaagaagcgaagcttagaagccagtttgaagaaaaggccaaaaagacaagtgaagagttagcagaaaaaacagaagcgtttaatgctctttctgatgagtataaagctcttggtgagcagtatgatgagttagaacaaactcatacagctaccattgaaaaacatagagaagtcgttgaaagcctcaatcaacaactacttcaacaagatcttgaacacacaaatgaaattgagttgttggaaaccactcatgaaaacgctattaaaaagcttaatattgagcatgaaaacgagattgaaacgcttaaaactcaacaggcttctattgttagcggattaaatagcgaaattaccaatcttaaagatgccgttgtaagtatcacagaagaaagggatggtttcaaattcgataaagaacagcttgagattgaattagcaaaagctaaacaagctattattgacatggaacgtaagcacaaagaagagcttgaaaaacgtgatgaagagaaagtttcattcgaaaaaatcatagatgatatgaaaaaagagaagattgaaaccgataaagcgattgaacttcttactgaaagcaataaagatcttattaaaaaggttgacgaacatatcaactcttataatagccttaaaattgaaaatgataagctaaaagctgattataataaagagaaggaagaaaactctacattaaaatcagaaaatgaacagcttaaaattgataaacaagctttagaggaagcaataagaaaagatatagaaaaaaagaataaagctgataacagtaataaaaataaaccaactaaaaaataa

SEQ ID NO: 170149 - DNA, 351 bp, Enterobacter cloacae
gtgtcccggctggcccttgatgccggggtgagcgtgcatatcgtgcgcgactacctgctgcgcggattgctacggccggtcgcgtacaccacgggcggctacggcttgttcgatgacaccgcgttgcaacggctgcgctttgtacgggctgccttcgaagcgggtatcggcctggacgcactggcgcggctgtgccgggcgctggatgctgcggacggcgatgaagcggccgcgcagcttgccgttctgcgccagttcgtcgagcgtcggcgcgaggccctggccagcctcgaaatgcaattggccaccatgccgaccgagccggcacagcacgcggagagtctgccatga

SEQ ID NO: 170150 - DNA, 750 bp, Enterobacter cloacae
atgcattcatttgcatttgctttcaaaaacatcctcaagaccatgatgtttatactgggaatattaaatgactatttctctgtgggtttaaggagaaaagatattaaagaaaaaatcagtgaactcaatgaaaaaaaagaaagattaaagcgcgaagaaattatcattgatttatacaagaaaaagctcgcctctagcaaggggaaagttgatgacaaaatcagagaaaaaatcgctcaacatattgccagagagttggaagataaccttgatgatgaaattctgcgacatgatgttttcatgaagataagtgaggcaggagaacaggttgaagttataattcatgaaagaaaagtcagtgagcaggtaaataaaaaagaaactgtagtgaatttgtttttattgcatgaaaagaataaattatttaaagctaaggcattatctgctttttttataattataaacttagtgatggttgcaactttgaatctaccagcttggtctttggttataggttgtatcattatctttctaatcgagttaaaagatcaactgcttacctttcgtgtctctaaaggatattttggcacaagtgcatatgaagcgattcagttgcttaaatttatcagagaaaattccgataaattcgactcagatgataatgacggcaacccacgacgtatattaaatccaaaggacataacaaaaaaatcagacaacttatttgaaaaaggatggcagaatgtttga

SEQ ID NO: 170151 - DNA, 756 bp, Enterobacter cloacae
atgacgagtcccgcagcgcgtcacatgatgcgggtctcggcctctgaaacagcgcggcgggctgctgtcccgctgcgcaatgcaactgcctatgagcagatgctcgttaagctggccgcagacaaccgcacgctaaaacaaatccgatccaatgagcgcaaggcagataaaaagcgtgagctgctgccgttctatctgccatgggtggctggcgtactcgcaaacggcaagggtgcgcaggatgacatcgtcatgacagtcatgctgtggcgtctcgatgctgacgatatcgccggggcgctggagattgcccgttacgccatgacctatggcctgaccatgccgaccggtcgacgtccgacgccttacctgctggccgaagaggtggcactggccgcgcagcgcctgctcgctgcaaaacagccggtcgaactggcgaacctgctcgacaccattgcactgactgaacgcgctgacatgcccgatatcgtgcgcgcaaagctgcacaaaatcaccggctatgtcctgcgtgatgcgaatcaactgcccgaggcgctggcgcacctgcaacgtgcgatccagttagagcgcactatcggtgtgaaaaaggatatcgagcagctagagcgccagctcaggccaaaacccgaaccggcaccgaaaaccaaaacgactaaaccgcgcacgcgcaaacctgccgctaaaccggcggcacggcgcgggcgtccaccgaaggcggcaaaagccgcaggttaa

SEQ ID NO: 170152 - DNA, 1095 bp, Enterobacter cloacae
atgcgtaaacaaacccgctttaaattcaatgcctacctgacccgcgtcgcggagctgaacgacatttccacggatgacgtggcgaagaaattcaccgtcgagccgtcggtcacgcaaaccatgatggacaccgtgcaggagtcgtcctcattcctgacgaaaatcaacatcgtgccggtcgacgagctgaaaggcgaaaaggtcggtgtgggcgttaacggcacaatcgcgagcaccgccgatactgacggcgatggcgagcgtgaaaccgctgattttaccgcgctggagtccaacaaatacgagtgcgcgcagattaactttgacttccatatccgctataaacagctcgacctgtgggcgcgattccaggacttccagacccgtatccgtaacgccattatcaagcgtcaggcgctcgatttcatcatggccggtttcaacggcattgagcgtgccgcaaaatctgaccgcaaaaaaaatccgatgcttcaggatgtggcggtgggctggttgcagaagtaccgcaatgaagcgccagcgcgcgtgatgtcaaaaatcaccgatgaggacggcgcggtcatttccgatgtgatccgcgtgggtaaaaacggcgactatgcgaacctggacgcgctggtcatggatgccaccggcaacctgattgatgagatttatcaggatgacccggagctggttgtcatcaccggtcgcaagctgatggcggataaatacttccctatcgtcaataaagagcaggaaaacagcgagtcgctggctgctgacatcatcatcagccagaagcgaatcggcaacctgcctgccgtgcgcgtgccttacttcccggcgaatgccctgatggtgacgcgtctcgataacctgtctatctacttcatggatgacgcgcatcgccgcagcatcattgaaaacccgaagaaagaccgcatcgagaactacgagtcaatgaataccgactacgtggtcgaggcatacgctgccggttgcctgattgaaaatatcaagctcggtgagtttgccgcgcctgctgcaccggaaagcgcttccactccagtagataacgaaggcggagagtaa

SEQ ID NO: 170153 - DNA, 507 bp, Enterobacter cloacae; identical to SEQ ID NO: 154041

SEQ ID NO: 170154 - DNA, 756 bp, Enterobacter cloacae; identical to SEQ ID NO: 121843

SEQ ID NO: 170155 - DNA, 333 bp, Enterobacter cloacae
atgcagtcgagcaaaatagtctatcaacgccaggggcattattattacgtcaagcgtcgcgacagtttgtcgagcagtctggacgccagcaaaattttaacgcttgtcgaatgcacgttacagatggaaagaacatttccgtcaagctacaggcatcttgtcaattgccactggtttgatatttacagcaaccatcggtcctgtcttacagaccaacaattacaactcgtgaaacaacgcgtaaaggccatgtacacattgtcttttttcctgtccaccgatgttcgttttagctacaaaaaaagggttattgaggcgttatggaaaaaataa

SEQ ID NO: 170156 - DNA, 204 bp, Enterobacter cloacae
atgaaagcctacgcgctgcagggcgacaccctcgacgcaatttgcgcccggtactacgggcgcaccgtgggcgtggtcgaaactgtcttagaggcaaatcccggcctgtctgagctcggcgtcatcctcccgcacggcacgctaattgagctgcccgagaccgacagcgcggccagaaccgaaacggtgaatctatgggactga

SEQ ID NO: 170157 - DNA, 567 bp, Enterobacter cloacae
atggatggttatgcaatagactttcaagatttgcttggaataagaaaattaaacgagcctggtttggacaggagggcgttcacaaactgggctgaaaaacagattgctgccggcattgagtcttcaaatcttttgattttggcatctttgggattagataaggaaatctcaaaagatgaggtgtttcgctattttgatggctacgttgaagaaattggagaggtgatgccaactgaacgagtagcgttaatattttcactacggctaacattcaaaaagctcgcctattctgaacttgagggtgatgtctggagtgaattaactagaacttttgttcagtggtatgacttgccaaatggccttttaaatagagtaatgacgtactggagcgcattgcatgatgattttatcaataattatgaatatgaggttggatattattacctgaactatcagcgacacggtgacattcctcgctcgaaacaattagagtacgttcgtaattgtgcagttcgctttctccgcattttcgatgaacagtactattttggtttgctaatcaaatga

SEQ ID NO: 170158 - DNA, 219 bp, Enterobacter cloacae
atgaatggtattgaacatgctatccgctcgtttggctcagcaagtgcacttagttccgctatcggtgtttcaaaaatggcagtctccctatggcgaaaaaatggcgtgccggcagagcgggttttaacaattttcagggcaaccggaatttccccacacgaattgcgcccagatctctacccaaaccccacagatggtttacctaaacaggagccttaa

SEQ ID NO: 170159 - DNA, 1089 bp, Enterobacter cloacae
gtgattcagtggataaaaaaaataaataggtctagaaatcatcatttcaaaatctataaattcaagctgagattgaaattaatttgcattctatctcatagatacactatacgacaaaaatacaccaatcataacaaacaattggtaatacctttcattggtaaagggattggcgatgccatagtttttactgggcttattgaagcattaaaaaacaacgattatcaagttactattgttgctgacagtaaaagccactttctttttaaagagtggagcatcatcgacaatttatttttatatgatactgaagagaaaagcaacactattcaaaaattaaaaaaactcggcccgtttacatttattgacccacacgaaataaccaactcaagcattgatactttcaatattataagaaattccaaaccaattaaatctattggcttcaacaataaatttagcgtttatgaccacataattgaaatgagccaacctagtgggcacatcagcaacaaatgtatcgatgtcttgaatttcctagacattgaaatagcagaatataattattttgttcacatccccgacaaaaacataaaagaatccaatgaattaatcaaaactgccaacggaaaaaagattattatctttaatccatttggcggagttaaggaacgcttcttctctaaagatcaaatcacctccatactaaattacttatcacagtttgctgaagaatttcatgttgtgattatcggtgagcaagaaaaaataaaagaaatcccgaacgggaataatgttaccaaaaatacatatacatcatttcttactgccgcacaattaatcaaagaaagtcaattggtaatcactccagatacttcaattgtgcatctttcaagggcgttcaataaaagaatagtttgcttttatccatttaaaatgctaagcgataagttaaacaacgcagatgtttggggaccgaattatgatgctgctttacaagttagactcacagagacttgtctggcagaagctaaggtagaattaatattagctcatattggttctgaaataagaaagttgcagctttga

SEQ ID NO: 170160 - DNA, 1470 bp, Enterobacter cloacae
atgcatcgaattgatacacctacggcacaggccgataaatttggacccggcaaaaatggttttacgaatggcgacccggcgaccggccgccgcgctaccgacctgaacagtgacatgtgggatgctgttcaggaggagatctgcgctgtaattgaaaagtcagggctggccctgaataaagatcagcacgatcagctttatcaggcgatcgttaaaattatcacttccaaaattccagatgctctcctgaaaaaaaacaacctgtctgacctgacagataaagtgctggcgcgggccaacctgcagttaaagacggcagcgcaaaaagatgtagtcacctctaaaactgacgtgaccgctgatcgagttttaactactggctggatgagtctcggtggatacggtacagataatatgattgcgggcgctgatgcactaaaaccgctgagaaacggtttttacggcgtacagactgagcctacatatggaaacgctgcgctaattagctttggctatgactcaggttcgcaggttcatattattgcgaggcagggcgggcaggctccagcactgggtgtatgtggctccacgcctcaaggggtgtttggtaactggggaaaaatctatactgaatttcagaaacccactgctggggatgtaggtgcgctgccaattgggggcggaactttaagcggcgctttagctgttgttcaaaatggcgcagcaatagcagtccagagcagaacagcatctcaagcggtgtatatgataggtaaggattatgatggcgcaaattgctggtacgtaggacgtggaggggctaattacagcattgcactttataactataaaggtactaacggattaaatattaacgaagatggttcaatagctttaaatctggcaaacgggaaaccatttaccataaacgggcaagtggttcctaccaattatacaaattttgattcacgatatgtattaacggatggagctacatacgcaggatttgtgaacggtgatgcaacccggccttatatgcgccatcgagttagcaatgcagtggtggagctggcaaaaaaaggggattcgtatactaaagcagagagcgaaagccgctaccagccaaaaggaaattacaccccagcagggcaggcatatacgaaaggcgaaagtgatgcgcgttaccagttaaaaaacaccgcctcgcgtgctgcaaatggatggttcaaagatacaactaccggaatgatctatcaatggggaaggaacgcttcatctgttgttggcaatacaacagtcacatttcctatagcatttccaaatgcctgtttgaacgtccaaaacacacttataaggaattcaggaagtgctggcgagaggccatggggattcgtcacaagcttcaataacacatcagtaaatttatcaagtgacgctacaggttcatactggtatgcgataggatattaa

SEQ ID NO: 170161 - DNA, 1980 bp, Enterobacter cloacae
atggctgacagtttccagttaaaggcaatcatcaccgccgttgaccagctgaccgggccgatgaagggaatgcagcgtgagcttaagggcttccagaaggagatgggcagtcttgcgctgggggcggcagccgcaggaactgccatcctcggtgcgctggcgctgcccattaattctgcgatcgggtttgagtcaaaaatggccgacatccgaaaggtagttgacggcctcgatgataaaaaagcgtttgcgcagatgagtgacgatatcctgacgctgtccacgcagttaccaatggcggcggaggggatcgcagagattgtggcggcaggcggccaggcggggatcgcacgtagtgatctgatgcagttcgccaacgacgccgtaaaaatgggtgtcgcgtttgacaccacagctgaagagtccggccagatgatggcgcagtggcgaacggcgttcaaactgacacaggatgacgtggttgttctcgctgacaagatcaactatctggggaataccggtccagccaacgcgaagaaaatctctgatatcgtcacccgaatcggcccgctgggcagcgttgcgggtgtggcttctggtgaaattgcggctatgggggccacgatcgccgggatgggcgttgaatcagaaattgcctcaaccggcataaaaaacttcatgctgtcgcttaccgcaggcaactctgcaacgaaatcccagaaaaacgcgcttgctttcctgaagcttaaccctcagaaactcgctgaggatatgcaaaaggatgcgcgcggcgcgatgctgaaggtgctggactctctcgcgaaagtaccgaaagcgaagcaggccgccgtcatgaacgcgctgtttggtaaggagtccttaagcgcgattgccccgcttctgaccaacctggatctgttacgcactaactttgaccgtgtggctgatgcccaggaatatggcggctcgatgcagaaggaatatgcatcccgcgcggccacaaccgaaaaccagctggtactgctgaaaaacagcgtgaatgcgatttcggtgacgctgggcgacactttcctgcccgccattaacgaagctgcagaagcggtcatgccttacctggagcagctcagaactttcgttcgcgcgaatcctgaactggtacagactgcggcaaaatttggtgcggcgctgctgggcgtaggcgtttctatcggcgtgttatcccgtgcgataaaagttctgaatacggtaatcaatctgtcaccggccaaagttgcgatcgcagcgctggcggctggcgccatgctgatcatccagaactgggatgacgttgcaccggtaataaaagctgcgtgggttgaggtggataaggtggctcaggcatttggcggctgggaaactgttctgggcggtgttggcttgtatatgacaggcgtattcacggttaaaacactgggtacgctgcgaaccgccctgaccttagcaacacagctttccggtgtgctggggaaaattgccacgctgggggcgaccaccgttcagattgctgttgctatctacatgtttgagcagctgaaagagatagctgatgcggcaaaggaagcggatcaaacagattctttctgggagtctcttaaaaaccgctggaattctggtggctggtataacaaccagcaaaatcgcgaaatggtaaagcaggatactgcagagaattttcagcttcctgaaccattgaaagcaccgatatatcagcctgcagtacctttggttcagccggtgcgggtcagtcctccttctttagagatgggtaagcagccagtatttgagcgtgctacctccccggtaactcagcgcggtgagctgaaagtcactttcgataatgcaccgcctggaatgcgcgtacaggagaccccgaaaagcggtgacccactgatgaacatttcccatgatgtggggtattccccgtttcgcacaccacgttaa

SEQ ID NO: 170162 - DNA, 327 bp, Enterobacter cloacae
atgacaaaagaactggctctgaaaaagccgattttagcgcataacgaaaagctgcatgtgctggagttgcgcgaaccgacttacgacgaaattgaagcgattggctttccgtttactgtttccggtgacggtacgatcaaactggatagttccgtagcgctgaaatatatcccggtactggcggggatcccccgctcatctgcagcgcaaatggcaaagctggatattttcaaaacctgtatgcaaatactcagtttttttacccagtcggagacggaactaacctcagacgacgactctacaacgtcgcctggttctggaaattaa

SEQ ID NO: 170163 - DNA, 369 bp, Enterobacter cloacae
atgccagcaagaacgcctaaggcatgtcgtaagcgaggttgcaggcagaccacaacggaccgcagcggatactgcgatgaccaccgtggcgagggctggcgacagtacaaacccggcgtgtcacgtcatcagcgcggctatggtgcgtcatgggataagacccgtctccgtattctcaaaagagaccgggggttatgccaggaatgtttgcgccgtggcgcaataaccgaggcgaccagcgttgaccacaggctgccgctggcgcacggaggcagcgacagtgacgacaaccttgaaagcctgtgtaccccatgtcatcgggcgaagacggcgcgagagcgcctgtcaggcaggcgggggggagggtaa

SEQ ID NO: 170164 - DNA, 540 bp, Enterobacter cloacae
atgcaaactataatttgcatcggcagcggcccgtcgctgataccggatgactgcttgcacgcaaacgcatctggtctgccagttatcgccgttaacaacagctggaatgtcgtgccagattgtcagcacatttacgcagcagactgctgctggtgggaagaatacggaggagggataacatcagaggctgcccggtggtgtggcgatgagttcacggcccggcggtttggcattaactggctaccgtctgcaatacccggttcgttcaattctggtcagcgtgccattgagctggcgatccaccttggcgccagccgcgttctgttgctgggctatgactgttcaatacgcaacggcacccactggcacggcaaccatgctctgttgtccaacccggacaaattcagcgtagcgcgctggcaggatgagtttacccgcctccgtgatattgctggtggcgttgaaataattaactgctcccgcttcacgcggcttacctgcttcccccgacagtccctcgagactgcactttctctgtag

SEQ ID NO: 170165 - DNA, 267 bp, Enterobacter cloacae
atgttgaaaggtattagtgctttagataaatggctagttcgctccacttggcatacaggtcatactttcgatctggaaattttctttcacgctgttaaagaaattattgcccataacccggacaccttactccacgaatcagagattgctgcttacattaaaagctttcaatccggaaagtttgatgcaagtgagcttgagcgtttagcaaaagaatattcgcaaaaagcagaattaatttctgaatatgtgatgcttactaagtaa

SEQ ID NO: 170166 - DNA, 207 bp, Enterobacter cloacae
atgttagagagctacttcggtcctcgaccatcagaggatgaaaaaaaacgtcttttagctgtgcaggctgctttagagataatcaaagcatcggcaagctccgccagtgatagcggcggtatgtataatgacattcgttttgcctctgaaaaattagaagaattagctgattctattcagactgcacttgagtctgatgaagactaa

SEQ ID NO: 170167 - DNA, 291 bp, Enterobacter cloacae
atgtctacgtttgcagtgatctctgacgttgataacaaaaaacttctgcaacgaatcgaaagcatttacgcatctgaagagattcataaagtcgactcaaggctgctattgattagctcagagaaggacgtcattgctaagagcgtctatgacaaaatcgaaggtgatggtgttgagttcacatgtaaaggcgatgctgagattggtcgatttgtaattttttccatcacttcatattacggtttgcattacacctccatgtgggagtggttggctggtaaggtcaagtaa

SEQ ID NO: 170168 - DNA, 291 bp, Enterobacter cloacae
atgactcaaagcttccagagtttcatcaaatgggtcggtctttcactgcctatcgttgctgcccttgtcggtacgactgtttggatcaatacaacgatcgacaacaaggcgcgcgagaacagactagaattaaaagcagaccttgaatcagctaaggttgagctgaaagctgaagtgatcagaacccaaggagatattgctcgcttggacgacaaaattgatcgcaagatggataaactatctgaccagctaactgtgataaatcaggaaattcgtgataatcgcaagtaa

SEQ ID NO: 170169 - DNA, 276 bp, Enterobacter cloacae
atgtatttaggcatgggcgccctcgcccagcagatagagcacctgcaccagcagctcagcttcggtgccgtacttcatttcccaggcgcggcggccagcatgaatcgctacaccgtaaccaccgttgcgatggtgcatatggcacaggggaatagatttccgatggtcagcacgttgactggtgccctgaccggttcggatatggtgaatttccgcaggcgtctcgcccaggttctggtttctgcacacgatgcagcccagcgcggccacacgtga

SEQ ID NO: 170170 - DNA, 219 bp, Enterobacter cloacae
atgaaattgaatgaatttgccgccggcctcaccaaagacggaatgattgttttatgtcttactgatggtgaaatcactgactacctggtgaccagtaatgccatgcgcactctgattcgtcgggacggtgataggctttcatcccaagtgctgggtgaggaagaccgtatcatgaacttaaactccctgccgcaagcacttaaagttctcaagcagtaa

SEQ ID NO: 170171 - DNA, 327 bp, Enterobacter cloacae
atgaaaattacatcaccagaggcaaattacacagagcaacagttgctcagcataagcagcgtatgcggctatgacgataattgccgcactatcgaaaccagtgacggatacgtactcatcaatgtaaacacgaaaccccgaacaggtgacaccgttcttattgcattctacggaagaatggacttagcaaaggtacagggaaatgccctcattacgcaggatggtgaggatatcgaaggagattcgctggatgacgtgaacattgttggggttgtgacgttctttcttaatcgtgtaactgaaactgataagaatcctgttatttag

SEQ ID NO: 170172 - DNA, 525 bp, Enterobacter cloacae
atggaaggtaacgcccttataagatacacggctatatcgctcatattaggaatactaccaataataatagttttttccatatatttcggcgataaggattcatccatccttatgaccctttacgaatgggcaaaagggtataatcgtgatttttcagaacaacatttagttgtgagcacaatagcttctgcatatactaaaacagcccctctgtttgctatattgatgtatgttttatgctggaacaggcttaaaataacactcaaggattatgatttaaagggctggcttaaactcctaccaggtatgattattctcattgtaggcatatactggctaacatactttggcattgataatatgtcggacagtatgtacagagtaaaaagattaattgcagcgaatgaatttttcttaatggtttattatattttattatttttgacaaactatgttttcatatggatgttcatgctttatttgtatgcattgaaaggcgtgccttactttaaaaagcgggtataa

SEQ ID NO: 170173 - DNA, 1146 bp, Enterobacter cloacae
atgcctaacgaagattcaatgacggttgacggtaatgcaggtagtggtgtccattggggtggcggttcagggaatggaaatggtggtggttctggttctggttcaagtggcggcgcaaatgttgccttgggcggtgtcatggaagttgacctgggcaatggcctcacaatgatcgttgaggggacgcatcctattaatccagggattggaggtgttccttgggcagatgccaaaactaataagagcgcatcagacgctctcaaggctagcaagaacaaaccggcgaaatataaagccaatataaaaaactggcaagaaggttacaaaggaacgttagatagacccgcggtcagcaagatacttgataatggtgatataactgcatacgcagtaagatttggaaaagagatatatcaagttagatataaccgcaaaactgacacattcaaatctagttacgcagacggtactacaagcaatccagattatattatgcatgatcaggctgttgcggttgttcagctgtatcttcttgatcaaaagcaaaaagaagcaatcactgcttctgccgaaattattgtagatgccggtgaaaaaattagtggtaggctgggcgaaaaatataaagtcctggcgcaaggtgtggctaatgatattcgtaattttcaaggtaagaaaatacgcacctttaaggaagcgatggcctcccttgaagcaatcacgaaaaaccctaacatgaaattaagccaggctgataaaacagcgctggttaatgctctcaatcacgtgaatctatcaacgctggcagaccggtttaaaggcctggaacgggcctttacctgggctgatagattgttaaaagctcaaaagattaaagatggggctatcattggtatcaccactgggaactggcaaccattggcattagaagtagaggcgatgtatttaagtggtattgctggtagtgtagctctcggtatcgttactgctttgattagtggattggcatctcttgtttctatccctgctgtagcgatcaccgctcttacagttatggccgtcattggcatagcaattgctacatcatatattagccctgataaagctaaagagctaaacaatgctgtagcaggtttatttaagtaa

SEQ ID NO: 170174 - DNA, 1014 bp, Enterobacter cloacae
atggacatcaagatcagcgaggcattcagaaacgcttctttcatagctatcatgcttgtgttagccatacactacggtgacctaacaacaccagagattacccatggcagtgttaattatttcatacaggattttattcagaacggtatagccagggctgccgtcccgttatttgctttcatcagcggatatcttttgtgttacaaatcagatagttatgcaaccacgcttcataaaagaatgagaactctggctataccttacgttatctcatctttgtttgctctgatatgctatattgcaatacacagaggagaaacgtataacactttagcaataataaggaatatattcattacacctgttaacgggcagttatggtttattcgtgacttaatagttatttctgttatttcaccagtattatttttcctgtcaaaaaacacttttatatcttatagcacattaactgttttggttattttgtgggcatttgaacttcagcccttcccagtgattggatggtatattttaaaccttgacgttctaatgtttttattcttaggttttatttcatgcagatactttaatgcatttaccttaaacaataacacatgcataaaaatattcattttcagcttaacagcatggttagcattaactttcgccaggtgtttgttggaccctaattttaacttatggtatgtaagagagttttctattaaatcacttctcttacaaaaatcttctattgtttctggtgtgatatgcatattatcaatctgctactgctttaaaattaatataccaaaaacagtcacttctatttctttctttgtttttttatttcacaattacccatttgttccattatcaagaacattgttttccaattttggcgagtacaggttttatgtaactgcaccgttgtttgcctgtatatttattttttcgggaattactttcagaaagctcctgccaagaatatatcacttcgtttccggtgggcgataa

SEQ ID NO: 170175 - DNA, 2049 bp, Enterobacter cloacae
atgaccacttacgccactaataatcctgtcggctctacagacccgagagatttatatgacaacgcccaaaattttgaccaccttcttttagaccagcaaaatcttgtctggccagacagacttggcaacccacgtaaaacgtggtttggtcttgagacaatggtgtcagaagctgccggaagttttggttatgtactccttagtggagtaagtttcacttctggtgccacagttaacctgaatgaagcgcttcttgatacgtcgacaaatgaatattttgtctggacaggcgtatacccggaaggtggtaaaattgtaccgccaggatcaacacctgattctgctggtggacaaggcccaggaaaatggttaagcatcggctctgcctctttgagagctcagctttcatcatccaatggagcattgctagttggtggtgctattcttgagtgctcaaccgttgctttggcacagtctatcactggcctgacagaagggcgtaaagtccgaacatattactacaatgtgcctgttgtaacggactggatcttcacagctacacagccggctgcgccaacgttctatataactgcggttggtggttatttggtgtttatgggccccgcaacctttgccgctgccggattaaagcttggtgattatgttcctgctgatgcatggtttaacagaaatgttatgcagggcttgatgcgcgatgtaaggtttagcactttccgtgttggcttccccggtacatatcatgtgctagggtcggtatgtcctctgcgtagcaatatattcccgaacattgaggaaggggcgtatatcgttgggcattacaatgactcgtctatccctaactctgatgtgtcgcagtcgggcggtcttttttccttcgttaaatatgcagatccagacaatggcgacttcacgctcactggaaccttgtcaaacatccacttcgttctggatggcgatgttaaaacagtctactcagccacaaacgcaaagcttcacaacaataactgtgttggtttttatgatgtaaataactgctcagttagaggtcgaggtgggattagtggctctgaccatcgcggaatttgttttgatggtaaaagtgtcaactgtcatattgatattaattacatctccggcacgtctgacgagccaattatcatgcgtggcgataagacgaaagcaggtcacacaaacacgatcagagttaacaatatttctggtttggtgttcgatgggcccgccaagggagttgttattaacgctgcacacaactactatctcgatatttggcttggtaattatacaggtacatcatttcagtccgtactagtaaagaatgaagacagcctgtttactaatgtgtctgttaattatgctgataacctgactgaagttgtaagacattatgacgcaggtagtgtggtacttgatggtggtaacttctcaaataccatatctttagtaagacgagctggtactggcgtgactggaatttgccgggatgtgattataaaaaacacaagagctcttgattcatctttactttatgcgttttgggctgagataaatcctgatacgttccatgctttgagaattatggataacgatttctcatccgctgcatcatccatacgcttgtatcaaaacagaatcacggctggacgacctgcaattgaagacttcagaaacaatgaaatgccttctggatacgccccggacgctagctcatttaaccctgtgctttacacccctctgataagggccagcagtaatattcttgcttcggaagtaaattcatttacttaccagtatacaggaatctatgcttttcttagcattcaggtccgtaacacctcaagcagtgttcttgaccagttggagatagatctaattggcatggttcagtcaaactctccacgaaccatgaatacagcagctggaaacgtaactgttgcacgaagcgttaacacgattactgtaacaggtgcagcatctgttgcatttttctacgcatatgggcataactga

SEQ ID NO: 170176 - DNA, 3078 bp, Enterobacter cloacae
gtgacgatcagaatctatccctcaaggttacctggcgagccacttgaaactcatgagcatggcgatacaacactggacgcgtggtttacagaaaatgtcgaaggctgggaactcaacagacaacatccaatttctgtcgaggttaatggtgagccagtccagccaaaagattggccagaccatgtaatcactgataaatgcaatgtaagcatctaccccgttccttatggtactggtcttgaaatagtcgcatgggttgctgtgggcgtggctgtggccagtgctgcttattcaatttacatgatgagcagcatgcaggctggaggatacagtcagcccggaaacggcgatcagattgaccttaatccggcgaaagcgaacacagcgaagcttggcgatccaattcgtgaaatctttggtaagtatcgcgtctggccagattatattgttcagccagtaagccgttttgccaataaaaaagaccttataaccagcatgtttctgtgcatctgtcggggagaatgcacactccccgcatcggagatacgcataggaaatactcccggatcagcatttggctctgatctttcatacaccatttatccaccaggagctgatgtatccggagattcaagaagtgaaaactggtttaattcaccggaagttggcaatacgacatcgggtactgctggccttgatctaagttcaagcggtcctgataccgtaagcgtcgttgcagatgcactactgttcaatggcaacaccgtgacattgataggttcatcttcttctgacgatgacactgaaattcctcccgcctggacgactggtacgatcattgacattgaggctcctgacacatacaccgttgatataaacaacggctacagtgttatttatgggtctgtttcagaaatggcaccggttgtcggaatggctatgacactagagttgaacaatgacacgtataatttatatgtagctgcatatagcccggcagtcccagcagtccctggtgtcggtggtagcaccgcaagtatttcggccagtgctgcacctacgacctatgatttcagtagtaccccacagacatttaccatcacctggaaaagcattacttatacggtttcgcttaccagcaattacgtttctatgagcggtcttgttaatgcgattacaagccagattagtgcttcagggttgagagcacgtgataactcaggtcgtattgtaattgatgaattaagcagtccgtatgcaggtggttcaattggtcacagctcgttaccggtcagtgtatttggttcctctcctgttgatactgcaggtgtagcttcatctggtggtagcgcagcagttccggcaaatatacgtctcgcttatgactctgcaacaggtaccaaattctctgggataccagttggactgcaaaggcttactctttacccaactgattacagttataagataactggcatctcaggtttaacgattactgttggcagagttcatgtaactactgactcatcagggaataccgttgttactgatgatccttcatggcctggatttgtacaacgcacggcgcttgatggaagtgtaacaggcatcaatgatgactatgactgggtcggaccttttcttgtttgccctgatggcgaaactacaaaccgcatagagataaacttcaacttccaaaatgggcttgcaaagtacaatgataaaggaaagaaacgttcacaggttgtgactatcattgttcagtacagagtgccaggctcggccatttggtctgaaaaaaaatatagctattcagaggcggttgaagatcagatagggtttacagaaggttttactgttcctgccgcgcagtatgaaatccgcatgagaagacaggacccgccagctggaggctcagccagggatcaagttttctggcaggcattaaggtcacggctttcaaaaaggcctaccagctaccgtgatgtcactactattgcactaagcatcagaacgggaaaccggttaggagcacaatctgacaggcgcgttaatgtcaccccgacaaggcaatatgaggagggagactcacgttccattagtgcagctttatatcacgtcttaaaatctctcggatatcaggacagtgaaattgacagagcaacaattgattctcttgaaagtacctactggacaccaaggggagaaacgtttgactttgccacttcagatacaagatcagctcttgacatcttgaagaccataactaatgcagggatgggatattttcttctttccgatggaatggcttctgccgggagggaaggggttaaaccctggtcagggatgattaccccacaggaaactacggcagaattgacaacttctttcaaagcaccgaatgaagatgattatgatggcgtagacgtgacgtatatcaacgaactgacatgggcagaggaaacagtccagtgccgcttatctggcaatcctacgcctgttaaagtggaaaattacacgcttgacggtgttttaaatcaggacagagcataccgtataggaatgcgccgtctccttggatatcagttacaacggctttctcatgaaacgtctacagaaatggacgcgctctgctatcagtatatggacagggttatttttagtgacgatatacctggaaatcagacgttgagttgtctcattgagggtgtgagctataacagcagcacaattacccttactttgagtgagccgccagactggacatttactaacccaagggtagttatccgcaatcaggaaggtacagcttctcccttgttagtgccaaccagagtagatgattttacaattactattccttattcctcagacttgtcacctgagacatggatcatggatgacccggcagttgagccacctcgtttaatgttttgctcatcaacacgggtaggatatgacgccttaatcggagaaatatcccctggcagtgatggcacaaatgatgtgacggctattcagtataatcccgctaaatatcagtatgacgacgcagcctaccctggcgatgtcgtttaa

SEQ ID NO: 170177 - DNA, 1938 bp, Enterobacter cloacae
atgaagcttgaccgcgcatgtacgatcatgacggtgaaagctgtggatgaggacaaacggataattaccgggattgcctccacaccatcacctgaccgtgacggcgacattatggaccctgacggcgcgaagtttggtagtgaaaacccctttctctggcagcacgacagaacccaacctatcgggaactgctctgcaaagaaagtgaaagagggacttcagatcacggcgcaacttgttaaaccaacatctgacatgccatcgcagctggtggccaggcttgaagaagcatgggcatctatcaaatcaggtcttgtaaaaggcctctcaattggcttcaggccgattaaatacgcctttctggactcaggcggcatccattttctcgaatgggagctacttgaagtctctgctgtaacgatcccggctaacgccgagtgctcaattcaaacggttaaatgttttgaccgccagttactcgccgcgctcggcactgagaaacaggtagttaaaaccataaattctgctggcgcttcagcacctaataaatcttctcaaaaaggaaaaccaacgatgaatatcgctgaacagatcaaaagttttgaaaacaaacgtgcggcgctggctggttcactgaacgaaatcatgagcaaagccgctgatgaaggccgcactctcgacgctgaagaaacggaaaagtacgacaacacatcttctgaaattaaagcagttgatgatcatctcggtcgtcttcgcgatatggaatccagtatcgctgcatcggcaaaaccggttatcaagacagctaatggagatgtgacagttgtaaaccaggctccagctgtcattcgcgttcctccaaaacttgaaaaaggtattgcgatggcacgcttcacaaaagcacttgctgctgctaaaggtgtccgatctgaagcgctttcaattgcgaaaagcaaataccctgaagatacaaagcttcaccatgttttgaaggctgctgtagaggctggcacaactactgacccagcgtgggcaggggcattagttgaatatcaggattttgcgaatgacttcgtggatttcctccgaccacaaaccatcattggccagtttggtgtaggtaatattccttcacttcgcgacgttccttttaacgttcgtattccggttcagatttccggtggtgcagcgcaatgggttggccagggtaaggcaaaaccacttaccaaatttgatttctcaaatatcacgtttggtttctcgaaagttgcggccatttcggttcttaccgaagagcttattcgattctccaatccaaaagcggatattttggttcgaaactcgcttgctgaatctgtcattgcccgtctggacactgattttgtagatccagcgaaagcagaagtttccggaatttctccagcatctattactaacggtgcgacaacaattccaagcaccggcgatcctgatgcagatagctctgcggcctttgaagtttttattaatgcaaacctgcaacctactggtgctgtgtggttgatgtccagctcaacagccctggccatctccaagcgtaaaaacgcccttgggcaaaaagaatatccagacatgacaatgtttggtggaacgtttgaaggcctcccaactatcgtttctcagtatgtcggaaatcaactgatcctgatgaacgctccagatatctatctcgctgatgaaggcggtgttgctgttgatatgtccactgaagcttctctggaaatggaatcagagcctacgggagatagtgtcacaccaacggctgtcgaactggtttccatgtggcagacaaacagcgtagccatccgagcagaacgttggattaactggaaacgtcgccgtactgcagctgtagcagtgatcagtggcgttaactactcttccgggcagaccagctaa

SEQ ID NO: 170178 - DNA, 417 bp, Enterobacter cloacae
atgaaagctcaggtattcactcacgagaatgaaatcctcgctatggctcctttaggagaggctgatcgaagccttttctcaaagcaaagcgtacagttgattgaaaatggcttgaacgaaattcagtgggatttcattttgccatgtggaaaggattggcatttcagacagaaggttagcctactcagtgatgaattcagactcagcgcgtttaaagattatattcgacgcatcctaatggacgcttctcgtgaaaccatgcaggtcatgatagatggcaaagagacttctgttccttttcattatgaagtggaaacgggaggaaggatgattaaggttcctgaattagagggcgagtttcatgacgccacacaactcggagaatctataccgtcatttatcagcgcacgccgctaa

SEQ ID NO: 170179 - DNA, 147 bp, Enterobacter cloacae
atgttgtgtgccggtctgttcccggctgtcacaggcttcactggggatcctgcccaccacatcggcgtttggtttatcgacctcacccggtttcatttggtctatgccgtctatccggcctgtcgcgtatgccacgccagcacctaa

SEQ ID NO: 170180 - DNA, 213 bp, Enterobacter cloacae
atggcagcttatgacatcaaactttcaaatggttggattagcactatcaattgtgcgagcagcgaaattgaagccatcgaaagactgaaaattgaacgtcagcgtatgggttatgagcataccgatgtggctgaaattaggtgtatgaaagagagctatggcaatggtggttatggattggttgctctcgaagagtttcaccctatcacgtag

SEQ ID NO: 170181 - DNA, 633 bp, Enterobacter cloacae
atgacgaacacacagaacgtcaccgagttacaactacgcatgaccagagagacgcttgttgctctcgctcgcaaagctgcggtttacctccctaccgcttcggcacagataatgaatgagttggcaaaccgtctggaccaaaccagtgttgccctttgtgaggcaatggaacagcgccgcaatcttgccgctgaaaatcttgctctacgcacacctgaaaactggcttaaacattctgacactggtaatgccgcagtcgctatcgctgatggtaacggcgaaacagaagaggctgcgctactcgcaggcatgaaagcgataattgcttgtattgagtcaccggcaacagaagttgtgctgaatgaggttcgctcgacggctattcctgatggatggaggttggttcctgagcaaatgtatcttgatgaagaagatatcgaatcgatctgctcccagtgcggtgacggcggtaaaaactatggcgatttcacatccggcattctttgggttggtgaagtcaacctagacgatggtttgaaatatggccttcatatttcctctgctgattatccagaagaaggtgcagtaacaattcacgagtttaaagacattatcggtaagggatcaaaatga

SEQ ID NO: 170182 - DNA, 474 bp, Enterobacter cloacae
atgacagccaataacccaatgaccggcgaacaacttgatgaactgatgaccgttgcagtaaacatgcagcgcgatagtgaaatatcaggtaaccgcccttccgctatgttcgcttatgcagttcaggttgctgttctggaactgcgtaaggttcgcaatgatgctgtggcgctggctgcggagaatgcggcgctgaaggaattaatcgagcagcacgctaatagtgttgctgtgtgcccgaattgctctcatgaagagcagagcgaaactgacgatatcgttgcgctttatcgttctatggaaaccccggcaaccgaagctgtcctgtctgaagtgcgtgcgcagggtgtggagatggcagccaaaagcgacaaattttcaacatgggtgcagcaggggctacgtagtttcgctatcggcgttcgccagggtgatgagtgcgccgacgagcttcgcaaaggagtgcagtcatga

SEQ ID NO: 170183 - DNA, 447 bp, Enterobacter cloacae
atgagcatcatcgacaaacagactcttactgaagaatcagcgcgtgagtctggaaatattttactcatagttgccgcacgtatggctcgcggtgagcttttcactccactgcgttatgtcagcgaattaccacagaaggctgttggcatgcgtactttccgcgatgcactggaacggtcagaagaaacactcctgcgcgaggtccacaagattgttgacggtcatgatcgcatggctaaaaagctcaaagagacagaagagaagctggaagccgcagagaagctgattgctgagctatcacgtcatctccagtgcgcgcacgcctttgtcgagcatacagaggcgtttggtcagactgcatcaaacgggattctgtgctgtggtgatgcgcagtggaatattgatgcgtctaagttggtactggccgcagccggtaaaggagagtga

SEQ ID NO: 170184 - DNA, 609 bp, Enterobacter cloacae
atgagcactattaccaaagagcgagcacaacaaattttccttggcaacggtcctgagccaaccgcatcagaagaaagggagctggcgcgtatcgcgctggcatcgctcgaagcggaggctgtggcgtatatcattcaggataaaacagacagaaaagagggtaatcgaggagagttaagcttcagatcagtcgagcaatattatgaggaagatattaacgaacatgagttaacggcaactccactttactccgccccgccagcgcaggtatctgtgccggatgatgtgatggcagcaatgcagaaagttgcccgtattcgtcttaacctgaatgacttcgacggcgacaagcgaggtattttggattgccttagcgaagcggaagaagcactgattgaggtagttaaccgccgcgccgccatgcttcagggtgccgaacctgtaacgactgtttacaagttgcctccgcatatttacagagagctggtgaaccgactccgcgatacagcagttaaatatcagggatgtcagcagttacgagagcaattaagccgcaccctgcaggaggtaattcagccagtaacaccgcagcaggaggtgaagtcgtga

SEQ ID NO: 170185 - DNA, 1644 bp, Enterobacter cloacae
atgaataacttatttaacctggcgagaagcggcctgagcgttgcgcagtcggcgctgcgcgtgacgggcgataacctgaccaatggcgtgtccggcacttacagccgccgcagcctgatcattggcgaactgggcggcatgtctaccgggcagggttttttcggctacggcgcgcgcgccggtggcgttgagcgcgcctatgacgcctttgccaataatgagatgcgcggctcgctgtcgcattacgcctctctcaatgggcggatggaacagctggccgatatcgacaatatgctggccgatgaatccgataacgtctcggtctcgctgaacgatatgttcaaggcgatggcgacgctgagcggcgatgcggcggacggcccggcacgcgcggcggtatttaactccctcggtacgctggcgaaccggttcaatgccagcgccaaacgcctgaccgcgctggaaaagagcaccaacacccagattgagcagagcgccaaagacatcaacagctataccgagcagctggcagaggttaacaaacagctggagcgcgcccaggggaatggcgccccgccggccgatctgctcgaccagcgcgatgcgctgctggaaaagatgagcgagcacatcggcatcaccgtgacggaagactacaccacggggcgggttgacgtgcttctttctgacgggcgcccgctggtctccggggatcgcgcctataaattgcaaacctcgccgtcggatgccgatccgaacaaaaccattgtctcctacgtggatgcgaacggaaacgcctcgccgctggatgaaagcagcttcaccaaaggccgcctgggcgggctgtttaagttccgcaatgaagacctgaccattgcccgtcaggagctggatgagatcgcctttacgatggcgaaccgcatgaacgagaaacataaagagggttatacgcctggcggtgatgaaggcggtgacctgttctcactggcggatataaaagcttatgccaatgcaaagaacacggggaccggtaagctgggggcgattgccgtcaccgaatataaaaatgtgaaatcggaaaactacaccatcactatggatgactcgggtggatggaccgtcatcggcgcggatggacgtgaggttcctgcgagtatcgatactattgcaggaacgctgaaattcgatgggattgaaattgatatttcttctggtggatttgccgtcggggacagctttaccctcaatcccatggcgggtgccgctgaaggcatgacccgtaaaatcgaaaacgcgcagcaatttgccgcagcgggtggggctgacgctgatcctggcgataacaacaacctgcttgaaatgctgaaaattcaggatgagaagctgatcggtgacaacacgctgaccgaagcctatgccagcctggtgggaaccatcggtgaccgtgcacgtaatgcgaaatccgcgctgaccagcgccggtaacgacttacagtcgaagtacgaaactaagcagagaatctccggcgtcaatatggacgaagagtacatcaacctcgatatgtttaagcagtattacaacgccaacgcgcagctgctgaaaaccgcgaccgatatgttcgacgccctgctgtcaatccgataa

SEQ ID NO: 170186 - DNA, 1206 bp, Enterobacter cloacae
atgggtttttcacaaggtcttagcggcctgagtgccgcagcaaaagcgctggacgtggtgggtaacaacatcgccaactcccagaccgtggggtttaaagccggctccgtctcctttgccgatatctttgccggatcgacggggatgggtgtgcaggttacgggcgtcagccagaactttggcgatggcaccccgatgaccggtgcctccgcgctggatatggccattacaggccgggggtttttccgcatggtcgaccaggcgggcagcgtcttctacgggcgcaacggggagttcaagcaggatgaaaacgggtttatcgtcaacaggaccaacggcctgtttttgaccggctatcaggctacggacggggtgattaacccgggtgcgcaggtcgggccgattcgtatcccgacggatgatatgccgcccgcggccaccacaaaaggggcgctgacgggtaatctgagttcgaaatctgaaacgctggatcccgcaaacttcgatgcgacgaaatctgacacgtataactacgtcaacgagattgaaaccaccgacagcctgggtaataagcatgctgtaaaagtctattttgtcttcgaaggtgacggcaaatggacagcctttgcgcaggattcgacctccccggagggcggtgataagacaacatttaccgaaatccctcttgagtttgatgaatcaggaaagattataggtacggccactggagtcattgaaggtgacccctataacggatctgctgctgtctccatgacgctggatctgggggcactgactcagaacgccagcgatagccagctcaagcctggcgaaatcgacggccaggcaccgggtaaattcaacaactatgaggtgagcgacaccggtgaagtgatcgctatctacagcaacggcaagcgacagaccgtggcgcaggtggtactggccgactttgctaacgtcggcggcctggcgcagcagggcaataacctgtgggcagaaaccgctcagtccggccagccgttcctcggcacctccagcaccggcagcttcggcgatatcgtaggcggtatgctggaatcctctaacgttaacctgggcgacgaaatggtcaacatgatcgtctaccagcgcaactaccagtccaactcgcaaaccatcaaaacccagtctgaagttctgcagacgctggttaacctgcgttaa

SEQ ID NO: 170187 - DNA, 705 bp, Enterobacter cloacae
atggcgatctcttcgattaacaacaatagcggaacgggcgataccggcacgggcagcagcgcggcggatctgtcaaaccagtttatgaccctgctggtggcgcagatgaaaaaccaggatcccaccaacccaatggacaacaaccagctcacctcccagctggcgcagttcaacatggcggccggcgtggagaagctcaatacctccgtggcgggcgtacaggcgatgatggttcagctcggcagcatgagcgcctcctcgtgggtgggccgcagcgtgctgattgaaggggaggcgaaggtctcctttggcgagccggccatcggtattcagcaggtcggcgtagaactgccgagtaatgcggacgatttccacttcgcgctggtgggcgacgccgagacggtcaccgttcacctggaagatagcgaggggaacggctacaccgcagagctgaagaacgtgaagtcggggatgaacaccttcagcctcgacgatctgaaagagttcaaactgagcgcgccaccggccgaccgggaatacaccatcagcttcgaagcctcgaaccctgaaggcgataagccggaagtcatcggtctggttcaggagcaggtgcaaggggtcacgatggatccaaacgggccaattctgcatctgctgaatcacgacccgatcctcatgagcaaagtgtttgtcattcaaaaataa

SEQ ID NO: 170188 - DNA, 294 bp, Enterobacter cloacae
atgagcataaacagcaaccagaccaccgcgccgattgcgaaaatcgccccgactcacgaggtgcgtcaccgtgcgcagactcaggaaaatgacgctgcggccactagcgcggcgaaaagcgataaaaccgacgtcaccttgagcgccctgacgaagaagatccagaccgacgacagccgcgatgtggatcacgcgcgcgtcgccgaactgcgcgccgcgctgtcggccggaaccctgcgcatcgagcctgagaaaatcgctcaggccatggtgcaggacatgttttcgttttaa

SEQ ID NO: 170189 - DNA, 321 bp, Enterobacter cloacae
atggataacagtgtaattgagctgattgagaatctgcttgtcagcaacgcgacgctgcgccagcttgccgacgccggcgaatgggatgcgttttttgacgagtccgtggcgtataccatggggatgagaacgctgtgcgacattgatttaacccaactggcacagcacaacaaagcgcaggtcagcgcccggctgtccaccatgctggagaacgatgcgcttctgacgcgcgcgatccagggacgtctggcctcgatcagcagcgaactctccgccatgcgtaaaaccagcagcgtggcaaaagcctattctgccgtttaa

SEQ ID NO: 170190 - DNA, 1506 bp, Enterobacter cloacae
atggcacaggtcattaataccaacgcgctgagcctgatggcgcagaacaacctgaacaaatcccagacctctctgggcaccgcaattcagcgcctctcttccggtatgcgtatcaacagcgccaaggacgacgcggcaggcctggcgatttctaaccgcttcaccgcgtctatccgcggtatgacccaggcggcgcgtaacgccaacgacggtatctccctggcgcagaccaccgaaggcgcgctggaagaagtgaccgaaaacatgcagcgtatccgcgagctgaccgtacaggcgaaaaacggcaccaactccgcaagcgacctggactctattaagaaagagatcactacccgtctggaagagatcggccgcgtggcggaaaccaccaacttcaacggcgtgaaggtctttgacggttctaaagagaaaatcaccattcagatcggcgataaagacgaagacaccatcgatatcaagctgagcaagctggatatggaaaccctgggcctggataaattcatggatgatttcgcggatatcgggattaccctgaatggtgcgggtattgctgaaagtaattacagcggtaaagctgatgtactcgctgatggcgctgataccgggcatgacactggaggtacgggcaactggaaattcaccactgctgataaagaccattttaaagtcgctaccggccaaaacgacgcaaccaaacttaatgtacttaagcttgataacaaattctttgtacacgacacagagagcgacaaattatttgaaatcgacatgagcaaagtaacattcgccgatgatggtagtggtacaactgccaaaattgatgctgctttagctgcgggtgacctaacggaaatcaccgatgaagttgataaagatatgctactgaaaggaccatctacattgtcaaatgcaaaactgatgtcagtcacagatactttccaggataaagctggcaccgacatcacacttgatgcagccaagctggatgcagtttctggtgcactgtttgctggtgaagacgtggctacctccggaatgaagcttttctccgttgatggcggtgatgcaaatacctactatgcaattaacaaatccggtgaggtcaaaaccttcaccctggaaaacgatggttccgttactgcagcgtcagttaaagaagctcgtccggcagaagctgaattcattcagaaagaggcaggccaggctgtggccgatggcctgctcgccaagctggatgaagccctgaccaccgttgccgacttccgcgccgacctgggtgccgttcagaaccgcttcagctccatcattgcgaacctgaacaccaacatcatcaacaccaccgaagcgcgctcccgtatccaggacgctgacttctcggttgaagtgtccgccatgagccgcgcgaacatcctgcagcaggcaggtgtctccgtactggcccaggccaaccaggttccgcagaacgtgctgtccctgctgcgttaa

SEQ ID NO: 170191 - DNA, 393 bp, Enterobacter cloacae
atgaaagcgatatatggaatagttgccgcgctcgcgctgggaggttgtgccgaccataacgcggagaatacggccccatctgaggcgaaattttccgttctgaccatgacctgtacggacgagagcggcgcaactcttcaggtaaaaatgtacgccaaaaccgaaacggtgacgctcgacgggaaaacgtatcactttgttgagccaacaggggagcaaatcaactacgcgaagatgacctttagtaatagtgctgagggaacgctgtatttcgacatgggcaaacccggatacacgtcgctgctgaaggtgaagggtgggcagcagaaggtctttaaatgccagaacgtgaaacaaaaaagccctccgacagggagggcaaaccgcgtgtga

SEQ ID NO: 170192 - DNA, 444 bp, Enterobacter cloacae
atgtctgttctttcacctctctctttacacgaaaatttcattcaacagctcatcaccttaccgcttccggcctctgccaacctgtttgacgtggccgatctctgtgcggctttcgcgagcgcgctggttgaagccgatgacgcgagcgaacgtaacgcgctatgcggacgcttgctgcacgcccttggagagctggcgcgtctgtgtgacgacgatttaccgccgcaactgattgagcaacttattgccggagacgccgcgccgtcctgtatgcctccgtgctggcaggagacaattatgccggttaactatgcgcaggcactggcgcaagcgattttagggaataccctgccgcagggggtgaatgacgcgctgacgggactgctgcacgacatggtgtatctgctggtggattatgtgaaggaaccttatctgcagtcttaa

SEQ ID NO: 170193 - DNA, 1164 bp, Enterobacter cloacae
atggtttttatcgttattttagtcgttatttttattaccctggtcattctggtgcaggcgggcgtcatgccgtggtttattcgcaccgaagggcagcgcctgcgcacgcaggttgatgtcctggccacccagcttcgtgaacagcttgaccgcgtcgaggcgcagcagcgctcaatgacggagtgcgtggtcaccctgaaaagctttgcgctggacaaaagcgcccctggcgataccgaacttgccgaagaggcgggcagcaatcgtcaattctttaattcgctggtaaaagagatgggggagcgtcttggcggtcgcgcctggattgtcgacgataccgggcgcgttattggcgatgccgccggcgcgccaacggtgcaatccctcaacgataccgacctgccgatggcggtaccgctgcgcgcgctgctggcccagccggggagcggtttacgccacacccgttttcgcagcgccagcggcgagcatacgctggtggtgatgccgatagccgacacgccgtggctgcttgccacggatattcccacccgccggatgggcgagcgcccggggattcttctgcacaagccgtggccgctggcggcgttgctgctggtctccaccctgacgctgctgcgcagcctgaacctgcatctttctcgcctcaacgacgagctaccgtctcagctgcagtctgagcagggcgcgtttcttcctccgctgatgaaggagatgggcgagcaggtgaacaccattgcccgcgccgctaccgccatcgctcaggaaaacgagaatctgctgcgggtgccggaggccaacgcgaacctgctggcgacgctgagtgacagcgccatgggcgtggtgcaggcaatgaccaccctccaggaagctgcactgaagattgccgacagcagcggcacgctggttcagctggcgagccgcgcctacagctactcgctgcacaacgaagagagcatttttgccgtggagtcgcgcagccttgcaagccgctgcgcgcgctcgtcaaaagagctgagagcgctgattgaagacgcgatgatgcaggcgcagaacggcgcggcatcggtgacgcagaataacagcgtgctgattgaagaggtttatacggtggcgaataccctgcttcagcgcacgggcagctag

SEQ ID NO: 170194 - DNA, 492 bp, Enterobacter cloacae
atgttttctctgaagcgtttattgcagacggctgatgcgccagctatgtttcccgtattactctgtcgtctggtgctgggattatttttcttcaccgccgggttcaataaattatttgtgcctgaaaaccagcaactgatgctggataccctgaccgacgccgggatcccgtttccggcagtgatggcggtggtcgtggcctttctggagtgttcgatgggttttctgctgaccgttggactgttcagccgcttatgcgcgctggtcctgtttattatcagcaccgtggcgctggtgaccatcggtatctataccattccgcaggggctgaacctgatggcgtggctgagctggcttttttatctgcctgagacgctctatatggtgctgtgcctgatgcacatcacctggggcggcacgctctgcagcctcgacggctggctgctcaagcgtctcgagaaggggcgcgagattgtttttattgatggttaa

SEQ ID NO: 170195 - DNA, 792 bp, Enterobacter cloacae
atgctcaataacattgtgattggatcgttagtgacgctggatctgcagacccgcgagcttgcccgtacggatacgcaagagaccgtcacactcccccagagcgcgtgcctgtgtctcgccgcgctggtggaggcccagggcgaggtgctttcccaggagcagctcatggaggttggctggcgcagcgcgggcgttgaggtgaccgaaaacagcgtgcgggtaatgatcaccaaactgcggcgggcgttcacccagttgcaggtgcaggaggccatcactcttattgccgtgacgcgcagcggctatcgcctgctggtcaaggagacgagcagcgcgccccagacctttactgcgccgccggatgacgtgccgctgcccacgccttctgaggcaacctccccgccccgcgtgggtaccgggcgaaagcagaagcgtgtggcctgcatcagcggcctgctggttgggctggcgctggcgctgctggcgcgcagcgttatcgactttagcccgcagccggtccacttcgtgcgctggaacggccccggcgtaccgcccggcacgcaggtgatggtgcagtcagacaaacaggggcaaagcagcctgattgaatccacgctacaaacctatacccgtcacgtgctggaccgccgccccaacgaaaaaccggccgccgtgctttacgtcaccaccggctctgaaaaaatgagccagttccaggggcttattgcctgccaacaaccctttaaggattcagggaatgactgcgaatcgttctattttcgcctttattaa

SEQ ID NO: 170196 - DNA, 408 bp, Enterobacter cloacae
atgaagcaatgggtgcccggactgcttctgatctcgccgctggtcatggcggcggacggctcctggagcagcagcagctttggcggcacgatgacgcggggccagcaggtgctgaagagcaaaccggtgcaaagcccctctcccctgcccgcgggggccgtggcctcccgcatacactggaaaatcgcgacccatgggctgaccccgccggggtttcgcattcgcctgtgcagcgcggcacgctgcctgccgctgtccggtttttccggcgagcagcgtctgccagcctgtatgccagcaggcgggccgtttcgtttcgagtattattctgtcgcgggcgggcgccttgacgccccgttaacggtgctgagtaatcaggttacggtgagttaccgtaaccgcggttaa

SEQ ID NO: 170197 - DNA, 1293 bp, Enterobacter cloacae
atgaaaccgttattttatttttcgccgcttcgcagggcgatcctcgtcacactacttggcaccgccggtgcttcctctgccgccaccctcatcgaaaaagacaccctgattgatggtcgctcccccagtaatgaagactatcaggttcaaaatggcgcgacgctaaccgcaaaggatgcggttgccggtaacgtgaccatctctgacggccatctggtcatggacggtggtcagattaatgattacctgatgctggacgctggcagtacggcaaccattgataatgccagcgttaagttcgccgcattgatgggggactcccggctgcggaacacgacgattgaaacccagcttgttgtgtatgatgctcagttagctgcggcacaagtccgcatgcagcaattcgtgacgaataatgccgaggtcatcgtcgagaatggcgtgattgccaataacaacgaaatgtacaccggagccgttgattttgacgataccaacggcacgtttatcggtagcaccataaagggatatcagtccggcatatccctcaacggcaagaacaaggttggtctggatcattccagcgtctgggcagtaaacggtcctgcttttatggcccgcaccgggacgcaggatattctcctgacaaatggcagcaccgctggctccgataccggtgaacttctgaccgccagaaagggcagagaggtctccctgtcgctcaacgccagccaggccgcaggcactgtccgtgcggaagagggggctgtagtggacgtcgcgctccgcaacggcagccacctctccggcagcatgaccaacgtcaatgccctgtcgctggacaactcctccctctatgaaatgacggcggattccgatatcaaatccctttccatggcgggcggaacggtgaaatttgccgcaggcgaggagtaccgcaccctgacgctcggtacgctctccggcagcggccattttgtgatgaatgccgatctccgcacgggcgaagccgatcttctggatattaccggcagcgcctccgggaaacataccctgcacgtggcggccagcggtcgtgaggccggtcgcgacgcgctgaccctagtgcgaaccggcggcggtgatgctgagtttgccctgaatggggggcgcctcgacgtgggagcctggcagcatacgctggtgcgtaatggcaatcagtgggagctggtgcaggcgccaggttcaacctccgcgtctaccgatgcaatgctgtcgatggcgtccgcgccacagtttatccatgagtattaa

SEQ ID NO: 170198 - DNA, 675 bp, Enterobacter cloacae
atgaataaaaaaacacgtgatggaataaaagcctatacgccactctcactgaagctgtacgactggtgggtgcttcaggtttctaaccgctatgcctggcaatgcgacacaaagcggcatcttatcccccatttcagaaataacatgaaaaataaccacctcgatgtggggggcggaaccggttattacctgacgtttacgccggatctctgcgacatatcgctgcttgatttgaacagttccagtctggaggcggcgaaggcccgcgtgggcagaaagagaataaaagcgtccatattgcatgatgtgttcgacccgtacccaccgcatttgcgcgagcaatttgattccgtgtcgatgttctatctgctccactgcctgcccggcgaaatgcacgataaagcagaggtgattgcccacgccagtacggcgttaacgaaagaaggatgtttatttggcgcaaccattctgggtgacgatgcgggtcataatcggttcgggcgaaaactgatgcgaatttataatcaaaaaggcatcttttctaaccgcaccgacagcgcagaaggattagcgtctctgctctcccgctatttcggtcatgtggagatcctcattgaagggcgagtggcgctgtttaaagccgagcgcaaaaaagagggtatgctggccgaataa

SEQ ID NO: 170199 - DNA, 543 bp, Enterobacter cloacae
gtgcgctatttcgctgtcgtggtttcatcaatattaatgtgtggctcttctctggccacgtccgtaaacgccgcaaccatgcctgagctggcagaggccttaaatacacggttcgacgtgatgaaggatgtggcaggctataaagcggcgaaccatcttcccgttgaggatctcccgcgggaaaaaaatgtgctcctgaaggcgcagagcgctgcccgtgacgccatgctggatccgcagagtattgacgcgtttgtccagacgcagatggccctcagtaaaaatatccagtatcgctaccttgaccgctggcgtttacagccagaaaaagcgtggcagccccgtcccctgaaagaagtcagagcacaaattctggaactggataatacgatcctgaatctgattagccgtcaaatcctgaccggtggtgggtttggtgaagagcaggaccgcacgctggcccggttgctggacgataagcagctctctgacctggagaaggcacaactgattgacgcgctcgggaagattaaacgtcgctaa

SEQ ID NO: 170200 - DNA, 177 bp, Enterobacter cloacae
atggtgttaaagaaagtcgcgtttattgctattcctctgatgttttccgcctctgccctggccgatcttggcgcaaaatgctgccctttcagcgatgaaaccctgaaagaagagattcgtcctctggagggctctcttgacaaaattctccagctggaaggggtctcatatacctag

SEQ ID NO: 170201 - DNA, 411 bp, Enterobacter cloacae
atgagaactgttattttgttgattgcggcagtgggcctgacggcgtgccagacaaagcgtgagctaccggttcaggtggcaccgccggtcgccgccgcagcaccagcatctgttgcagaggaggtcgccccggttaccgcagtttcaccagaggaaagactgaaagcgtgtcatcaaaaaatagatgcacttaaacactacgataagaagcgggcaaacgcggcacgctatgccctctccagggcgataaaagcaaaagccgacacgcaagccagcgcagcgcatatttcgcctgaagcgctacactatgctgtgtaccatcaggatcagagtgtcgaggttatctgtacgcaagtttcgcagcgcctggacagactgattctgagcaaagtgatgaaaacatctacctga

SEQ ID NO: 170202 - DNA, 153 bp, Enterobacter cloacae
atgaacctggattcgtcatcgtgggtggatgcaggcagtagtgaaagcagcctcaccatctctgagcgcgaacttctcaaagagctggaacgggaagtccggaactatcttgtagcaaaaatatcctgcggcagactttcgctcattatgtaa

SEQ ID NO: 170203 - DNA, 1602 bp, Enterobacter cloacae
atgaatctttcccccgaaatttaccaagccagccagaaaatcaagcccgtgttaacaaattctcacgcaggaaaaatatcaaaaccgtatccggtagcctccttcccgactgtgctggagaatattatccgttccttgcacgagtctacgcacatccccgtagagctcgtcggtaatgttgtcctggctgccacatcgctcgcctgccagtcactaatagatgtcgttcaaccacatacgaatatgccggaaccgtgttcactttaccttatgaccattgctgaatcgggagaaggcaaaacgaccatcaataaattggtgatgaaacctctttatgcttacgccgctgaaatgaagcgtgaatatgaagaaaagcttattccctaccgacgtgaacacaacatatggaaaataagacatcaggccttaaatagcaatctgcggcaggccattaaaaaagggtattctggtgaagatgaagagcgcgaaattgtaaaacatgcgaaatacgaaccacagcgcccagctcgcccgaattttatttatgaagacacgtcgctgaaggcacttgttgaaggcctcggtgaacatccggaagctggatttatttctgacgaagccatcacgttttttaaaagctacctgaaaaacaatccgggccttctgaataaagcatgggatagtgaaatgtttgatttccgccgggcggacggagaggtttaccagattaaaccactcctgacattttccctgatgtcccagccggaagtgttcaatgaatatttaaaaaaacataccaataccgccagagccagtggattcctttctcgatttttatttgcatggtgtgaaagcaccattggctcccgtaacggacatgctgattttaccaacacagagcaggcgctgagtattttttatgaccgagtcaatgaattattgaggcagaataaagtccgtttcaatgacaatacatatgccccaaaaaaaacattagcactgtcagagcgggccctgacatcctggaaaaacaatcggactgaaacagaaaagaaaattacctccggaaatgaatgggagcatattcgggacattgcctcaaaatcaggtgccaataccctaagattagccgctctgttacagtatttttatgatgacacctcagaatatgtttcacagggagccatggggtcagcaattaccattatggactggtacctaaatcaggccagtcagatattctactcgcaatctgaacgctggcagtttgagcaggatgtccgagaactgtaccactggattgtaaaccggatacgacaaaataatggttttgccattctgaaaaatgatcttgagaaatttggaccacaccggttgaggcggacgcataagctcacccctgttctgaaccagttaatcagccaagggtatttcagcgtcattcagacgattaaaaatggtgccctttatgtcgcacccaacctttcgaatggcatgtttatactgcctaccgggtgtaattacactgaccatattattatcgcccagtctccagctaacactaatggccgaccttatccggtggatatcacaggcttctga

SEQ ID NO: 170204 - DNA, 504 bp, Enterobacter cloacae
atgaaacacgctacccccattctgttaagtgcaggaataatgctggcatcgatgtcagctgtaaatgccgccacgcccgatgcacttataaaagcgcatcaccagcgctgcggtaagcccgtcttctatgcgcagaccgctagccacaaaaaagaggtcgagatttgcatcatcaccccgtcagtatcgtattcattcggaaagaccggcgaaatacataaggaaatgaacatttccgtaccggccaccgccacctcgtatgcataccagagcaatcaggttatcagcctgcaggaattaactgtccggaacggtgatatctcatacctagtatctgccgggacaaacgatgaaggtaaacctttcgcgtccctagacgtttatcagggaacacccgatgcgggtaagcatctggcagaaatccggctcgacccggatacggtggtgaacaacatcagccatgcccttgcacaggaaggtgtggcgcaatcagacagcctctga

SEQ ID NO: 170205 - DNA, 483 bp, Enterobacter cloacae
atgaacgatattcttaacctgaccagtgcagttacagaaactctcacctcaccgcagtccgggacaggcggcatcgtgtgcacgccagtgcccgatgaacagcgtgtcgccttctggccacagcactttggcagcataccgcagtggataagcctggagcccacagttttcgcctggatgcaccgcttctgtgaggattacagcggaggcatctggcagttttacacgctgagcaacggtggtgcgtttatggcacccctggccggtgccgacaacgatgaaaagtggagattgtttaacgccatgaacggcaacggtggcgaaatgagcgccggggctgcaggactggcagcttgcctcatcacgtacagccatcacgcctgccgtacagaatgcggagccatgacggagcactactaccggctgcgggattatgcgctggtacatcctgaatgcaacgccatcatgcacatcatcgactga

SEQ ID NO: 170206 - DNA, 384 bp, Enterobacter cloacae
atgaataagcaatcaattcttgcagtaattattacgatgagcattactctttcagcacaggcggaggaagcattgacgggatgtgctgctaaactgtataacatcgagcagcaaattcgcctggcggaaacacacgaaaatagctatcgcctcgatggcttaaaaaaagcctacgcagaggtcgtcgcaacctgtacggatgcctcgctcaaaaaagagcgtgaggctgacgtacttaaaaaacagcaaaaggttatcgagcgggaactggaacttcaggaggcaaaagcatccggacgtgccgataagatagcaaaaaaacaagttaagctcatagaatccagtgcagacttgcaggaggccgaagcagagctacaaaaatga

SEQ ID NO: 170207 - DNA, 489 bp, Enterobacter cloacae
atgcttagaatatgtggttttgtagttctggctctaggtgttatatgcatcatcatgggcctcgatatggatgtcacggtgagctcaggcgctcagatgaacgtatataatacggggctgattgcctccagacagatgactgtctctatcgggtgctcacttctggtcaccggtgcaattcttttgtctggtggtgtgttaaaagaggcgattatcaagagtgccttaccacacgtgaaagcagacactgaatctcttgttcatgaatccaaatttgtagagaaaagggccgatggtagttttattcttaatgaggatgcggttcgtcattatgcggaaaaattgcataaagaaatgccagataataccgcgctttccgttatggtcagtaacgcaccacatattgaaagaataaaatcgggaatgccttctgaattagctaagaaatttgaaaggctacttgagacaaatttgcaagccattaaataa

SEQ ID NO: 170208 - DNA, 927 bp, Enterobacter cloacae
atgagaattaagagcattggatttactataaaaaacaataataaaaacataaatacttcggatgtaatgtctgatttcataaaaaattcttctcgtattcacaaccgaactgattactctcgtcaaatccttatatctgatgataagagtttttacagtggcttggttgtaaccttcagaaatcagaaaaaaaactgtttagcgcaattttccaagggaaaattcaaacttaaagtagaggacttaaccaaaggcgacaaactagtcagctttaatttcttttgtataaaaaagtctaatcttaaaggcttatatatgtatcatcatggttcttgctcgctaaacggcgtatttacgcacttacagactataagcaatgaatttatccgaagtaaatgcagtgaggagatagatcttttagggaaatctccagatccagatttagtaagaaaaataaatgaaaaatatcaagccagattcgagttcagcttaattaccagcaaaaaagacatttcatcaattttgcgtgcatttaaggagataaaacaagctacttttaaatttgatcatgtagatttcaaatcaggtccaatgactgcactttcacctttcattaatactacagatattaacttcaatattgaatctgcaagccgagtaagaacaaccccgttatcacagcatctcgcagatatttataaaaatgtaaccggtatcgtaaaagcaagagtaagagctgtagatcattcaggcattgaaaaagtagtcgattttatgaattgccctacttttcttgagacttacgaattcgatagtatagctaaggaaacagatggaatcacaaacacgaactacctcaaaagcaaagtattcgctataataaaagacgaaatgttgaaagggaaaaataaaaatgtctttaactga

SEQ ID NO: 170209 - DNA, 534 bp, Enterobacter cloacae
atgtctttaactgatgcggtcgttaggcagaaaataggcgtgcaatacgctttattaattatcatttccgccctgtgtctcacagggctattcttcctgtatagacatactccagtagtcagtgataatttttttgatttctaccataaaaaccttcgtggatatttattctcaggatttatctctgttggttcattccttctcagtttacatacattcgtaatagtcaacttaagagataaagttttcgccacacctgaatataaagcttcattctgtgaagcttatgaggtagatgaggcggacataagtgaaaaaaacttattcaagccattagacaacctatcctcatttataaactcatcaattcttctttcatttatcacagccatacttcaatttacaataggattgtcaactaacctctacgcttgtttattatgtgtttggcttgccatacttacaatatgcttcctgattcattgtctaacaataataagaatgaacatcaaaatccttctaaaacagaaataa

SEQ ID NO: 170210 - DNA, 201 bp, Enterobacter cloacae
atgaagaaaagctggttcactcacaccgggctgacaaccgaagaagccaatgagctagtggcgcgctataagtccaaaggggttcccgtcgagaaaagcctcgatattgaccctcgtctttggatagtcagcgcattactacctcagcaaaaatcctcagctaagacagcgcaaagcatgcgttctcgtgcatgggggtga

SEQ ID NO: 170211 - DNA, 1455 bp, Enterobacter cloacae
atgcagcaaaaaatgcgtccttttttacccatcaagagagtatttgacaatgaatttatctctttagtcacagaactaattttcctgataagaagttatggaatagataaagtcggtttttctaatataaaaaaagattataaattatttatttctgcagtacatgatggttggaaaaaagcacaaataaaaatctctcacaatgtcatcaataaactcagtgaaattgaaagtctggagataaagaaaaaagaatttcatcgacaaaaaaacaaagatgccaaacaagagtgcattaacaaaatcaacactttaaaatcagaaattttaattctaagacgttttattgactctatcgtttggactattctcgaagatgaacactcaacgattaggcgattacctttagatgataatcttgacaacctctcaatcaagaatttaaaagaagcaatacaaacacttgaggagattaattccaacccatttacaattggtatctcatctgatctaacgacattcatacacacaggagatttattagtaagaaactattttgatggcactctatctattgtcgagctgaaaacaggcaaaaaaaaccttgagttttgcgatgctgctaatttttctctacattcagaatgtcctatttttgatgagcaatatacaaaagagttatcgcctgtcgatttaaaacactatcaaagaacgaaaaaacaactacaacatatgaaagatgtaacaaacacaataaatacaggagagggatatgatcactttcataaacaaacagtaaaaatccaagataataactatatacctaattacttttcagaaaaaataatggattcttggcgacgcatatctcttggaaaactttgggatatacacgttatagacgaatgcttattcattggagcttacaaaaacgttgaaatggggtttgttgggttcaatagctggatgaaagtctcaaatttcaatggcactgtatttaacatcaacgatagctttaaattaaaattaaccaagccattgttaaacttgaaccttcccaatgagactatcaaagatattcttcttggagaatttattgtcgttttatgcttagatactgaaaaattctataatgaagcaaataagatacatccggggattttgaagagaaaaagggtaactaacagtaaactaaacacaatggatttggttactgtcaatgaagaggccatttacagtgaaaataacggacaagagatttatttagggacaggttttctcagcagaattattttcgactttcagcggccgaaaaatatcataaattggatttataaagatagtgatgtaaaaagacgtgacaatagagaaaaaaacaagaaaaagaaaattactcaaaatgccaaaaaaagcaagtcaaagatagctaagcttagcaggagaaaacaaaattaa

SEQ ID NO: 170212 - DNA, 150 bp, Enterobacter cloacae
atgggtaaaaaagatagtaatcaccagattatctatcggggtcaggtgctgaaacggtttacctctggcggctgtgtctttgttcaacgacaaaaagagtgcggcagaggtttttggttgggccgcacctttatgattgttctgacttaa

SEQ ID NO: 170213 - DNA, 669 bp, Enterobacter cloacae
atgagctttgacaacgcacagattgaaataagagataggttttcagaggcaaactctcttttagcctttcttcgttcaaacggaccagcccctctacaaccagcgagtgaaaatataaaatcccttaaagggctttggttagtctccatatacgccgcagtagaaagatcggtcaatgcagtaatggacgctgcacttgaagttatttccactcacaataataaaagcattgattgcatcccttcgcttcatagcatctttcacttcaaaggaataacatcgataagggattgcggaagaaataaggttttcgacaaatcaattttattattcgaagcgactcatagtgatgaagttatgaaggtgaaagacaaccccttagcagagagtttacaaaacgttgacgcgacaacgatctcttggatacttggtctttttggcgcgccaaacatagcagtttcagcgccatctattgggcgagttaatgctcttcgtgaaaggcgaaatgccgttgcacatgggcgtgaaagcgcctcagaagttggagaaagatatacaattcaggaattagaaaacatttacaatgcagcagatgaaattataactgctttttttctaagcctaagtgactattgcactaaacagcactaccttaaaaaccactcgtaa

SEQ ID NO: 170214 - DNA, 1041 bp, Enterobacter cloacae
atgaacttttcagaagcacttgcggaaattcaaaaagaaagacgtacggttggattcgatacgtatgacataacaattaaacaacttattgatatggtcggtgaaaaaaacatcaatgtttccccagactatcaacgccgctttgtctgggatgcaacaaggcaatcacaattaattgaatcaatcttccttgggatccccattcctaatatttttatggcaacaaatccagatgcatcttgggaagtaattgatggattgcaacgtataacaactgtcctccgctttgcctcgcataaccttgcggtcattgatgacaaaatgttaggaccactaaaattaaaaggattagaaaaggtttcttctttaaatggcgtcttgtttgaagaaatgccaaacaaccttaaacttaattttttaaccagacccctcagagttaccgtcctaaatgatcaaagcgattatcaagttcgcttcgatttatttgaaagactgaacactggaggtataatacttcatgatcaagagattaggaattgtgtattccgagggcgatttgccgagtttatcaaagaatgcgttaaaaaccctgacttcgacaatgtaattaaaagaagtgataaaaatgggcgtggaaatgtggaagagttagctcttaaattttttgcttattatgaatgtcggacactattcaaacattcagttaaaggttttctgaatgactacatggagaaaaaaacaaaatcatttaataacgaaagagaattaagtgatatattcacgcaaactttctcagagataaacagagtattacctaatggtatagtgcgtgcaaatcgtctgaactcaacacccttagtattatttgaggcaatttccgttggcgtagctgacatccttaaggcaggaaatcaaatcaatgctagaaaacttaatgaattattagaagatgaagcactgaaggaattaaccactggcgctacaaatagtcttccaaaactaactggaagaatagattttgtttcacagcgggcaatatga

SEQ ID NO: 170215 - DNA, 777 bp, Enterobacter cloacae
gtgaatcaggacgctagggaaaacatcggcttgatagcaaataattatttcaaatcaaccattgcgttgtttgaaacaatcacattttttaattattcgattgccagtgtgtacgttgacaaaaatgaaaaaatggttgaatcattcaataaacttgaggaaataatcctagagcaaaaaaaagaagaaaaagcaggttctggagcaaatcaaattttaactcacatgccttcattatgtttcagctctttggtatcagcctttgaaaattaccttatcgagatgctggctcttgcattaaaaacgcacccgcacaaaatagccaaagaatctgtcgatcttaaaaaggtaattgaactttcacgtgaagaaataattctattcaaagcaaatgaatacattaaccaaataatgtacaaaaccccaaaggattatttaaaatctttatcaaacatcttatcacttagtgaagaaagcatttctcaagcatttaatatgtatatagaaataaaagccagacgagatcttggtgttcataacaactggcgaaaaaacgaaatttacgaacgaaaaatagctgaagcaaaaatctcaccacccaccaacaacacattatccccaaacctcgaatattacaaatatgcattcactgtatgtagttttttagtacaaaaaatatcaaatcaaacctgcgaaaaattatttaaagtgcacccgatatttgacgaaaagagatttaattcagatattaataacctaaccattccaaaagattag

SEQ ID NO: 170216 - DNA, 528 bp, Enterobacter cloacae
gtggcggcagcagataaatacagcgttgattttgtggtgaacaattatctggccgcggggctgaagccacagcagatgaaccttgggattggtttctatgggcgcgtgccaaaacgcgctgtagaaccgggcattgactggagcaagcccgatgcgcaaaacaatccggtgacacagccttacttcggcccacaggagatcgggttgttccgatcactcggttatgacctgaccaaagatacctacgtgaagtacaacgatatcgtgaagaaactgctaaacgacccgcaaaagcgctttactgaacactgggacgaccaggcgaaagtgccgtggctttccgtgaagggcgccgatgggaaggatctgtttgccctctcgtatgagaatccacgttccgtcgccatcaaagcggactatatcaaagagaaaggtctggcaggcgcaatgttctgggagtatggggcggatgataataaccagttagcgaagcagctggcggagtcgctcgggatctcgcacaagtag

SEQ ID NO: 170217 - DNA, 657 bp, Enterobacter cloacae
atggctcctttgatcgaaataaatgcatttttaaatagcattccacagtggctatcatcgtttataacagctttaattggcgcgcttataggaggttggtttacactcagaggtgttgaccgcgaggcgaaaattactcgcgcagaggctgaaaagaacgatcttgaattacaactatctgtattaaaagggattaagggagagatttttaccttggttagtttgtataataaaagaatgcaatatcatattgataacattgggccgggaaaaacactgctcatcaatttccctgttggtgatgataattttactttttatgagcaaaatgcaaaaatcattgctaaactaaatgactctgcaagagattctataattaatatttacacgtatgctcgttcattaatacagtcttttaaaggaaacaaccagcttgtcgtagattacgaaaagattctttttgacatggcagataataataaaaacaaagacatgtatgaaagattgcacgctgcaaaggttgatacaatggtggattatgcgcaaggaataaaaaatattgacgcagagcttagacatgctattaatgaaggatttaatgttattaatgaagaaacagtagcactacaagaaaaattaaaaaatttagaaccataa

SEQ ID NO: 170218 - DNA, 600 bp, Enterobacter cloacae
atgtaccaggttttgctgggaaaaatctcctcgctgagcacagaccagtgggcgcaagccctctcccaatacgctccgcagggtgctcaacgcgcccgttggctggcgggtcgagggctactgtcgcgtgtgctggcaccacagcctttaccggagattgtctaccgtgaacagggcaaacccgtgtttgccgacgagtatcctctgtggttcagcgtgagtcactcggaagatgatattgcgttaattatcagcgatgaaggtgacgtaggctgttcgctggagcatatccgtccgcaggaaaactggcctacgctcgccaatgccgtatttagcaatgccgagcatgacgcgctggaaaaggaaacatccgaaaacaaactcagcacattctggcgtatctggaccctaaaaaaggccatccttaaacaacgcggtggtcattcctggcaaatggtcagcattgacagcagtgccgcgctgcactcaacgagccagtgccggacaggtttgctgagcctcgccgtttgcaccaccacgccctttgagattacggcgtctctgatccattctgtacacgctgagctggccgaaaaataa

SEQ ID NO: 170219 - DNA, 207 bp, Enterobacter cloacae
atgaatcacggataccatttcgatagccatcagcaaaggctgcctgagggcttttatggcgaaccgttcccgcttggctatcaggaagggctgttaagtcaacccaaggttggcctgtgcgggctaaaccagcacggtaaccctggtcgtaagcgcagccgcaacatttgtgtctaccttcaccaccttgatcgtgaggtaagctga

SEQ ID NO: 170220 - DNA, 159 bp, Enterobacter cloacae
atgattattttctctatgttcagcattattcagtggcggatcaaagtcaatctcaatattataagctggagcattgcccgtgtttgcaacatttatatcaaaataaaaggcggcccaggtatttggttcaagggtgacaacgatatgcggttgagatga

SEQ ID NO: 170221 - DNA, 1251 bp, Enterobacter cloacae
atggctcttactgatatcaaagtcagaacagttaagcctgcagacaaacctttcaaacttaccgatggtgaggggatgcacctgttggttaaccccaatggctcaaaatactggcgtcttcaatatcgttttagtggcaaacagaagatgctggcgttaggggtttatccaatggtttcattggcagaggctcgtaagaggcgcgatgccgcgaagaaactggtatctgatggtatcgatccctctcaaaagaaaaaagaggacaagattgaagaaagcggagcactaacctttgaggctgtagcaagagattggcatgcatcctgtagcaaaaaatggtcggagtcccatagtgagcgggtgcttaaaagcttagtggataatcttttctctgcgttaggtaaacgtaagatttcggaactgaaaactcgggatctactcgctccaataaaggtagtagaggcgagtgggcggtatgaagtagcttcgcgtctccaacaacgaacgactgcaatcctgcgttttgcggtacagaatggtctacttgaatataatccagctcaagacatggctggcgcaatcgctgtagctaaacgtgtgcatcgcccagctctggatttcgaacgcttctccgaattgctcgatcgtatcgaatgctttaaaggtcgaaagttgactaaattggcagtgaaactaacactgctggtattcatacgttcaagtgaactgcgttttgcaagatgggaagaaatcgattttaaaaatgcgctttggacgatacctgcagaacgagaacctatgaagggcgtaaagcactcacatcgtggttctaagatgcgtagccctcacctcgtgcctctaagccgtcaggcactggaagtgttaaaagatataaatcaaatcagtggggattacgaattggtcttcataggcgatcaccagccggataggccgatgagtgagaacactgttaacaaggccttgcgctcaatgggctacgacactaaaacggaagtttgtggacatggtttccgctctatggcctgcagtgccttgatcgagtccggtttatggtcaaaagatgctgttgaacgtcagatgagccatcaggagcgtaataacgttcgcgctgcttacatccatcttgctgaacatctcgatgagcggaggctaatgcttcagtggtgggctgactatctcgatgccaatcgagaaagagcggtcaggccgtttgagtttgctcataactga

SEQ ID NO: 170222 - DNA, 312 bp, Enterobacter cloacae
gtgaaagccagcgtgggccagtacctggcgggcgataagggcggcacgctggatatctccaaacacttcgacagcggagtggtggtcggtggttacgccaccatcaccaacgtctcgccggacgaatacggggaaggggacttcaccaaaggggtgtatgtgtcgattccgctggatctgttctcatccggtccaacccgcagccgtgcggccattggctggacgccgctgacgcgcgacgggggccagcagctgggtcgtaagttccagctgtatgacatgaccagcgataagaacattaacttccgctga

SEQ ID NO: 170223 - DNA, 363 bp, Enterobacter cloacae
atgggacgttcagtaccggtgaagattggtcagaaggaatatgaaaccaaaactgcagctatcagctactacatgaatcaacgtacagatgtgaaggctgcaggtatcatttcagatggtgactattttgaagagctgaaagaactgttcaccctctattgtgacagttgtccgggctgggaactgaacggtcgcctgattgttcatttttcggttcagaatgaaccccgctgtatcaatggcaactgggtgtcccacccctgctataaggtcaaactgagtaacggtgagctgagaccgttttcgattgaaaaggcgataaacgccatcgtaaaagctgctgcagctaatcaaaagaaatag

SEQ ID NO: 170224 - DNA, 477 bp, Enterobacter cloacae
atgattttactagtacctctgacgacatcaggtactgaattacgcatcacctcgggcttctctcccgggaagagtgcgattaataacatcctgaccgccattgacagcgctcatcagactatagacgtcgctgcctacagttttacgagtaaagaaatcgcattagcgcttgagcgggcccgggagcgaggcgtcagggtacgcgtcatggctgatgccaaagataatggagggcgatactctgccgtgacctggttacagcacaaagggattccggtaaaactaaacggccagtacgccatacagcataataaattcatggtggtcgatggtatcactactcagacaggttcattcaactacacctcaagtgccgtaaagcgaaacgcagagaacacgatcgtaatctggaatgagccatcgacagctcgcgcttatcagcgggagttcgaacgactctgggaagaatccaattag

SEQ ID NO: 170225 - DNA, 969 bp, Enterobacter cloacae
atgcgggttgaagtgatggagcattacgggctgacacggcccgtcgatcaggccggatattatgaaacggcgcaccataaacagctgctgaaggacataaaaggggcaatacatgaagggcgactggtcgctgtctgcggtgtggtcgggagcggtaaaaccgtgacactgcgacgtttgcagcaacagctgacggatgaaaataaaatcgttgttgcccgctcactctcggtggaaaagcataatatccggcttgccacgctgatcagcgccctgttttacgatctggccccggacagacaggtgcagatcccaaaacagggggaacgacgcgagcgtgaactccaggagctggtcaaaaagggaaaacgtccggtagcgctgttcgtggatgaggctcacgacctgaacggaaataccctgaccggcctcaagcggctgatggaggtagtggaggatggaggaggccggctgtctgttgtgctggccggtcatccgaagctgcgcaatgacctgcgacgtcccacgatggaagaaattggctaccggactgatatttttaccctggacgggattgccggcagccagcgtgagtatatccactggctgctgaagaccagtaccggtaagggaaagcccgaagatatcctgaccagcgatgccattgacctgctggccgcgaagctccgcaccccgcttcaggtacaacagcatctggcgctggcactggagggcggttatctggcgggtgaaaagccggttactgctgcgctggttgagtccgtgctttcccgacagcttgacgacctggagccaaccctgacgcgacacggctaccgtctgaaggatatggtggagcagtttgacgcaaaaccgtctgaaatcagggcattattcagtaatcagttagatccggccagaacggcagaactgcgtgacaggatgttggcagtgggtctgccaatataa

SEQ ID NO: 170226 - DNA, 1662 bp, Enterobacter cloacae
atgagcagccggtgtaaatccatcccgtcagactccctgttgcagctgcggcagcgtcttgatcgcctgccgccaaaaagccctgaacgggccgttcagatcgccactgtcgctcagctgtatggcgtttctgccaccacggtttaccgctccctccaccggacactccgcccccgcacggctcaccggcgggatcatggtcgcccgcgggtgatgtcccgcccggacttggaatattactgcgagctgatcgccgcgctgaagctgcgtaccaccaacaaagccgggcgtcatctgtcgaccgggcgtgcgatccagctgcttgaggagtatggcgtggaaacgctgcagggtctggtcagggcgcctgccggcgtgctgagtgtgcccacggttaaccgctggctctccctgtatcgtctggatcaaccccgtctgctgcgggagcctccggctacccggtttcaggcggaatacagcaatgactgctggcagtttgatatgtcgccttccgacctgaaacatatcgaccgtcctgagtgggtcgaccctgcccggggcgagcccaccctgatgctgttcagcgtggtggatgaccgcagcggtgtggcctggcaggaataccgctgcgtgtacggcgaagatgccgaatccgccctgcggtttctgttcaatgccatgtcagcaaagaccagccctgactgtccgttccgcggacggccccgcatgctgtacctcgataatggtccggtggccaaaagccgcgtctttcgcaatgtgatgcagtctctgcaaatcgactggcagacgcatatcccggcgggtaaggatggtacccggacaacggcccgagccaaaggaaaggttgaacgaccttttcgtaccgtcaaggaagcccacgagaccctgtatcactttcacaaaccggaaacggagcagcaggctaacgactggctgtggaattacctgtcgcgctataacgcccagcgccaccgcagcgaaaaacattcccggcaggaagactggctgacacacctgccggaagacggactgcgggacatgtgtacctgggagcagtactgccgttttgcccgtgagccggaatcacgccgcgtgggtgtggatgcgcgggtgacgattgatggcacggtctgggaggtggagccggatatggccggagaaaccgtgaccctgctgtggggtctgtttgacaacgaaatttttgccgaatttgccggtgaaacatgggggccctactatccggtttccggcccggttccgctgcaccgctaccgggcgttccgccagggcaaggcggcagagcgtgctgaccgtatccacgccctggccgcacaactgggcctgcccgtcagtgccctcaccgggagtgatatccggctggtcagcgagaccacggagactcagcatgagctgcctcataagccttttatctccccggagtctgaataccggtaccccacggtgatagcggcaaaactggccatcgccggtgacctggcaattcctctggccagaatgtcaggcgaagagcggtcgtttatcgacagccttctggcggaaaccctcatccgcagtgaagtactcgcccgcgtaagggcgcatttccgtaacagacaatcaggagaagatcatgcgggttga

SEQ ID NO: 170227 - DNA, 1041 bp, Enterobacter cloacae
atgtcggaaaaagaaattacggttaaacgggaaatcaataagtttgaactgacgcttttatccccacaaccagccctgtttgtcaacggcagacaacaggtgctattgcgtattctggccaccatgaaggaaggcagtgtggaagtaccgctcaccgaaacggaaattgcaaatctccgcattgtgctggatacctacagctatcgggccggacaggatgatgatgcctctgcggaagttgttccccgcgaggcatttaaaacgctgggtttttatggtgaatgggagtcatcagtaaacgataaaggttatgcagaatatcctgccggggtctggggggaaaatgatacgtcctttgcctctctgccccgtcggcaggaaactaaagcaggcgagtattattttctgttgtcctgcaaaacagcgggacgggtacgctcggtgccgttctgtgcactgctgaaagccgatgacggcgcacgctactgcacgaataaaaagaaatgggatgctgacggaaaagagagtgcctataacagcgattacagagttaatctggagactgttgacctgccggtactgacatcagagcatattacagcacgtcctgaatcagagcctccggaacacggttattacaatatcgtacaccccctgcagatagtgtatacactgggtggttctccggtgcgtcagaaaaacatgacagtggaacccgccggcatgattcagtggccgcaccctgatgcgggagaaaatcaggccagttttactggttatgcctccccgggtgcaacaaagtatacctttcatactggtaacccggtgggcgcacagccacttcccgtccctttgcttcgccctgaacagggggtacttgttctctgcggccgtaatgatgttccctatcagaccaacaccgaaaacggcccctgtctggttacgctcatggatatttatggaaacgaacaccgtgtgtcagttgaattttctggtccggttaacgacggacggcatagcctgaaactgaccgtacagtaa

SEQ ID NO: 170228 - DNA, 1113 bp, Enterobacter cloacae
atgttgaagaatgaaccgatggcttccatcgcttatctggatatttttaaggtttattattctgtcgccggagggaatcacacacataagctatttaataaccgtaaacaacgcatcgaactgcgggtggagatcctggccaggaacagcgctgatcagcaggttacattgacggatgaacaactgttgtccattcgcctggctgaggtggattcccttggtaacaagaaccgtgatattgaccatgatattcaccaggacgaccttgatggctggagcacatattctgacacactgggctacaactatgatgagtccgcgttttccctggcggccgctgaaacgacagaggttcctttccccgataggaaagggcctgacgggagtcccgttcaggccaatttcgaacagcgcccccccgtgacagttgtgcacgagaatacgccccagggtgctcagcaaatatctatctgggtggctacatcaaaaacgctggatatccggctggcagcaacgttcgggaactttctttccagcacttccacggataagagctttgtcattcttgagcccaaaacgttcaaccgtaatgcggtgaatatttcaaccgaagagacgccttacccccattattcagatacggaaaggcaatggaatcaatatatcgtcgctaaatacggttcactgcagacaccgcttgccatttggtaccagtggatggagagcggtatctggtgggatcggggtgacgaaggttctccgggtgatgactggttcaccgagttcaccttcagtatcggtcttaataagggcgaggatttattacgggacaagattaacgaagctcgcgccgaagggaaacttccctggagaactgaacacttcgatatttatatttttgcgccagagaaagtccatctcccaaaggaaaactcctgtgtagtggtaacagtgctgggtacgaaaaatcagcatttttattggggggacggcagacgaaccgatgataaatacagctccggtggtgacgtgacggatgaatatggcaatacctacagggttacgtacaaatatgcctccaatggccgtgattttcaaattgttaaacactga

SEQ ID NO: 170229 - DNA, 5415 bp, Enterobacter cloacae
atgatgtgttcatcaacccgttcttcccccgccatcctgaacgaaggcgcgttccactcgaatgcccataattacctcagtttcctcagcaccggtgccgacccccgcaccggcagtttcagaacagccctcgctctcccgctcggtccttccggggacctgggtggcccggaattcagcctgtcggtggccttcaaccctctgctgacgcaggaccagggtttcggctacggctggtcaccggccctgacccgctgggatgaggacaataaacacctgatgctggcctccggggagagttattacggggagtggtctgatgatgatgatgaccttatcgtctttcctgacatgaagctgccggtccttggtctgcgcgaaggtaatgacggctggctgctgctgtaccgcgacggtcgcagcgaactgctggaccgggaaggtttttatcatgtcacccgtacgctgttttcacaggagggacgggccgtccattttgtctgggacaccatcaataatgtccctgccctgcagtacatccatgaaacaaccccggaaggtgaacgcgtgctgcttcgcgtggactattttaccaccggtacaacctttaccctgcagccggaagcccccgatgcggtgcgcctcactctggcccgggaaagcggcagcgtctctgatgaggtgcgccatctgctgctggaaatacagacggctgacggcaactggcaggaggaagcccgctggacgctcgcttaccatctcagccacgatggcctgctgctgaccaacagcgtgaccttacccaccggcggcaccgaaacggtgatatatcacgaccgggaagaagatgaccaggcgctgcgtctgcccgatggtgcgccgtttcgcgtcatgccggctgtggtggaggtggtccgcactcccggccacggtcagccggcccagactttccggtacgcctacaacaatatcggtggtgatggctatgccaactgctacggcttcggccgggtgggcagctggaacgaaaaagaagacaacctgctcagacttccccccccacagaatgaagaggatgcctaccattacggctcggtggaaacggcggtggacgaaaaggggggcacgctgtccgtcaccacccgccggtttaaccgctatcacctgcaggtccgggaatgtacggacaccccacagcagcacccggcctggccggatgccgtcgggtgtcgccgggaaaccctgacccgctatcatgacgacctgtctctgtggtgggaggagcagccagcctactgccttctgccaaagactgaaaccacccgcgtggcgtggctgaatggcgccggggaggaaatcgcctgccgtgaaacacgcacggcctcctggtacgatgaggaaggcaatccgctgcgcgaatggcagcaggtcttcctgccggtgtatgactcggagggcgcgttgctgccaccggtacagtggaaagaagcctggcagctgaccgaacgggaatactacccggccaccggcgagcttgcagaagacgataccgtactgtgtcctccggacccgatgggtatggtccgtcatctgaaacaggaaacgacctggccggcaggccggaaacaacctgacgacagtggtatgccgggggatgtgccaccggaagagagtacaaaggatgacggtgccccggtgctgcgcacccgttaccggtataccctgttgccggcgctgccggactgcccgtcggcgggttccgtgtacgcctgccgggaaaccctgtatgaggtgcagcaggccgggacggcgcaggagacggaaaccgaaatcagccgcgaggaggaagtccgggtcagtgccctgaacgccgaccgtaccgtgcggacgccggaacagctgcgccatcacggccggccgaagactgaaagcaccatcaccggagaaaaaaccaccaccaccacccacgactggtcatttacagacgagggtggtggcgtgctggatgcgcgggggaacagccatcctgctctgctggacaccatcacggtggccggccatgacggtgcgcattttacccacaaagcggcccgcagtctgcggacaggcgagacggtggaggagacggatgccctcgggtgcgtcacccgccgggcttatgatgcgcttgggcgtctgttgcaggagaccacggcggccggtacggacaaagcggcccaggcgttctatacctggcgccgggatacggagaccgggggcatggtacgcgtcaccgcagatgcagtaaatcaggtgatggaggaatacctggacgggctgggccgtccatacatcagggccattactccaccggacggccggagcgatacacctttgatcgtctggcaggccagttatgatagtcaggaccgcattgccgaagaaatcagtatgcaccgcaacatgaacttgctgaaagaagggcgtgacgcgccggagtcaggtgatctgacgctcgccaccaccacacactatgacgggtgggggcaaccctgcgcggtcaccagcacggacggcgtgactgcctggacgctgcgcgacccggtggcgatgacagaggagacctggctggaaggcagggatggggaaggaaatacggctgagggccaccggacgcgaacgcaggcggagggccgtggtcagccgctggtcgtgtggcgtctggccactgcggagagcgtaccggaaacataccgtcggttcagctacgacagcgccggccgcatgctgtcagaaacggacggcgacggccatctgacgggctatgtgtatgacgccctggaccgcgtggtacgcaagaccctggcggacggcacaaccattctcacggcctacgaccccgccttcaccggcgctctggcgaccgccctgacggtggaatggacggatgcggaagggaagacgcattccactctggccggcacccggaagtatgatggcaccgggcgactggtgagcgagacctgtggcgggcggaccacccggatggaatatgatgagggatacacctccccgaccaggacctaccacccagacggacgggtcacatacggccactatgacccgttgatggacgaggcaccgctaagtcagtcagcggtggagggcgtgccggagcggaattggacctattacctggacactgggctgccggagaacgggagcagtccactgggcacattacactggaagcgccgccgggacggcctgctggagacggagaccgccacccacaccgacagtgcggccagtcacacggtgaagaaccggtggagtgacgggggatggctgaacgaacgtgatgaaaacggcatcatcacggtctgtgccgctgatgatgtgggccggctggtgtggaggaagacggccgaaacggtgacctgtctggcctacgactcactggggcgactaacgcaggagaacaccgtccggggggatcagacgtctaacaccagcatcatctttgaccgctatgggcgggaagaaagccggacgctcatcttgaccggcggtggtgagaccggcacgcagaccaccatcctgcactggactccgggtgacagcctggagaagaaagtggtgacgactgcggacgggacgagaaccgatacctatcattatgacagccggggtcgtctgatggaacaaatagtaaacgcagacaatgaggcgctgctgccggaagatgaacaccggagagcatacacgacgcagaaattcaccagtgacgcgctagataatctgctgtcggtgaggacagtgtacctgaatgcaccggagcagccgttcgtgcggacgtattattatgagtcagacttcgacccgttcaggctgacgcgggtcagcccgggttgggccggaccggaagactgggtgccggagtgggatgactacggacgcctgactgtcgatgaacagggcctgcctctgatgtacgggacggatggccgactggcatcggcgggtggagttacctacacgtacgatgcccttttccgggcgggccgtctggaaaaggcagggaaggtgatccgtcgctggtaccgggatgcccttctggtggcggaaagtgacgatactggagtgatgcacctgagccgcggggcgctgggtggtgtgacggaaacactggcggcgggtgcggtacgttatgtgctgctgtcgggcgcaaacgctcaggggtctgttgtagcagagagccgggcggacggcgtggcggaggtacgctatgatgcctggggccgggactccggagaacccggtcagggcaggacggggtatgcggggatggtgcgtgaggtggacggggggtacctgccggggagttaccggtggtacagcccgcgtctacggcggttcagcgcgccggatagcgcaagtccgttcggtgagggaggccttaacccgtacgcgtacgcggggaacaatccggtgttgcgtaatgatactgacggacacgcatggtggaactgggtaattgtcggggtaagtctggctattggggcggtggcaacagtggcatcgtttggcgcgctggcaccggcggtaacggggggcatagctgctatgactgcatcccaggcgctggctcttacaggggctgtgctgggggccgcgtcactgggtactcagatagcttctgaggttttgaacgcaacggggaacacgaaggcgggaggtatcctggggtgggtatccatgggcacgggaattgccagcatggcatcttctgtcgcttcttctgccatgagagtcggccaggctgtcggtcggctgcgttcaccacccccacttaccactcccggaggaaaaggtacagcaacagcgtttgtctggatgaaaggaggaagagtcggccatgcctcgctggcaattggtgaaccgagaggaataaatccgctagtgaatatgcaccttgcccggaatggaaatagttatcgtggatatctgagctttggacctgattcccctatgggaaaaggaacattgggccaatatatcaatcggactggaaaatttgcttcatatagtgatgatatgaacagctatatgcctcatggtaagggctattccctgggagtggcaacgttcgaaggtgtagatacagatgctatggcaaaatttctggatgcggcaaaagttgagggacgtccttttaatctggctcagagaaactgtgcggatatggtatcgaaggcgctgtccaagggatataacagcccacgcaatgtcattacagggctcccgggaaaaaaactggttcgcagacccttccagatacttgactttgctgataaacatgccagcagctttgaaatttttgaaccagatcaggcaagacgtgtctttaatgaaatgttttatggatttagctaa

SEQ ID NO: 170230 - DNA, 165 bp, Enterobacter cloacae
atgatcggcaagcagcatttcgaatttatcgccattatctctttcaaactggcggttcgtgtttgcgcctcaggcgcattaacgaccgccggcaggcaaagcctgccagggttttctcgcgggctgacaggcggctctcaccgccctactgttaagactgcctga

SEQ ID NO: 170231 - DNA, 483 bp, Enterobacter cloacae
atgggaaacaggtcaactttgcgggcggttcgggctatgggaaacaggtcaacgttgcggacggaccgggctatgggaaacaggtcaactttgcgggcggttcgggctatgggaaacaggtcaacgttgcggacggaccgggctatgggaaacaggtcaactttgcgggcggttcgggctatgggaaacaggtcaacgttgcggacggaccgggctatgggaaacaggtcaactttgcgggcggttcgggctatgggaaacaggtcaacgttgcggacggaccgggctatgggaaacaggtcaactttgcgggcggttcgggctatgggaaacagttcaactttgcgggcggtctgggctatgggaaacaagtcaactttgcgggcggtccggtctatgggaaacaggtcaactttgcaggctgtttgggttatgggaaacaagtcaacttcgcggactagccttgccgtgggatacagctaa

SEQ ID NO: 170232 - DNA, 642 bp, Enterobacter cloacae
atgaaagattttttggatagcctaagcaaatccgcctgggaaacatcatgcgcaagatacaatgcatcccgtaggttaaaggttagagagattttttcgactatcagtctcgctttaattggcctttccggtatcatactctcattaatccaatatttttggattacagatataaatcctaagctcaatatattaataactgcattttccattatcttaagcatgctattaataataattagccttattgaatggggagtcgcatcaggagctaaatctgaggctctctttagaaatgctgagttgcttaatgagcatgaaaggaagatttctttattcaaaaactgcttaaaagaagaaataacgaatgacgattacaaatgcatagataaccttcgcgatgagtatgaaaaaataaaatcaacatgtactttcaaccatagccctgttgactacgagtatcataaaatagtaaaaagtagatattatattgcccatacttctgaaagctttagtttttggcgagtgttaaaaggtagaattaactattacattagtagtatttggggatacttaattatctggtcaattgttgccatattcttcttcaaagttttaaaggtaatagcatccctatattga

SEQ ID NO: 170233 - DNA, 1128 bp, Enterobacter cloacae
atgttaggtaataaactcgaatttgaagggttgactggcgtcggtaaggtttatcttgacctggaacccgaacagtccgtttatacatttattggcgctaatggtgttggtaaaacaaaaacattagaagcgttattccaagttttattttttagtaatgattttgttagaagttcattagatatcttcgatcgagtgtttttcaaatgttatcggttaaaagataaagtttcaggtgatattatttttgacaggggagacgaggctgtactttcttgggtgaaggcaaaaaacagttttatatcattgtctcatgaacttcctgttgtatatttgggtgcgcaatccagaggcataatagagtctgaaatagtattatcagatcctataggaacaacggttgatcgaagaaaaaaatatattaaaaacttaacttcgcaaatggagtctaaatttggctctatgaatatggcttcaaatattcagcaatggtttgtgactctcgctaaatcttccaatccatatcaaaagaaagaggataatcgggaagtagaaattaaaacagttattcgtcttttacacgaaatcgataatcgtatcgatcctgaattccttgaaattggtggggatgaccgagttagtcttaaggtagaaggtgcaaaacgtgaattaagccagctgagttcaggtttttcatcgatcctgaagcttgtccaggcaattgtttctggttatggttattttactaatgaaacacagcttcagaatgtgaaaggcatcgttcttattgatgaaattgaaagccatcttcatcttacgtggcaggtaaatatcataccgctactgaaaaaattgtttcccaatacaactttttacatcacaacgcattcttctgtggtgctttctcaattgcgtgagggagaggcttatacactttatcgtgatcaggatggctcagttaaaacacataaaattccctcaccaaataaggctgcacttgcagatatattaaaagacgttttcaaagtcgatcttaatcagattaagcttgaaaatagcagtgtcgatgaacagaaggatgctaaaaagaatttattagatttaattaagaagcagggggataaatga

SEQ ID NO: 170234 - DNA, 465 bp, Enterobacter cloacae
atgatgacaaggaaatttttacttgatacaaatttacttatcgctgcttttgatgcaaatggaacgacatccgcagaagcaaagtctgctgctattgctttgctatctgaacttctttctgatcaacaagtgaagttgtttattacaccacttgtgcggtatgaagttttgcgtggaatcacttgggaaaaacaagatgattttcttaccatgcagcaaacattaaacagttttcctgaattggaaattacgagggatatatcggaactatcagctaacctctttcgatttgacaagcaaaaagcgctggatcttggcgagaaacgaaatgtagataagcgtcgctttgatgtctttcattattgtagtgcgacctgtaactgccttgagctatgctcggcagatacagatataggaaagataaataccttatattcagaatatcaaaaagcggtaactcaatga

SEQ ID NO: 170235 - DNA, 255 bp, Enterobacter cloacae
atgaccccaaacagatatgcgactctgcgcggcacaatcgccagagccaaacgccacgactgtcagaaagtcgtgatgcgtgtgacgttagctgaagaacttctagatcagctgacaaaagcagagcagcggatcgcggagctggaagcagtattggcatgtcatagatgcggaacaatttgcactcgtcctgaaggggctcattattgtcacgtcagcgacaacgccgcacgagcgacagtaacctcccagtga

SEQ ID NO: 170236 - DNA, 366 bp, Enterobacter cloacae
atgcgtaatatttcattggtgcttgaacgctggggagtatgggccgctaatgatagcagtggggttgattactcttcaattgctgctgggtttaaggggctgatatcctatggaaatcataataggctttcttgtacagatgatgatgcattgataattgaaggttgcttagctaggttaaataagaaaagaccttatgagtattcattattggtcgcgcattatctttatggcattcctaaaagaaaaattgccaaaagactaaaaaaagatgagaaaacgattaggatagagattatgatgggtgaaggttttatcgatggttgcttggcaatgcttgatgctcacctagatatggatgtctaa

SEQ ID NO: 170237 - DNA, 1335 bp, Enterobacter cloacae
atgcaggaaaatctttctttctcagatcgcgacgaatttcaacgtcaaataatcgccgaaaacatcatcaagctattgacgcctgaagctgatatctcccctttagtgatagatggtgattggggaacaggtaaaacagagtttagcatcaagttaaaaaacttaatctctgctcaagctcctgattctaaagtggtttatattgatgcttttaagggggatcacgcggaatcgccactattgctgataacttcagctattgctagcacactacctgatgaagagaaagaacccttcattaagaaagctcttccggcaataaggttcggactgaaaacagcattgaaggccagtgctggctgggttttacgtcaaggcgcagatgaattagctgatgaattccaagatgctatgaaaaaggcaagtaatgctgcaatagatggaactatagaaaatattctagaagatcatatggaggccgagaaaaacattaattctcttaaaacttgcattgaagggctatcttcaaaacaaaaaacagtcatcatcattgatgaattagatagatgtaagccaagtttttcaactgcaatacttgagacaataaaacacatatttgacactgaaaacgtttatttcgtacttgtaacaaataccatacaattaagagcctcaatcaatcacatttacggttatagtattgactcacagaaatatctcgataaatttataaaatacacaataactcttcctgatacatttataaaaaatggtcacgaggagcataaaacatctgtagaatactggctacaacttgcaaaagaaaatcctaacctctctctcatcaataaagcagctggaagagaaatttgtgaattgatatctgacacaaatctatcgctccgtgaaactcaaacatatgctcgaagcttaaatatcttccagattattaacgaccaaaaattcaaagacaacacatactatatttataaattaatcttcctagggtctgtttacattcattgctttggagataaaacattacttaaaggaaatcttagctctgaggatatagaaaaactagccaagacctttaatatcagcaagataccatatgatttcgaaagaagctcagatatttcaagagccacgattttattctatggcataataaaagaatacttgcaagtaaacaaaaaatttgctccacctaacgaagaactggctaaaaagtttgcagatctttatacaagatttgaagatgccgacttctggaatactacagtgaaagaacaagtcacaaaattccttaatcaaatgtctttcattaagtaa

SEQ ID NO: 170238 - DNA, 516 bp, Enterobacter cloacae
atgaaaattaatccgggtcttatcggcgttgtcgtaatagctggcctttcggtcgctctcgttaagagttgctccgacgccagtagccttcagagcgataacgacgttctgcgaagtgacaacacattgcaggggacggttatcgctgttcaggctttcaatttcagccggtttaaccaggtagccgaaacagcaagcaggaacaattctctgattgatgcgggctccgaagtaaccgttgttaaataccgggagattctccgccgtgaaaaaacctgtgatctgcctgttcctgctgacattgctggtgggttgctcgaatacgcgcaccgtttacgtgccagcgcaatgcccaccgattccgggaacgttgacgcagccagtgatagcgccgttaccacccgctcaataacgtattgtcaggctattctatggattagcccgcttctggcagcaattgagaaggcaaatagtcagttggcgggtatccgggacatagaaaatagcagattatag

SEQ ID NO: 170239 - DNA, 489 bp, Enterobacter cloacae
atggatagtatcattaatttagaaagagtcatttgggttattctgtgtgtcggtgtgatgtttgtagtcccaaggttagtggctgcgagaataacttcatcggttcaacatgagtacaatgaacttcttgagtcaattaagttatctcatcagcggcagttagagaacgaaaaaaacttaagagaaatcagacttaagtcagctctgattgctgagttgcttgccttatggattagccatcctgatgacagagttagattaagacagctaacctatgaagcttttctgtggttacctcctgagttggctagtgagctttcagatattctttcgaaaacacctggtgcaccagatgtgagggtatatttaattaaagtaagaaaactgttgttaggtaatgctgatacattggaagcgaagaaagtgatacactttgagctaagtcagcacgagcagattcagaaaaagttaaataatccattcggttag

SEQ ID NO: 170240 - DNA, 1035 bp, Enterobacter cloacae
atggatgatgcaattcagacttttgaaatcaatggcattgatgatctagaagcaattttttcccgggtcatttctggcgaagacattcacatagaaaatttgaagttaaacttcttagaaagcattgatttcaaattctttggtgatgaagagaagtataatggtactctgccggcaagcctagcgcagggtatctgtgaatttcagacagaaatgtacaaggtttttactttaatcaagtacaaaacctcaaacttacagaagctgactgctgaggatcgagaagctgcggaactggttttcactatcaaacctggctgcacagaaattatcacctcgattaaagagctgattgattcctttggtaacgcatttgggaaggtgacacaaggtatgagcccaagacagaaaacaacgtgtttcctgtttgcagtcgtggttttaggcggcgcatgggtcagtacgtcatatctcgaccatcagacgcaagtagaaaccaaaactattgagttgcagcaggaagaagcaaagcagcgagcggagtctgaacgtatgaccattcttagggatgggatgttgtctgcaattaaagaacacgaaggtgttgataccattgagcgagctgaaggtattcaagagcacactgcaaaagcctatactggtgttctaaaaggtgcctccgatgcagacaaagtgacaatccgtggggccagcaagattgagctttcacaaagccaagttcaagaaattataaagaacccgattgaaaaggctaaatcagagcagcaaacgctggaagttgtcattgacagcataaaacgttcagccgataagctgactttaagttgccatgaaccgacgggtgatgattcattcccaatctatgtagatacaagttttatcaatgatcctgatgaaattggcctcatttttgacgctatgaaaaataataaaactgtgaagatccttggtagttacaagattaggtctggggtgatagaacaaggtaacgcctccacaatctcaaacccttga

SEQ ID NO: 170241 - DNA, 759 bp, Enterobacter cloacae
atgctcactgaaaaacaactttttgaacttattaaagcattacagtcttcaaatttttcaacaacagagattttggggctaagctttgccattattattgctgctctcataatgagttttattgtttctctaattacagaaaaagcaaagatttccgctactaacgctaactatgaaatacttagaaaacagttagcattaaatacaacaacaatcaaagacatagaaaaaaagatcacttctgagttatgggtttcacaacagatatggcaaaaaaaatacgatatgtatgagtacatttatgctcagttgcttagtataaagaaatgggctgataatgaatttgaaattatagagattcacatgatgccaacatatatagccagtggttatcaaggatatttcactaaagaacaagagaagcagttttgggaggaggttcagcaggctcacgatgaccgcgacaaagctctaaatgatgaagagttgaaattaaaaaacaaagaattacaacataaacttagtctcgccttcacagctttaactgaaatgatgataactaaagcaatccttcttaataaagatgtaactgttattttaaatgaattgattgataacataggggccaacccttccccactggaatatgaggagccagatgattatggatacagaataaagggtgcgattgataaagccttagaaaaaattagatttaatgcactagctgatttagaaattaagattcaagagcaataa

SEQ ID NO: 170242 - DNA, 315 bp, Enterobacter cloacae
atgacttcagcgatatctgacagaacaatgaaaaacattggcgatgacctcgatctggaagcggcgttgttaaatatctgccggatggaattcaaacacttcacttttaaggacgatgaaacgcagaccccacgacgcggggtaatatcacagcagattgaaacgattgatcccgaatacgtgaaagaaataggcggcatactgcatcttgatcagacccctatgttgctcgatgcgctagcagcaatcaaagcgctggcaatccgcgtcagggttttggaagaacaggctgccactaaggtttcagctcagtaa

SEQ ID NO: 170243 - DNA, 687 bp, Enterobacter cloacae
atggggaaaggagactttacattttacgcagggagatacatttttatcggcgatagctttgaatttcgtaatccaattacctgccagaacagcataagcgcatcagctaaaatcgcgaccagtgctgatatggaatgcaaaactaaaattgctgttttggccccagctgacaatcagaatgcccacgtatggttctatggcacaggtggggcatccaggggggttatttattccgggcagacaggaatcattcagatccgtcctgacaacaatgataatggaggctccaacggatactcttttgcgtttggggctgatggtaagttcacctgcgtcacgatgaatcagacttcggatgaacgagttaaattcgacaaagaacccgtcagtaacgctctggaaaagatttgttccctgacggggtatacgtttggcattcaactgactgaatcggaatcaatacgcagcgcaggtattatcgcccaggaactggagcgtgttcttcctgtcgcggtaagttcaggcggtaccggcacaacgcagaatggagaagagattaacgatctcaaaaccgtggactacagtgcgatgagcgccctgtatgttgaggccatgaaggagctggccaaccgggtagaaagcattaagagtgagcttgctgaactcaaagcccaatccgcgatatag

SEQ ID NO: 170244 - DNA, 651 bp, Enterobacter cloacae
atgaactcgatctcttgggtgattttcatggggctgctgataaacataccatcactgattccgatgctgtttctaaataagatatcaaaggaggtgaaggtatcgctggtattcagactatctctgcttaacgctttcttggtgctgtcccttgtgacgctatcgcagaacaccacgcaaaaatacgggctgtttcctgtatggctggtcattgttgctattgggctgtttttggtcacactgcttccaacggtgaaattcattcgtaagcatttaaccgtaggtaaaagcagggctgttatcctctcatcattcctgattgtctatgccgtgaggtttcatggcgtgttttcagatgtgaacggaagtggatatacgattaatggctataacacagtatggacattcttcttcttgtttgcctgcctgttggcttatatcggttgttctaagaatgggagaaactatgggacatatatccccacagccacttcacagcccaatggttataaagcctatgctccccaatcagagattaatgccgatattgctgtgaaaggatcaagtgtgttatttgatccaaatctggatattgtggaacaacagcgttatcgtgatgcgcttgaaaagcgaaataatgatagctggtaa

SEQ ID NO: 170245 - DNA, 987 bp, Enterobacter cloacae
atgaaaatttatgaccaattatcacaagaacaactccttttacttgaagggaaacgttgcagaggtgtaatttttcgggttaaaaatagttacggctattgcgagtttttaattcattgggggcagggtaaatataataataaacggtggttgggtagattgtatcgaattcaatttgcaagttgggaatatgtaacccaaaggacaggaatacccgctagtcgacagcgtattgcggttgtcggtgttggagctgttggttcaagaattgcagaaatggcattgctttctggtgctagtgatatatatcttgttgatgatgacaagttttctgcggataatatggggcgacatttacttggactgagttccgttggtaaatataaagttgacgaactaagtatccatttcaagagtcgaattccgggtgtaaacatacatcctttcagggttcgtgctcagaagtatttttctcaagacaataatgactatgacattatttttttagcgactggaaattcaagtttagagaaggggattatacttcgtgctttcaaagaaaaatggaattcagtcttagtttcagttagtgttgaagcatatggagttggtgggcaaattataataatgcacactaatataaaagggtgcttatattgtctttacatcgataatgaaaccaatactcttatgcctaacctacagggaggattcattgagccgggacaaaaaataagcaagcaacttactggttgtggagcatttacccctttttctgcgctcaatgcaagtaaaactgcaatgctagcatatgagtatgctgtttccaaaaaatatggttatttacgttgggcgggcaataatgatattgctatgagtgaaggaataattcttacccctgcatattttagtatctataatgaaaacactccctcttttctccattctgaacaaatagctaagaaagggtgcccatgttgcggataa

SEQ ID NO: 170246 - DNA, 738 bp, Enterobacter cloacae
atgcaagtgggcgcatttgggcttggaactatcaacggagacggcccactgttggacgctatggacgcatttacaccgacctgtttctcctcccatcaaaatgacggacagacccagctcgggttaactgcaaataccggtattacgtctatagtcgtcaatcggggcagccgaccaacccgtattcatcaggcctacattctaaggcggacgtggttttcgtattacggtggcacgtcctggtcatatcaggaggcttacaccacgggcaataccacgagggccagcgatggcacactgaaagcagcatcgcctgtggtgaaagtattttcggatggtgcataccaaaccaatgatgaatccgaaggcataaaggtcatccgtctggacgtagggcagtatcttatcgaagggtgtgaagggttgaactctgacgcagcctggggcggaatcgatggcggttttgacattcctacagaccgtaacaagcagccgctgatctggctggattatgaggttaacgctgacggctcggtgctggtgaaaacctttcaccgcacgtatcctgacgcgccagcgttcgccaggaacgaactgctgggtatcaacaatggcgatccggtcgatatcccccatgaccagtttttgtccgtccgtgtcgagatgcctgccgattctttgtacaaccaaaaactcagggccacagaactggcaatgactacggatgaaggtgaataa

SEQ ID NO: 170247 - DNA, 252 bp, Enterobacter cloacae
atgattgatgaattccatgttatgtatatgtacaaaaaaattcaagctgaagcggctactaccgacatcaaaacactggaacaacttttgaagaagttccgtaaagttgttgctgagcgccgggaagaatactatcgggagatgggtgagaagaaggcgcataaactcaagatgaaaagattgcaaatgttgcttgaaaaaatggagaataatcatatttacccagaagacctcagtttcaaaaaaaagtga

SEQ ID NO: 170248 - DNA, 216 bp, Enterobacter cloacae
atgcagtttattttttactgtcgtaaaaaaatatccaacgatactttcaaattttgtatcgttttttatgactattgcttttatatcgcgaatgagcttatttgcagcgagacccggattcttattatatttgataaacgtcaccttatcatcatcgaagtcagcatcggaatcttcttttttatttttcctcgattcatcaaaggtatcgaataa

SEQ ID NO: 170249 - DNA, 186 bp, Enterobacter cloacae
atgcgtttttatatggactggagatgtctatgtaaaataataagtccagatgtgggtaaattaaatgggagatattttatctgtgatcttttcggtctacttaaaatagatgaactggataaacagaaaagaaattattatgcaattgtggatgagctgcttgtgtctgtgtcattattaaaataa

SEQ ID NO: 170250 - DNA, 381 bp, Enterobacter cloacae
atggcaggtcatagtaagtgggccaacaccaaacaccgcaaagcggcacaggatgccaagcgcggtaagatctttaccaaaatcattcgcgagctggtgacagcagcgcgtctgggcggcggcgatccggcgtctaacccacgtctgcgtgcggcagtagataaagcgctgtccaacaacatgacgcgtgacaccctgaaccgtgctatcgctcgtggcgtgggcggtgatgaagacacgaacatggaaaccatcatttatgaaggttacggtcctggcggcaccgcggtaatggttgaatgtctgtccgacaaccgtaaccgtaccgttgcagaagtgcgccatgcgttcaccaaaaccgggggggaacctggggactga

SEQ ID NO: 170251 - DNA, 1821 bp, Enterobacter cloacae
atgagaagcgttaaggtctatgaagaagcctggccattgcattccccgtttgtgatctcccgtggcagccgaagtgaagcctgcgtggtagtggtcgaaatagaagaagaaggggttaaaggggttggtgaatgcacgccgtatcctcgctacggagaaagccttgcctcggtgatggcgcaaattatgaccctggtacctgacctgcaaaccgggttgacgcgtgaggcgttacagcagcgtttacctgccggggcggcccgtaatgcaattgactgtgcgctgtggagtcttgaggcggcgaagcagcagatatccttaccatcgctggtcggcgtgacgcttccggagaaagtggtgaccgcgcaaacggtggtgattggcgagccggagcagatggctgccagcgcaaaagcgctctttgaggctggtgccacgctgcttaaggtgaaactcgacgatctcatcaaaaccgttcctgaagtggcatctgtgtttggcaagaccggtaaggcagagaccgcaacggaccccgcaccgcttgaaatggtggaaaccaccattcagctgaaacccgaggatcagtggcgacccgggatgacgattgacaagattattgacgaactcgataaaacagtccgtctgcccggtctggctaacctctgggttccgccgatccgtaaccgcatcgacatgctttctaccgggattaaaagcccaattggtatcaaggtgtcaggcaccgttctgtcggatatcgacgccacggcgcagagcattgaagcggtcgccaaaaccgtacccggcgtggtgtctgctctggcagagcggctggaaggcgggcgttacattgatgtggatattaatcgtgaaaaagcatcccgctacggtatgacggtaggggatgtgcagctgttcgtctcctccgccattggtggcgagacggtaggggaaacggttgagggcgtggcccggtacccgatcaatattcgttatcctcaggactaccggaacagcccgcaggcattgaaagagatgccgatcctgaccccgatgaagcagcaaatcacgctgggggatgtggcggacatacgtgtcgtttccggcccgacgatgcttaaaacggaaaatgcccgaccaaccagctggatctatattgatgcccgcggcagggatatggtgtcggtggtcaatgaccttaagttggccatcagccagaacgtgaagctgagaccgggaaccagcgtgtcattctccggtcagtttgaactgctggaacacgccaataagaaactgaagctgatggtgccgatgacggtaatgattattttcattctgctgtatctggcattccgccgcgttgatgaagccttgctgatcctgatgagtctgccgttcgctctggtcggtgggatctggttcctgtactggcagggctttcatatgtctgtcgccaccggcaccggatttattgcccttgccggggtggccgccgagtttggcgtggtgatgctgatgtatctgcgccatgccatcgaagcgaacccggccttatcccgacgggagacattcaccgcacaagcgttggatgaagccctgtaccatggcgcggttctgcgtgtccgacccaaggcaatgacggtggcggttattattgcgggtctgctgcccatactctggggaaccggaacggggtcagaagttatgagtcggatcgccgcgccgatgattggcgggatgatcaccgcgccgctgctgtcgctgtttatcattccggcggcgtataagcttatctggttgcgcaggtataaaaagcaataa

SEQ ID NO: 170252 - DNA, 372 bp, Enterobacter cloacae
atggtcaggcgcctgaaactgacgattggcgtgacgattggctatgacacgccgtggcgacaggttcatgccatgctggagatggcggcgagacggtcgaaatgtgttgacccttcgcagcagcccctggtgcgtcagctggggctgatggactggtacattgcctatgagctgcaggtaaaattgcagcccggacagtcacttgccgaagcccgcaatgagctccacagtaacattcaggacgttttcaacgagttcaacgtgcagattatgtcgccaaacttcgtgatgcagccggaagatgcagtcgtcgtcgcggaagaaaactggttcgcagcaccggcagagaaacccgcacaaaagccatcatga

SEQ ID NO: 170253 - DNA, 528 bp, Enterobacter cloacae; identical to SEQ ID NO: 170216

SEQ ID NO: 170254 - DNA, 195 bp, Enterobacter cloacae
atgcgtttatcgtaccatgcacggacgtttattgtcgaatgtccactctgggatcagatactgcatcgccattgcgtcatcgcgcgcacccagcccatgtttctggtacagctcatgggctttcatcacctgatccatatccagttccacgcccagacccggtgtggacgggacctgcaccatccccccctttga

SEQ ID NO: 170255 - DNA, 603 bp, Enterobacter cloacae
atgataaccgaaaaggacattgttttcataaaattaggtgttgacgagttcgaagaatgcataatgaatgctaaaagtatttgttttcatataagagacagagctgatttacacgaacgtgacttactggaaaggttcaacaatattttaatgggagaagtcgctgagaaaatggtaatcaagtggcttaataataatggtaagtttgccgtttccagtgttgataaatcatcaaaaaaaccagatcatggccatgacattttgctaaaaaagaaaggaggtaatgtttattgttcagtaaagtcttctctttcagccttgaaaaatattgactacattattgataactttaaattagcgactaaaaaaaacgagctgacagaagtaaatattcaagtatatttctggcttacaatcaacccaaaggaaactggggcaaccagagtaactgtgcctagcttaaaccaagctgctattattggatggtttggtcaaaatgacattaaaaacttcacaacctataatcgtgaacatcgggagtcaccaaatgttgcacttaaacaatcaagacctatggttactttattagagtatataatttaa

SEQ ID NO: 170256 - DNA, 1410 bp, Enterobacter cloacae
atggatgaacgagcacaagaaaagttatttaaaaaactcttctctccaaaatctttatttgatgtatatacagagagatttagtaagtccgcagcaaaaggcctcgatagaatcaatggcatgcaatattcaaatagagccagaaaggaattaaagaaagtctctgaaaaatgtcttaacggttcttttagatttactccttacttagagaagttgaaaagcaaagggagggggaaaaaacccagggttatttctataccaaccattagagatcgcgttgtattaaagcagcttaatgtttttctttgtgagatttttcctagttgtgtaccgaaaagcatagcttcgacttatattagaagtatatcagatgatttaaaaggcgtgattcctgaggatatttatgtttgtagttgtgatatcgaaggtttttatgacaacataaacaaacatcgacttgaaaaaatcttatcaaaaaacataagaagtaaaagggcgctagatctcatagttcattctcttttaacaccaacaacaagtgataatgttaataaaaaaatgaggaaggtgttttttgataatgaaaagggagtacctcaaggcttgtcaatatctaacattttagctgcgatttatctgcaaggtgtagataacgaaatgctaaaatttgatgtgacttactatagatatgttgatgatgtactaatgtatggtaattatgatgacgtaaactcagcttatcattcattaaggcgcaggcttaagtatagggggttaaacactcatccgccatcatcaccaaaaacacatttaggttttcttaatgagtcctttagttttttaggatatgtttttaaaggaaatgttataacagtgcgagattcgactgttgaatcatttatgaaatcaattgcatctaggttcagtgattatcttcacaataaaaacaaaaggttaaaaaagtatacacatttaacctctaatgatctaaaagacatttttctggaagagctaaatgataagttaacaggagctattagtgagaaaaaaagatacgggtgggtagcttattattcaaatattaacgatctttctcttcttcataaaatagattttataataagtgaaatgtttaagcgcttggatgattttgataattgtgcaccagaaggattgaaaaaggtagcgcgtgcttattatgaaatgaagtttagcccacatagaggttatataagagattatgaccagattaaaactattaaacaaaaaactgaattcttgcaccgacgtggaaggattgctgaaggcgagaggttaactaaagaacaggttgaagagcgttatgaaagatataaagctaaaaatttagctagcatgcatgcagatgaaggtgaagtgtatcccaagtaa

SEQ ID NO: 170257 - DNA, 1104 bp, Enterobacter cloacae
atggaaattctaacttctttcaaatgtgagcttgaaaagataaagctatttctaaatgaatctaaaattgaatacttcgatgcaccttttttaactggtacatctatggctaaaaaagatctgcaagatgtattcagcagattattcgatacctttgatgaatcgaggaaaaataaaaaagaagattccgatgctgacttcgatgatgataaggtgacgtttatcaaatataataagaatccgggtctcgctgcaaataagctcattcgcgatataaaagcaatagtcataaaaaacgatacaaaatttgaaagtatcgttggatatttttttacgacagtaaaaaataaactgcatgaagttctacaatatacaaaagatttagatgaggagcaaagtgaaaatattacaaagtttgttaaggtgatcaccgatgttgccttttttgtttactctatggataaaagagtaagaagcacttttttaataagtcagatctctattttgtgttacagaatcgcaattaatctatcgtatgaatataagacggacattctaaaaaaaatacaggatgagcttattttcataataaaaaatggtcatgaagcaagtccacaaggtattgaattaattaatttggttatagtttttggcagcttgggtgaaatccataacgaactgacatcacaagaaatttgctggtttttgtttgactgtgaactagctgcgattgaggatatgaattatttccatattatatcaatactgtattatattaaaaataatgacaaatacatggatttatataacaaatcaattcaaatcgcgataaataaattaacaaaatataagtgcagtatatattctgaatctgcacatttatttttagatctcatggcatgcccctatctaagtaaaggtttaaagaaaaaaatcatccaaacagtgtcaattaacgagtttgatatgaaaatgactgcctccgaactgggacgagaattaaagatactatcattatcggactggtttgttgattggagtagtgatggtgttagtattgagcgtttattacttaaaaaagagttgaaatcagcatacgagtaa

SEQ ID NO: 170258 - DNA, 234 bp, Enterobacter cloacae
atgacctccagcctgtcgcgcgtgaagtgggatgatttaaccgaagcggtaccggcgtttattaccgcggtaatgatgccgttcagtttctctattactgaaggtatcgcgctgggctttatctcttactgtgtgatgaagattggcaccggtcgtttccgcgacctcagcccgtgcgtcatcattgtggcgctgctgtttgtgctgaagattgtgtttatcgacgcgaaataa

SEQ ID NO: 170259 - DNA, 159 bp, Enterobacter cloacae
atgcgggtgctcgtgtctgaggcggtgaatgggaatgggattgttgggcggttgttctgggattttgcaggaaagcaaattgcgctgccggtggtgaaagggaactacccaaaggagggatatgtggagtggcatcgtagggaggtgtttagaggatga

SEQ ID NO: 170260 - DNA, 1002 bp, Enterobacter cloacae
atggctacggcacaaacacaatttgaaaattttcattcaaaaatactcatgggatacgatgataatgagtcactacgtgaccgtcgggatactttaattcaggaattaaaagataaattatcttcagatgtccctaatatgaagttctttcatcaaggcagttatgcgctacatacagggattaaccctctaaatggtaatccagatattgatattggtattatttttgaatgcgatcctaatgatgaagattatcaagacccattaaaattaaaaaaaattgtgcgagatgccctgaataccaaaaatagaacggtgaaaatcaaaagaccctgtgtaaccgttgaatatcttcgagatggtgagccgatttatcatattgatttagcattatatagttgcgagtatggggatagtgatgggcaaaccttccttgcaagaggaaaagaaacatcatctgcagaagaaattgaatggcaaatatcttctcctcgtgagttaacggatgttattttaaataaatatacagattcctcccataaaaaacagttcaggaggatagtacgttatttaaagcgttggaaagatgaaaagttaggacacaagaatacaccgagtataggattgactgtagcagcttatgagcttttttctgcaaattttgactttgtgagtggcaaagctcaagatttactggctcttctatcattggttaattctatgctaaataattggggaggagatgatcgtctacatatatatttaccagtagaaccttctacagacctttttgaacgtatgtccgataatcaaatgaaggatctcaagacaaaacttgagaaattgtctgctgtattgattgaagctcgagatcaacctgatactcatgaagcatgtaaattgctaaaagcacaatttggtgacgattttcctgtgccggataaaagtgaaactacgaagtcatcttcatccagtgttgttccagcagggcgttcagcttaa

SEQ ID NO: 170261 - DNA, 288 bp, Enterobacter cloacae
atgggattgttagtcaaatcagaccttcaatacgaagatgaatatagctggaccgcgatagatggtgataatccaaaaataacaggtattcccgatagcacactgttgaaccgtgaagaaggctatgaagtattagcattcatcaatcgttttgctaaaaaatattcacttaaacaaaaagacagtggtctgaaagttgagagcatgattcatgatcacttacccggtgatgttcgcagccatgctaatgttgaaaagtggcttgtagaaaactggaaaaaattttaa

SEQ ID NO: 170262 - DNA, 474 bp, Enterobacter cloacae
  misc_feature (349)..(358): n is a, c, g, or t
atgctttgctttctatttcaggagggtagggaaacgtacccactaaattacaaaattataaaaattggtagcgatacaaggactttgtatttaatgcacccctcaaatcaaaaagattttgttgcattctataaaaagtacagttcgctgatttgccatttaactttacgaagtaaatactcattaagagctccaaccgatgttgcaagttggtattacgagccgagcttaaaattaaaagaaaatggcttaaaggacgaggatgttgaaacctataataacgatgaagtacgtggtttcaaatatgctagttctttttttgtgtataaaaaatactctttcttatatnnnnnnnnnnattttatgattcatatgaatttcatcggctggagaagaagtataaaaaacttctcaagtttgatatatctaaatgttttgataatatttcgacccgtcgtttggctgaatgtgtaa

SEQ ID NO: 170263 - DNA, 216 bp, Enterobacter cloacae
atgaaaaatcttctcttaacaatacttgcaattggattattcattgttgcaattttcactaccgtgaatctattccagtccgcatggtatgttttcacgcttgagcagatgactaccctggcggctggctacctgtttgggaaattacttttcctgcttatcgttcttctggtgatttattatctactgaaatcattacgcaaatcaaagtcgtga

SEQ ID NO: 170264 - DNA, 1689 bp, Enterobacter cloacae
atgggcgcagacggaaaggccgcaccagaagatactggctattacctgtatgaagttattggggacaatacctaccagacaagcattcacaacagctttaaaaccgtctgttgccggcgggtgcgtgtcagggggatcacgctgaccgtgggagtattttttgacggtacaggaaataatcggtcgaactcaaacgatctgaagctggcttatacccactgcgccggtctggttggcgaggagcgagcccaggcatgcgcgaagtatgaagagcatgccagagcggaccttggtaacggcagctggcaggggggaatcacaaatatttctcggctctatgacctatacaaatctgacactgtccttgatgaagatcagatggaggcgcaggtcaaagcctatgtcagcggcatcgggacggcggatggagaaagcgattcgatgctgggtaaagcgctgggaagcagccttattcagcagtttgagggggtggtgacgaagactgatgtagctcttgaaaaaattgcttcagcactaaacgttttcatcgatcgtaatcgtgacaaagtggcgatcgccagggtgcagtttgacgtgttcggtttcagccgtggggcggcggcggcacggcactttgccaaccgtgtgatgaatcaggacgcggagatagcggctgcaattgataaagggttagacctgaccgggcactacggaaaagcagcgggagaggtgcgctttctggggctgtttgatacggtggcggccatcgggagcctgctgaacttctacgacatcaacgggcccagtaaccccggcgtcaaccttgagctgcgaccctccgtagcgcagaaggtgtttcagataagcgcgatacacgaatgccggtacaacttcagcctgaacagcatttcggggatgtggccggagctggcgctaccaggtgcgcactcggacatcggcgggggctacaacgcaggggaggatgagatatcccttctcacaatgccggactttgaagtgataagcgatagcgcggacgagatgcagacagaggtgtatcgtaaggcggagaagatgcgtcgggtcctgtattcgctgccggcgctgaaatacctgatgccgcacggtgaggtggaaacgaaaatgatctcttggccgctggttaaccgggacaaggcgcgtgcgtttatttttgagaaaaaagtcggcgcggcggtggttatgacgcgcagggcggtgccgaacgactgggaaaaggtatgcatgagggtaatgctggatgcggcgcaggacgccggggttatctttgcaccgatactcagcagtaacaaagagctgtcactaccgtcagaactgcttcctttgtgtgataaagctatagcgcagggccgcgcaattcggcgctgcgcggtacctgagagcttcacggcgcaggagatgcagactatcgggcgttatctgcattgttcagcgaactggaacatcgactcggacctgagcctgtgggtgagtccgtcttcaggagaggtttttctgcgaaaccactatgcaccaacggacgagcgctccttcgtgtggccgatggtaccgggaaaggggtgggtgcggacggtgtggcggatggatgaccagcagcagtgggaagacagggcgcgggcgaatgcagatgctctggacggacttttctga

SEQ ID NO: 170265 - DNA, 702 bp, Enterobacter cloacae
atgaaacgattatcggtgatagtggccgtgttgggtgtcattttacttaccggctgccatgatcgcagggaaggtatgaagtcattgttaggggatggcgtggaaaagtgggggaaaaggctaccttacgatagctggaattttagttttatataccctaaggagctgccggcactggtgacgatggtatacctggaagacggtgatatacgggaaaacattttccgccggttagatcctatggatatcagcgatctgagtgtcggtcgctggcatgatttgatggggggaaatggcggaaattttaatcgggtgaaagcgctgccagtaaggatgacggtgtgctgggagtcggttatcgacaagaaagcgtatgaaacggagatctggtttgggcaagagacatggcagcagatgctcactgcttatcctgatacctatcatcctggtaaatcttactaccgaaaccgaatggcagttggtctggcacccggcggagttgtacgggtctggcttgaggatcacgggaatccatccgtactccaggcccctgcccggcagttcaccctgatgggggatgatatgatgatatgcaaaaatgttcccaatcggattgattttaattacatcgaggctaacggttacgatccctttattcgcgactttatcaaaggaaagcactatccgtatggtaactggtag

SEQ ID NO: 170266 - DNA, 147 bp, Enterobacter cloacae
atgagcaagatgatgcatgaccagcattctgcttctgtacccgcttcccgggatcgtcgcaattttctgatcgcccgcgccggtctggcgttggccgctagtactcttggcagtagcggagcagtgatggcgaacccggctggttag

SEQ ID NO: 170267 - DNA, 528 bp, Enterobacter cloacae
atgtttctgataattgcttttttgggcggcataattagcctgctcagcccgtgtacgcttcccgtcattcctctgctgttcgccggtttccaggggcagcgcaaacacattctggcgctactcgggggaatgattgtgatgtttacgtcggtggcgatggtggtcacggttgccagcgagtggatcgccgacgctaccgtgatcgcccgctggattgcgcttctggtgctgggcatcgccgcactggcccctcatttttccaccgttcgcacaacggattgccagcccggcggtcagcgtcgggaacgtgctaaacacccgaagcgcacagacgcgcggcatgctgtcggcatttctggcagggctgtccgtaggactcctgtggtctccctgtgccggaccgattctcggggcaatattcagcatcaatattgcgggtcactcggccattgcaaccggcgcgctgttagccgcttacggcggaggatgcgcgctaatgctggggctgcttgtcatcggagggcgtaa

SEQ ID NO: 170268 - DNA, 309 bp, Enterobacter cloacae
atggttgacgtgaaaaataaaaaaatatcttcggcggatagactttatagagaaaaaataaaaacagccttgaataataaaaaatatacaatgagaagtttacatggtattgcaaaagaaacagatatatcatttgaaaagttggctgatttaataaaaaatgatggcgaacttgctaaggatattaaaataatgcctttccgatctaaagatggaagattattaattatgtccaaggaaagattcataaaagaggcttctctgaaagtgaaatttattgatttctttgcaacgaaacgtcaaggataa

SEQ ID NO: 170269 - DNA, 408 bp, Enterobacter cloacae
atgttgccagttatattaaagcaacattcccttgttgatgatctggcaaaaaattcggttcttttggaaccgaatcaggttaagtattatcataacttacttgattatatgtgtgataatattgatctagatatttatactatccatacactcaaaatagctattcaatcatctagtattaatgatgtgtgtgaaatagtgaggtttttcagtggggggaattccaagttattcagaataaaatattattatgaagatgaaaatagcgaaaagatttatataaatcaagacgaatactacaattttacagtaactggtgaatttccggttgatgagaacggtcgtgaaattgaagattttgatcctcggtatcttacattttattgtttgttgaattatgatgaataa

SEQ ID NO: 170270 - DNA, 399 bp, Enterobacter cloacae
atgatttatttttcaaaatcagcgaatggatttttcgtagatggtatcaatgaagatatgccagaagatattgttgaagtaagcgaagatatgtatgcctcgcttatgtcaggccagcaaactgaagggaaggtaataacatcagatgctgatggttatccggtactgagcattcctgaggttgaccatgctgaggccgctgagcggcaacgtgcagtcttaattgctgaagcaaactcatatatcaatgaaaggcaatggccgtcaaaacttgctcttggtcgactgggggaaagcgataaagctgagtttaatcgctggcttgattatctggatcagcttgaggctctttccctttcagacgcgccggatatcacttggccggataagccagaataa

SEQ ID NO: 170271 - DNA, 354 bp, Enterobacter cloacae
atgatcgcttccgttcttatcgcgcttgtcgccgtcatacacatacatattctcgtgcttgagatatttttgtgggacacgaaaacaggccgcaaggcttttaatctcagcgctgatttcgcccgagacagccgggtgctagccgccaatcaggggctgtataacggttttttagcggcgggattgttctgggggctgtggctgggcgacggtggtctccagtttaaattgttttttctagtatgcgtgctgattgcgggtctgtttggcgcaatcaccgccagcaggataattctttatgtgcaggtgctgcccgcactgctggcgttaattgcgctgtggatgggactataa

SEQ ID NO: 170272 - DNA, 1194 bp, Enterobacter cloacae
atgttgcgatcgctacaggcgctctgcctgatgagcttttttctggcggatgtgcgcgatgggctcggcccctttctcggcatttatctcactgaacagcactggcgaccggatgatattggatttgtgatgaccgcaggcgggattgcggcgctgctggcgacggtacccgcagggattatgatcgatgccacgcgcaaaaagcgcctgctgctgctcgcctgctgcgcgctggtcacgctggcgacgctcatgctctggtacagcacccgttacagcattgcgatgttttcgcagattgtgtccgggctggtcgccgcgctgattggcccgttggtagcggggatcacgctgggcctgaccggccagcgcggcttcacgcggcagatgggccgcaacgaggcgttcaaccacggcggcaatatgctggcggccgtgctggcaggcggcgcgatgtggctgtggggcatcggcgctgtctttgtcctgatgacgggcatggcggttttcaccgcgcttagcgtactggcgatccgcgagcaggatattgatcatgacgcggcgcgcggccttgaaaccggcgataaggcgcaggtggtgccgcagctgtcagtgctgatgcgtcatcctgtgttgctgacgaccgggatcacgctgctgctgtttcacctcggaaacgctgcgctgctgccaatgctcagcatgcgcgtggctgctaccggcagcagcctgtggagccctggaatctacgcggcgacgacggtagtgatttcgcaatgcgtgatgatcccggtcgcccttctgacctccgcgcaggcgcagcgctatggctaccggcggcttattctgattgcgcttattgtgctgccggtgcgcgccgccctggccgccagttttgccgggccgttatccgttattccggtgcaaattctggatggcgttgccgctgggatcctgggcgtggcggtgccgggctatattgttaacgcgctacgcgggtccgggcacatcaacgcggggcagagcgtgattatgctgatgcagggcgcgggtgccgcgtttagcccggcgctggcgggcagcatcgtcgcgcattcgtcatggcgcatggcatttgcgacgcttgggggggtggcgcttgcggcattaattgtctggtggcgcgcggccggacgcgtatcggctacggcataa

SEQ ID NO: 170273 - DNA, 642 bp, Enterobacter cloacae
atgagcggtttcgaaatctataacagtgccggaaagctcctcgtggactcgcaaaacaggtccacgatatttcgcgatcaacgtacgcttggtgcagtggagaataagggttattacctcatagatagtccatttggcaatggcagcactttaggagatcttccacaggcatttcgtaaggacggtacattaagatggttaaagcttaacgcaaataaatatgggttactcggcgccgatttgattgaagagaatgccggaagcatgatccgaactgcacgtaatataggtatggagagtggctatctggatgtgttcgatagttcgggaaatctgatttggagtgcagcttcagcatcaaaaatgccacgagtcgttgggttttatgatgtgccggcaaactatgatttacagaacaataccttctcagtaagtctcagctacaccccatggattttgttaaacaactgtccaggaaatctcagcgatgacggtactgtagtgggttattcaggattgatgctcaaatggactggctcacagttgcagggcagatatatcgcgcagaaccagcgtaactggagccagacattacagagtcggggtttaagaattcccctcgctcaatttgtaggtatttga

SEQ ID NO: 170274 - DNA, 363 bp, Enterobacter cloacae
atgaaacttttatttgccgtcgcttttttgcttctggttggatgcgctgataaacacacagactacaaattcaaaatggattatccggtggaagcagcacgtttatcgcttggtggagatattcatgtgaatatcgactgtgccatgcgagaaatggttgttctttccgatagtagtaatggaatttttagccgccatgttcataagcggcttagtaatatttgctataaaaagactgataaactcgacgtggtctacagatttaattcaaagaaaggtgtaaggcaaagtatgatttctacgcaatatcctcgcgtaccacctgaatcaaatacctacaaattgagcgaggggaattcttaa

SEQ ID NO: 170275 - DNA, 744 bp, Enterobacter cloacae
atggaggtaggcgcgtttggttttggtggaaaaggggcttcattcaatgcagagacagttgctgaggtatgggcaaacctcatggataaaggttctcgtgtttttcgcaacaacaaaactgttaactcacaaacagcttatgctgcatcgctatattttgcagctgaagatactcacgcgatcatcagcgttgcttacggaacaggggtggttggggtcttggcaagaaacacctcaggaacctccgcaacctcaacctttaacatgctttacggtaccaccaacacgacccgtgccagcgacggaacgcttaaagcagcctctccagtagttaagctgtttgcagatggttcgtttgaaacgaatgaagaatcagaaggttgcactgtaactcggataaaaaccggtgagtatctgatcgagggctgcatgggtctgaactctgatgcggcctggggagggattgacggcggattcgatatacctaaagaccgcaataggcaggccctaatctggctggactatgaggttagtgccgacgggtcagtactggtaaaaacatttcaccgggaatacccgacagcaccggcatttgcgaggaactcactggaaggttacgcggatggagacccggccgacatccccgccgatcagtacgtcagcgttcgtgtagagatgcctcaaaacagcatatcgaatctgcacgcggctatggttgaagtccctgattcatccgctgcataa

SEQ ID NO: 170276 - DNA, 516 bp, Enterobacter cloacae
atgagttctaagacattttcgtggttcagtgtgctgcataaagctatcaaatgcccggatcgccgctttcacttctggtggcgcatcgcgtcgcactggcatcgctcgggcaacaagttcctgaaaaaacgagccgctaaattaaacagaaacctcattttcaaatatgcaactgagattcagttgggggcgcacatcggacccggcatggtgattactcatcatcacgggattgtaataaatggttcggctgtaataggtcattctctacggataagacaaaacatcacgattggcattaccggcgcgaatgttaataaaggaccaatatccatcgtaattggcaacaacgtcagtattggtgcgggttcttgcatcatcgcagataagattcgcatcggtgacaacgttgtaatcggcgctatgtcatttgtgaacaaagacattcccagcaacaccaccgtctatagcgaaaagactttgcatgtcatatctaacaaattacaagcagcatga

SEQ ID NO: 170277 - DNA, 492 bp, Enterobacter cloacae
  misc_feature (380)..(389): n is a, c, g, or t
atgacaatagatagagcatactacatcaaggagttgagaaaaaggatggggattggatgctcagcctttgctcaaatcttaggtatggggtcttctggagaacgtaccgttagagggtgggagtctggcgaacatgagcctacactcaattactggaatcagattattaaactggaagatgtcatgaacacaaacactgaaaactctccatttaaacaagaatctattgaaaatagtaaatttactttcatagatttatttgctggtattggcggtatacgtttacctttccagcagttgggaggtcattgtgtttttacatctgaatgggataaattcgctcaaaaaacctattttgctaattatggcgaaatgcctgnnnnnnnnnnatgcctgatggtgatatcacacaaatcaaaaattcagatatcccagatcacgatgttctcttgggtggtttcccttgccaagctttttctcaggcagggctga

SEQ ID NO: 170278 - DNA, 543 bp, Enterobacter cloacae
atgagcgtcgtctttctgctcatcactcaggtgcggcatgtcgtcgatcgccttgttggcgtcgtttttggcattctcgaggttttcgcgggctgcatcctcggcagctttgttggcctcctcctgggcagcagcatcatcaacggccttgttgacctcctccacggtggtcgcctcatcaacagccttatgagcgtcgtctttctgctcatcactcaggtgcggcatgtcgtcgatcgccttgttggcgtcgtttttggcattctcgaggttttcgcgggctgcatcctcggcagctttgttggcctcctcctgggcagtggcatcatcaacggccttgttgacctcctccacggtggtcgcctcatcaacagccttatgagcgtcgtctttctgctcatcactcaggtgcggcatgtcgtcgatcgccttattcgcctcgtctttggcagcgtcgaggttatctttgcctgtgtccaggctcttaccattactgttactgccactgctgtgattgattgcagcaagtgcgagaccacttaa

SEQ ID NO: 170279 - DNA, 507 bp, Enterobacter cloacae
atgggggtgacaattaatattgataacttaaaaaaaagatgctttttactgctggttattgttttttgttgtgggttagcctggttggcgtattacgtaagtatacaagctctcactgatttgattgaatcaaggagtattgtttattatttctggggggctttcattagtatgctctccaccccggctctttgttattttgcatttgtatttatttttgtattctttacaagaaaccttcaggcacctaaactcctggcgaaaggtgttacccttgcatatcactatttcggtgcggtatttgtcattggcaacatcctctcttttatcgtcatattttatccccttggaaccaactatgtcttatgcgaacgttcagggccgttttctggaacgtattacacccggaccgaagagatttgcacacaggtaaaacacctgctcaaaacgagagccagagatatcgaaaaactcaatgaccaactggacggcgtatcgtcgcagtaa

SEQ ID NO: 170280 - DNA, 879 bp, Enterobacter cloacae
atgaaagggtattcggactggataagggatcatcgtgaagatattctcaaaggaaataactggcagcgtaatcagcgtttcgaaaatgaaatcaggcagctgaaaaatagtctggtcaacaatgctcatcacattatgctgctcacgcctgacgaggcgcagggggtggttgacgatttgttaggtagtcagcctgtcagcttttccacaacctatgccggtaacatcaaagagacggtttctgcggctaaaagtctgtcaaaactctttacttatcagcaggctggaaagattgttttcacgctaaaaggctttgggatcaaagccacacagtatgtttatcggggaaagctgtatgtaaagattacgggctacccttctctacgacgcattcttaacggaacgcgttaccggattaatcatcccaaagtgctcgaggtgggtataggaagtgccgggtttcgaaacggtattatgtcgggagccagattctgcatctggttttcagcttgctggcggctggtggagttgatctttaaatccgagcatgacgtcgccgcatttctggggaatgtcacgatggacgtggctaaagtcattgtgggggtttttatttcgagattggctggaaggggggctgtgtggttcgtatcatcatttgtagcgagtgcggctgttcctgtttgggggcaaatagtttgtatagtcgcattaggtataattgttgcttctactttaaatgttatcgacaaacagcacagattatcaaatgatcttatagattgccttagacaggggctgaaagaacagcaaaaaattgcagagaggaacactcaaaattcagtatatggtagttcattttaccagaggatttactga

SEQ ID NO: 170281 - DNA, 1233 bp, Enterobacter cloacae
atgccaaaactcacagatattcagattcgatcatggatcaaatctggggaacactttgaaggccgagccgatggtaacggcctctacctcagataccgaaaggtcgacaaaagtccaaactggcggtatcgctatcgctatgccggcaaagcaagagccatgctaattggttcatattctgatctctccttggccaaagcgcgcgatattgctaaagaactgtctgctcgagtagcgcttggttatgacgttgcgggagagaaacaggaaaggaaacttgaggcgctggcaaaaattgaggctgaaaagaatgccctaagcgtcgctgaattggccgctgagtattatgcccggcagattgaaaacacctataaacatcctgagcttttccgtagcagcttgcaaaaaaatatcgtggctctcattgggaaaatgaaggtagaggatgttcgcccgaggcatgttgatgtcgttttgcaggatgttatcaagcgcggttcaccaacagtcgccaatgacgtattgagaatgctaaagcgtctatttgattatgctgtggttcggggcattattgaggttaaccctgctatctcttttagtgctaaggatgctggtggcaaggaacagggacgtaaacgagccttatcacgcgaagagttaatgatgttcttcagggcgttgcgaaatgggcgaggtatcagccgagagaatgagctggcattcaaaattattttagcgcttggtgtgcgtaaaatggaattatgtgcagctgaatggtctgagttcgacctttccaacgaagtctggcacttacccggttcacgagccaagaatggcgatgatattgatattcctctgcctcaaccagtgatcgaatggattaaagagattcgcttatttgctggcgatagtcgttggttaattcctgcaaggcgagcacaaacagcgtcgcatattagccgtgcaacactaaatatggttatgccatccgtgatgaaagaaatgtcaggtgtcgagcctttcagtatccacgatctaaggcgcactatgcgcacacaaatggccgggttagggattgatccactgatagcagagcgttgcttgaatcacaagataccgggcatagagggtatctacaaccgccaccaatattttaatgagagaaaagctgcgcttgcgcaatgggccgatttgcttgtggtcttagaaaacggtgatgactacagtttgtaa

SEQ ID NO: 170282 - DNA, 753 bp, Enterobacter cloacae
atgatgaattatcactatacaagtctggagtatagaaaagcggaatccttctctgtcatgaaatttcccatgatagatgatatagctctttttgcagatgatataagcagagaaaacgaactttcatatgatgatagggggattatgccaataccgttctctatcatctgcgcattcgtaaattcttgcttagacgatgggcgtattaaacttgatagttcaggaagattggagcctagggaagatatagttaatcatgatatttatcaacagccaatgcgctacgacatagatgacccgacctctgatgggactactggcatttttgtagatatcggattggatttaatgagtgatgaggagatgcttgccggatttaaaattttgctaaaaaaatggagagaacagaccgggattcacgagcgtactactgatgagcgtaggcgttttggttcatcaactttagcaaaaattcatcaatacagaatcatccctttcttggacatagcgcgttgggcacggattaatgaaatgacagtatccaatgagctttacgcaagattgttgttccctaatcctttacccaatggtgaagtaaaaggtggtgctcacataagggacacggttagaccattcgcagagtcggctacagacgttctcaacagcgttgttcttaagaaatactatgcagataaccctcatgttgaaaatatgagattttcagagttcctaaaattggtagagtttcaataa

SEQ ID NO: 170283 - DNA, 201 bp, Enterobacter cloacae
atgaacccacaaacaatccccactaaaggctacatccgacgctttcgcttggctgaattgctaggtgtcagcgtatctactatcgaccgaaaggtccgcaatggcacactaccaaacccaataaaattaggagagaaaatcaccgcatttgatgcgcaggagatcaatcgctggctgctagagcggcgcaaagctaactga

SEQ ID NO: 170284 - DNA, 1476 bp, Enterobacter cloacae
atgaggaactgttttttaatagacggtaagacaataaattctgcggatgatgtttttgctggtttaactatacaatctaatttaataatatctaattgtagaatattgctagaggagttgcattttcctaggcagataatgaatgtatttattgtgggatgttcatgtaataatgagttgctcatgcaatcatataatgaaaatactgaattgcgttttgagtatggtaactcttttcaaagtgtgaaaatttcaggaagctatggtagagtcctttttaattcagcacctcttttcagtcgtgtgccataccctgagacatttcaaccaagtaactttggtgtaatttattttctagcagaagcaagggctaagcggctagattttacttgcatatccgcaaactcaatcaaatacaatggctttgcgagcgatgtttttatggatgaagtaaatgttagtgatgatgttacttttatatcaaaggaagaaatttcaatcttcttaataaggacgacgtgtaaagacttgaattttgatggtaattttaaatttattaaccttaactctgaatttaaaataggttcgctttactttaatgtcagacaaagtgtgatgaaaaatgtaagtatagacctacaaaattcatctatatacgataagcttatctttgcgaatgcatctgataataaaagctctcaatttatattgaaaaatgctgagtttgcgtcgataaaaagcttagtgttacatcaatctcttctaagttgttttgttatttctaattgtgatcttaccaaaactgaagttagttttataaattgtaggttagatgacttattaacagaaggagtgagttggccgtttgatatagaagttaatcattcaagtgctcgaaaaacaccttatttagaacaggatcaaaagcaagccatttatagacagttaaagagcataagtcaaaaaaacaaagatactgataatttttactttttcaggagaaaagaatacgatactactctgtcgatactgagttgcaagttggtattattcttaaattattttctaactgtgttgtgtgaccttgtaggtgtcgcaagagagaggcatttgccagttatagataaattgaactataaaaataaattctccggttttgttgctacattatcgaactggcttgtacttaaactatcttcgctaatatccttgcatggtacaagtttatttagaccgctattgatacttgtaattgggattcctttttcattatacttattaggttattatgagtccattgaacaattaatggctcttagtgcatatgttattgatccaacgcacaagcttgaagcatcaatcatgggtaaaaccatcattttaaatcctatgcatagtttgttttttaaggttttttcatcaactattttatttaaaattgtcatggtttttcgtaagtatagtgtgtcagtttga

SEQ ID NO: 170285 - DNA, 903 bp, Enterobacter cloacae
atggctactaaagaaaaaatccccgactggaaagcccttgaacaacttgttgtcatgatacagaagcaactttcgccaggagccgtcgtgaaacacaacgttatgctcgatggctatagaagcgaagtcaaaaggcagatagatgttcttgtcgaacaaagcattggtcagtataagatgcgtattataattgattgcaaagattgggcacatccaatagatataaaaggagtcgaagaatttcatgggttgatgcttgatgtaaatgcacataaaggtgcattagtttgccctgcaggatttacgaaagcagctctaaaatgtgctcaaaaacttcaaattgatttataccgtccagtctccacaggagatcataaatggaaagctgaagttaccgcacccataatatgtgatttcagagacacatttatgagtttcagattaaaatacacttcaccaaaaccgttccgtataagtgagcaactacagaacattgagatatttaattctaaagacgagccattaggaacgctaattgaaatagcattagagcattggaataatggatatttaccaagcgagccaggagaacatcgaggtctagatattttcaaaaatgagcgaattagaattaataatggatacggcgaaaaagtagaagtggcaatcgaccttaatttagcagtcagtaaagatttatatttagggcatttaccaatagaagatattcatggattgcaagatgtaaacacagggaatgttgtagctaatgcttttacattaggtgggcttaaccctcataacataagacataattgggagaaggttattagtgaagagtcgcttccttttgaacctctcttaaaagtgataggttataattgctcagggatttaccaataa

SEQ ID NO: 170286 - DNA, 435 bp, Enterobacter cloacae
atgacgatgacgttgaagacgacgtcgacggccttgacgacgacggcgtgggtgaagtccgtgttcatcgggtcaatactgcgcccggcgcagcgcatggagagcatgaagctccccgcgctccgcagcaccagtatcaaccaccgtatgcctctgcccagccgcgccagccagcgccgccgccagtggaagaacctgtgcgtcatacgcagcagcagcctgtgcaaccgcagcacgttgcgccacagcctgtacagccgcaacctgtgcatcagcctgctcagcagccacagcctgctcagcagccacagccggtacagcagccgcagccagtgcagcagccgcagccagtgcatcaaccgcaaccgcagccgcagcctgaacccgtaccgcctgcggcacagcccgctccgcgcgttgaaccagagccggtag

SEQ ID NO: 170287 - DNA, 729 bp, Enterobacter cloacae
atgtctttggcatctgagggtgatattataaagggattaatcataccggtagcactgtatttgattaaaaaaatcattgactgggcaggcaaaatatttggccctcctcaacctaagaggaagtaccaatttgataaaatccctgctgataaaaaagttgaattcctatcgcagatagacaccttaaaggaaaaagtatctacaccacatacccttgttcagatgaaacttttatatgaacaacttggaatctatttacctgtatggcattgccatcagctagtttcatttatggcttatgaaaatattagctcattggatgtacgtctacgaggctttcttaaaaacacaactattgggaattatccgaaaaaaggttttagtgtaaacgataaggcagtgcgcaggtcctattcgatatccattttattcggtttattttcagttgctatatttgtttatgcaggatgggactctatatcatctttctgggaaagcaaggaaataggcttatttttattatttttaatcatctacacatccgccattattgctgttgtaggatatattatatcccaaactgaagatatctatcttggttctaaattcgggtatatattcgaagcttggctttcaaacaatcctccggataacgatgctatcaaagatacttctgtaacaacctcatctgaagaccaaggaccgcaaggtaaaaatcaggaaagttaa

SEQ ID NO: 170288 - DNA, 315 bp, Enterobacter cloacae
atgcgttgcttcgccgcgtacgcgtcgcaactgctcttgctccacccggagggcgatgacctcggaacgcgtgcgttcaatgtcaaagcccgtagcttgacctgccttgaacttctgctctgtcagacgctcaaggcgctcggcgacttgaagtcgctcttttgccagatcttccagctctgccgcctgccgctgctgcagtgcagcggacactgtctcaaaggcgatctgccaacgtgtcgcgaaccagttctgttcgacagcaactgcgtccatccgtgcgccatcagcggcatgcgagaggcggcccgctag

SEQ ID NO: 170289 - DNA, 315 bp, Enterobacter cloacae
atgctctggcgaaccagaaagcgctttagcgagaacaccccattgcacggctgcgtcggcgcgagcacggaccagagccgctcgctgggacaaggtgccacgctccgcttctgcaacaacggtcgcatccacctgtcccgcctcaaagaggcgtcgactgcggtcaaggagtcgatcagcgacgacaagaccatcgacctgatgctgcagagaagtccgctgggtctgccagcccagataagcgttctccacatcctgaagcgcaagcaaaaccgtgcgttccaggtcagcctgtgcgccgcgactgcgtgctga

SEQ ID NO: 170290 - DNA, 231 bp, Enterobacter cloacae
atgtcaatcagcggaacatttaaagttaagcagttgaatggaattgttccttggggtgatggatggaatcgccacgtggaaatcgatgctgaagaccttgaaatagcaggaaccgtggatgaggaggatattattcctgaatacggcgcagaagttcttctcgaagctattggtgaggatgtcgttatcaaatggcttacagacaacggccatacgattattgagggttaa

SEQ ID NO: 170291 - DNA, 225 bp, Enterobacter cloacae
atgaattctacatacattccatcatgcctgcgaaatcttcctaagcagaaagaaaaacctcgcaaacaagccattaaagacgcgaaggatgaggttattgacaaggccattagcttgctcagggaagagttaagaagtgaaaagctcaacggaatgctgatgccttatcagcgcggatatctttcggctattagtaagctggaagtattgaagagtgaattatga

SEQ ID NO: 170292 - DNA, 585 bp, Enterobacter cloacae
atggaaatccctcgttatgtctttgccgccagcagtcagggcggcattctttttgcctggaggaaattgatgaagccaatcgatatgaagaaattattatcttttgatgaattgaagcggttactcgattacaacccagtgactggaatattcaaaaggatcccccagacaaagcatcagaaggcaagaacggctggtagcgataagggttctgaatacacacgaatttgcttaaatagaaaaatttatttagcccataggcttgcctggtactacatgactggcaggccgccaaaaatgcttatagaccatataaatggcaataaacgagataaccgattttgcaatttgcgtcctgctgattattcgcaaaatatgatgaacagcaaaatatcctcatccaataaatctggttgcaagggtgtcgtgtggctaaaaaggaaaaagacatggagagccacagggaaaattaatggcaagagggtttcgttgggaaccttcaaagaaaagagcgatgcaattaacgcatatcaggaatttgccagaaagaaccacggcgaattttacagaaccaatatcgattaa

SEQ ID NO: 170293 - DNA, 339 bp, Enterobacter cloacae
atgtcacctgatgaaaatggttacttccgtgcgcctaaaaaactggaatctaaggacgaagttattgcccggatatgtgctggtctggagctttattaccagcagaaagagaacggaactctgccaaaggatgagcgcacgccggagcagattcaggatgcgcaggacgattactggatagagaagctcacaaggaagtacgaatcaaagctctggcacgacaacttcacagcatcattccatccacggtgggaaaccactggaccgaaacaacaaaccttctacagcgacttctatcgcgacacttatggtcgccttggcgctgtacgcagcagttga

SEQ ID NO: 170294 - DNA, 195 bp, Enterobacter cloacae
atgaaaattggcgaccacatgcaagaggtcgtaggcctggtaaacgacctgacaggttacgagacggaatcagcacttaaattgctggctttggtggtaggtgaatacatgattaatgccgatgccactgaagtgaatatcaatgctggcgttatgagcatcaaagtagaaatcactgtgccgggcgaggagtaa

SEQ ID NO: 170295 - DNA, 138 bp, Enterobacter cloacae
atgataattggcatccatatgacatatctctacctaaaaggtgatttatacaaagaggtcatcccggcaggactgtttttcggggtgatagaaattttgggatggataggacttatagctttccttataggaaactaa

SEQ ID NO: 170296 - DNA, 267 bp, Enterobacter cloacae
atgcccggatacgtctcgttagaaattatgattgaagaagaaaaagctggatatcttattgaccagacgatccggcgtatggatttagaatttatcagtgataaagacggactattctttcggccggaagatgacgtaagtttgaatgcggataaacttgtgaatgactacgacccttactccattgtcatgacaacagatctttttcatgagaaagcatgccaacaaataacaagtgaatttgaaatgcaccaccatagcgtctaa

SEQ ID NO: 170297 - DNA, 1218 bp, Enterobacter cloacae
atgagtgaaaaaacattgatttttgtatgctgtttagacaaggcgaatataacactagattatatgcctgaacatcaaggtgtcaggttaaatagtttcaatagagatgagttgagtgacgattcaactgcggtttcaacgttttcaatagacatcaaagagtcagagttctacaatagagaatcccaaaaaggaaacttgtatgttcaaaggcatttcaataactttaagaatggttactgctatgttttattgaagtttgaaaattcaaatactgctgatgggtattactatcgaaattatcaaacccctgaagaaagtaaaacagatcaagagtatgaaaaaatcaaaatcacaagcttggcattcatttacccatcaaataaatttgccgcaaaaaacaacttgattcaaaactttctaaataaaaagaaagatcataatgatataaataaggagatcagtggtcaaatatacttaaatagttattctgtaggtcaaggaatgtgctcattgttacacaacggaaaagaaggagttctgcttgactgtggtgcaggcaagcccattttaaagcctaactataataaactatctaccaataaacttataagtgatctaaatgatttatcacatgtggatatgattttatctcatttagatagcgatcatcataggcttttatcttgggacccaaatatattagaaatggtgtccaatatatacattcctagcaatacaaatgatcttttctttaaagataaattaacctttcagaaagttatagcctgctccatgattaaaataaaatttgctaacgggtttctgcattcgtatcgtactcaacctctttcttcttcaaaagaaaaaaatgataatgaattagttacacacattagaactgaaaaagaggaggttttagctcccggagattatttatataaacatattcacactgattcatgtccacaaatagccgcgcttataaacaatcaatacacttatgttattgtaccgcatcatggtgacatagaaagtagtaaatcaatcctaagtccatcaaagtcaattttggcaattgcttttttttcagctggaactcatgcaggatataagcacccatctactcaatcaatggatgcacatagtgcatcgatgttcataaatgtcgtagacaatgaaaacaatgatattgacaaaatacagtttaacctttaa

SEQ ID NO: 170298 - DNA, 339 bp, Enterobacter cloacae
atggcaacaataatgaaaagggcactggttgccttattactgcagcctctgccggcattcgccggggagaaagtgacgttacgttgcccggacagaggctgggcggaagtgacattccattcattccagcacgtcagcgtgctgtgggagaacaatctgttttatatttccgatgccaggcgcagccagaataatcgtttttatacgtttaccaatggggatattctttcggtgagtaatggattccggtttatctatgcggattcgggtcaggggacggtgtgtacgttattatcgcgggaaccgacgcaggcgctacgactggaaacgcggaagtaa

SEQ ID NO: 170299 - DNA, 1071 bp, Enterobacter cloacae
gtgacggaacagacgcgcgatatttcctggcaatttatcgatgagatagataatttttctgagggatggacaaacggcggcgggccggaactgagtatagggatcctgctgtggcccgagtttcccctgatgtcactagccggattgctggatgcactgcgtcatgcggcggatatgggcgacaacagccagcaggtacgctgttcgtggacaatcctgagtcacgatcccgggcttcgcatggcgtcgagttccggcatcaccattcagcccgacagcggctatcttccgccggaaaccttcgactatatcgtggtcatcggtgggctgctgcgtagcctgcacctggggagtacgcttagcagggagtatctgcacgtcgcgcgcgccgcgggcgtgccgatcgccggggtgtgtaccggtagctttgtgctggcggaggaggggctgctggcaggaaggcgggcgtcactgcatccgttccatattgcagatttccgtgcccgcttccctgacgtgtatgccaaaacggggagcgatttcattggtgaccggggcgtgctgacctgtccgggcgggatatccaccattggtctggcgagcgaacttatccgtcgacattgtgggccggatcgcgccaccaaagcgattcaccagatggcggtaccgaaccgcattgatgctgcgccggtgtccgtttcgcgcgcgattggcttcacccgcgtggcggatgaacgcctgcgccgggcggtgttccttatagagcagtcactggtgcgcccgatcagcaccgggtggctggcagaccaggtaaatattagtgccaggcaactgacgaggttgttccgccaggaattcgaacagacgcccggcgagtttattcgtgctgtgcgactgaaatatggccgctggctgctgaagaactcagcggagagcgtcactgagattgcgctgcgtaccggtttcagcgattgtgcgcactttattcgcgccttccgtcagcgatacaagtgcacaccggggaattacagagcttcgcgggagccagaaaatggccagaatccgttttga

SEQ ID NO: 170300 - DNA, 561 bp, Enterobacter cloacae
atgacattacaagcgacttatcttgaacaggtcacgcccggcgatgaaacggaaggtgtttcgataatagacgtcaatccttttggctctaagggagaaaaagatcggcggttgctaataagtaacgacggcgagccccttctgattttacagttatatatacgtgcagatgaggatggctggcttatttccagcgccttttctgagtttcttctgaatgaatctcacgtggctattatttgtggcgaccattttcatgtttttgacatggccacacacatgttcaaaagccatccactagatgattacgttggacatatttattccgttcctgacatccatgcagacaagctacatgaccgggttctggtcgccacttactgccacgtttttctagtggatattgctgcgggcgttatctggaaatcccggcagtgtgctattgatggtgtaatcataacatcaatagaaaatgatacagtgcttggacagggagagtgggacccgccaggaggctgggaaccttttaagcttgaccttaaaacgggtgtcctgatttga

SEQ ID NO: 170301 - DNA, 537 bp, Enterobacter cloacae
ttgcaacttcactcttctcgactgtatcttcgtcccgtaactcaatctgatctcgatgatcttttcagaatttatggtgatccggctacaaacacctttaacccagttgggccgtatcctgacatacagcatacaaaaaatgttttagctcgttgggtcaaccattgggaaacccacggtttcggaaactgggcaatctctttgaaggatagccctgatagaatcattggttttggcggtctgagtatcagcagttatactgatataataattaataacttaggatatcgtttcgccacagaggcatggggaaaaggcctggcgacagagttctcgaaaaactctgtcagatatggtttttgtgagttaaagctgaccgagatctctgccgtagttagaggtaatcacgtggcatcacagaaagttcttcaaaaagctgggttgaaatacataaaagagatttatgatgtgaaagactcgccgccgagtctgcttttctctctcactcatagtgaatggttaagacaatcaatgtga

SEQ ID NO: 170302 - DNA, 744 bp, Enterobacter cloacae
atggatttgcattcatcaggaaaataccgcaaagatgactctttctctgtgatgccattccctctcgtgggggatataaccatatttgatgaagggttggaggggagtcaactatcatctgactgcagggggctttatcccatatgcttcgagcatttatgctcgtttgtcaactcatgcttgatggatgggcgcataactattaatgaatctggaaagttagaaccaaaagcagatattgcccactgtgacatttataatcagccgatgcgctattcttttgacgaccctacatcagatggcactacagggatttttgtggatataggtcttgatttgatgagcgatgatgaaatgatttcttcttttaaaattttgctcagaaagtggagagaacaagctgggatgccggagcgctctattgatgtgagcgtgcgatttggctcatcaacaatagcaaaaatccaccaatatagggttatcccctatcttgatatcgcacgctgggcgcgaattaatggtgtaacggtatctaatgatctttatgcaagattacttttccctaaccccttacctaatggtgaggtaaaggggggcgcacatatccgggatactgtgaagccctttgctgagaaggcatgtgattttttcaacagtgtacatctaaaaaaatactatgcagaaaacccacacatagaaaacatgatattttcagattttttagctttgaatgactttcagtaa

SEQ ID NO: 170303 - DNA, 591 bp, Enterobacter cloacae
atgaaattatctgaaacagcacgttggttaatcttcggagtgatagccgcagcagtattaatatccgcgtggctatcaagagatccgaataaggtaatcaagcaagcagcggaacaagccgcaatacaagccgcagaagaccaacgcgaaaaaatgctacaggatcgtcgtgaaagtggattcgttgaaaaggtcgactacacaaacgcatttggtgatgtcaccacgcgtactgtaagcgtgttgggacgcacgaaagggacaatgctcaccatcagacgtgaaggaaccggaaagctcgtagacgtgtgtttcagtgcgattactaacgataaaaagcgtgaacttttcgccccatacttttctacgaccgtttatgctaaattcgatggtggagaaacaaaggagtttagcgcaagcagaggaagcaccgaagattacctgtgtatatcctctcctcagaagtttctttttgaaatgagccgcgccaatcgaatgcgcgtcgagttaatctttctggatcactattccaaagttccagaagtccatgaatggaacctgaaacaatataatgagatgattaaaaggtaa

SEQ ID NO: 170304 - DNA, 216 bp, Enterobacter cloacae
atgtttgatgcacccagaagcatcaaagatgtcctctgggacgttgatactattatcataatgcaaagtggggaaaccgagttgactttggttttgttgtacaacatttatgacgagggtacgtttttctttccatttccaatgattgcattatctgcgaagtacaatgatcaaatattgtcctttcgtatcctctttagccagagaatgaagtga

SEQ ID NO: 170305 - DNA, 762 bp, Enterobacter cloacae
atgactgtccttataaaaaccttaaaaatcatggcgtcaggtgttgttttcgtttcaggtataaccaccgcctccagtaccgtctatttcatgccagaggcaaaatcagcaggtgtcgcaagcagcgacaaaaacgccctgatgtttctcgggatggacagggatgtaaatctgaaggggatatgcttcgcgatgacaaaccaatcctcatcaatcgttccgctggtagatatcactgctacaactgataacggcagattcacgatgcacgggttacgccctaatgtcagtgatactaaagaagtcgcttgttccttcgggtccgaagctggtgatttcttgactggcatttcgaagtcaacagccgttaacgtgaagctggatttcaatggcgagatccgcaattacactttcgacaccacagagttcggaaaaatgttgactgccaatggtaaaggcgtgtgggaaaaagcagctaaagactacgctcagggagtaagggcacccgttttgtatgataccaatcatgaagcccctaaaaacaatgaagaaaaatcaaaggacgatacacatagttttaaatcaagcgatgataaacttaattcagtctggaaaaatcttagctctgatacacgtaaacgcttgctccctgcgcaaagagaatggataaagaaaaaatcccaatgcaataatgaagaggcatgtcttacccacatgacggaaaatagaattcgtgaactggaatctgaaaatggaaaataa

SEQ ID NO: 170306 - DNA, 162 bp, Enterobacter cloacae
atgaggatcgcaaggaatatcgtgctggtatcgctggcgctgcttctcttgctggtttgcattacgttgatacagataacgcggttgccgtcggtgctgccaacttcaaagatgcgcaaggttacgcagtcggttaccgtcataagttcgctgagaatatag

SEQ ID NO: 170307 - DNA, 252 bp, Enterobacter cloacae
ttgagtgttagcgtttacgccatcttgagcggtattagctgtatcttgtgctttattaatagctgtatttgctctttcaatatcgccctgaaggttatagatttgcccgtcttgcttaatgttactcccctcgatgttatcaaggttgtaggcggttttatcggtaccctgaatttgaatgtgagcacctggattattgacgttatcgtcaaggtttacgtttacttccgctgcatttgcagtattcattga

SEQ ID NO: 170308 - DNA, 396 bp, Enterobacter cloacae
atgaagcgcctgctgtttatgcttctgctgctggtggccagcggcagttgggctgactgtcgagtcagtacggtcaacgccgcgtttgggagtgtaacctcattcgcgctgagtggttctggcgaagtggcaaccaccggaacactggtcgtagcctgtgatgcgctggtgaacttgctgaccggggacaccatcacgctgaattttgtctcagctaccgtttcggccaatggtcgtgcgaccatgaagcgcaccgacaacgcggccatcaccgatgtgatcccgacgcgcctgtgcgggcagtcgggctgcgctaacaacagcgaagtgcagaccagtaaaacctatacctgggacagcagtaccttgttaaatctgatcggcggcaaacaataa

SEQ ID NO: 170309 - DNA, 147 bp, Enterobacter cloacae
gtggttgagaatcagtttttgggtgataagtacatcacaaccttcactgcaaaatacgcaagtgagaaggctgaggccgagaaatatcagcttctgtctgaactgaaaaagcaggacgcagatgagcaaaaacaatcgcttaattga

SEQ ID NO: 170310 - DNA, 1365 bp, Enterobacter cloacae
atgctcagtagtcaaaatattcaaaatggactgatagatattgataatccttcacgttttgtatgtgaagacggttttaataaggaaaataatcgcaccttaattcaaaagggcgatgttttattgactatagttggctcattaggacgtagtgcagttgtcactaataatgctaagtttgtattgcaaagaagtgttgcagttttaacgtcagggctgctttctgattttttatctgattactttaaatcaataacggcacagttttattttatcgataacgggaaagggacagcgcaaaaaggaatatatctcggccaactttctcaaatgcttatacctgtcccttcatttgttgagcaagaaaggatagttattaaaattaacgaactaatgtccctctgcgatcaactggaacagcaatctctgaccagtctggatgcacatcagcaactggttgaaaccttgctggcaacgctgatcgacagccaaaataccgaagaactcgccgaaaactgggcgcgaattagccagcatttcgacacgctgtttaccacggaagcgagtatcgatgcgcttaagcaagccattctgcaactggcggtgatgggcaaattggtgccgcaagatcctaacgacgaaccggcttctgcactgcttaaacgtattgagcaggaaaaagcgcaactggtgaaagaaggaaaaattaaaaaacaaaaacagttgccgccagtgagtgatgaggaaaaaccgtttgagttaccgatgggatgggaatggattcggtttggtgagattttaacagagttaaagtatggaacttctcagaaatgtgattatttaactaatggatatcctgttctgagaattcccaacgtggttggaggcgaaatttctttagaagatatgaagtttggtaaactatcagagcatgaagtgaaagagttatcattagaaaaagacgatttaatttttattcgatcaaatggaagtcttggtattgttggtcagtgtactttattacgacaatctttagttgatcatgcttatgccggttatttaattcgtgcaaggatgtttagtgatgcgatatgtgctgaatatatatcattaatgatgaagacggtttttattcgcgatcaaatagagaagccgatcagaacaactacaggtgttaagaatatcaattcttctgaattatcaaatttaaaattagcacttccgcctttattaatgcagaaggtgattgtagaaaagattgatgttcttttgagtttttgcgaatccctcaaatcccgtctgcaatccgctcagcaaacccagctccacctggcggatgccctcacagacgcagccctaagctaa

SEQ ID NO: 170311 - DNA, 432 bp, Enterobacter cloacae
atgaccacagcagcattagggcagttagcggtagtgcaaaaactcaagagccttgggtccagcaatgttgtcgttcagaaagaaggcaataaaccgtttatcacctttattgccccgaacggcaaaacgtacaaagtgacgaccagggccaaaacggcagggacctggcaaacgccaacccgctacggtattgaaagtgttgttgataataatggcagcgagttctgggtatttatcgatcttggccgagagcccaatgcgttctatatcacgccaatctcctggattagaaatgacattcatcaggcacatctggattatctggataaacatggcggacaccgtgctcaaaacgatgaatcaactcatcacgctatatcagtaaaacgcattgctggctggaaagataactgggagcagatgggtttttag

SEQ ID NO: 170312 - DNA, 288 bp, Enterobacter cloacae
atgaaaaatagcctgtgggaaaaatatggtgagctactggagcgacaacctgaattatttaatctagaacaaataaccattaatctgaaagaacttcaggaatatatagcaaatggaaactcagcagcctatgagctatttgatgcttttgaagtcatccggcaggatgaagtcgagcaagagatggggtttcgcgctgtcccacgagtgtttcttacccagttaattcttctgagtaacgaatattgtgcattccggagttcattaatcaatgatgaaatcgactaa

SEQ ID NO: 170313 - DNA, 489 bp, Enterobacter cloacae
atgaattgtttattacaagcatgtattacggagggcttacgcatgaaaaaaattatgattgctgtgctactgatcgcatccagcgccagcgcactggctgacgggcagcaaattcaaagggggtttcctgagtacaaagtaactaagccacaggtaccagcttcaaaggccaaagaatgcccgattaaaatggactttatgcagcagcagatctccgatgccttcgtgcaatatgatggctcaaggctaacagcagaggatttctgtaaaaacggcaccattgcacagatagcattcatgatgaaaatggctgcgcgtgagggccgcagctataaggggatgaaggttaacccgaacaggcttgacgatcgtgcttgggaggaagtatctaaattaagctactggcggttttacggggtgaatagcgctcttggtggtgcgttggtcgaattatataaagcctcatttatcgcggcccagatggcgtaa

SEQ ID NO: 170314 - DNA, 201 bp, Enterobacter cloacae
atgacagcacaaatttcagcatacgggcggctggtggcagatccccagtcccgcaccaccagcaacgataacaaattctcaggtgaatgctacacaatgaaaatgcagtttcacatagttctttacgccatctgggccgcgataaatgaggctttatataattcgaccaacgcaccaccaagagcgctattcaccccgtaa

SEQ ID NO: 170315 - DNA, 2772 bp, Enterobacter cloacae
atgcgtaatatcgacattatccgcgaagtgacacacatcgctgctgggcaatggcagtctgttctgtcggccctcagcatcgcagtatctgattcaccactcaggcatactccctgccccgcgtgcggaggaacagatcgtttccggttcgacgacaacgggcgcgggaaccatatatgcaatcagtgtggcgctggcgatggccttgacctgattaagaaggtgaatgactgcgacacgacaaaggccgcacaactggtggcggaagtactgggtattgattaccggacaacgcaaaccgatccaagcgctgtcattgagcgccgggcattacttgaggcagagcgcctgcaatgtgagcagacgcgacaggaacgggccacacaggacacagagcaccgtcgcctagcctttgctagccgctatgctgcgatgtgccagaacgtcacgcagggcgaatctgactatctgaaatcaaaggggctgaacggtttcatctatccgcttctcactaatggcgcgatcctactgccgctggtggataacaccggtgcggtcaccgccgcacaaaccattacttcgagcggggaaaagcgccttctattggattcagccaaacgcggagcattccacgccattaaagtatcagagcaaccgcaggaagtgatccttgccgaaggactggcaacggccttatccgttcaccttgtgtgccctgacgcgctgacagtatgcgctattgatgctggcaacctgctgcccgttgcccaggtcatgcgccagcggcacccggacgcgcagatcatcattgccgccgataacgacaaccacgaaggtgacgccgaaaccggagccaccaacaccggtaagaagtccgcagagaaagccgctttatccgtggctggctgggtatcagtcccaccgactgactgcaaagcagactggaacgactaccaccagcaaaacggactggcagccactacagcagcctttaacgattcaatgtaccagccgcagggggatagtgtgaagccacagttacaggccattgagggcaacaaggatagccagccagagaaagacccgttgaaaccccacatcgagagccgaaaagatggcgtgttctgggttacgccgaaggttgacaaggaaagcggggaaatcatctgcaatgaaagctggctggcttcaccaatggacgttatcggcaccgggcgtgacgataaggatcagtatctgatattgcgctggctggcctttggttccgatgtttcaacaaccgccgcaattcccctggccgatatcggggagcgtgaaggctggcgcactatgaaagcgggtggtgttaacgtcacaaccaaaagcagctttcgggcaattctggctgactggttacagcgcagtggctcacgtgagctatggcgtgttgctcatgctactggctggcaatgcggggcatacatcatgcctgacggggagataatcggcacgccagcacatccggttttattcagcggtcgcagttctgctgctgccggttataccatccagggcaccaccgcgagctggtgtaattgtgtggcgcggctgacatacggcaactactccatgatgacagccaccgccgccgcactggcagcaccactaatcgggctggctggcgctgatggtttcggcattcatttctacgagcaatcgagctcaggcaagaccaccacggcgaacgtggccagcagcttatacggtagcccggacttattacgcctgacgtggtacggcaccgcgctggggctggcaaacgaggctgctgcccacaatgacggactgatgccactggatgaggtcgggcaaggcgctgacccggtaagcgtgtctcagtctgcctatgcgctgtttaacggtgtgggaaaattgcagggggcaaaggaaggcggcaaccgtgatttaaaacgctggcgcacggtggcgatcagcactggggaaatggacttggatacctttattgcaagcgccggacgcaagaccaaagccgggcaactagtgcgcctgctgaatattccgctgagtaaggcggtacgcttccacgaccaccagaacggcaaacaacacgctgatgcgctgaaagacgcctaccagcaccaccacggcgcagcgggccgagagtggatcaagtggctggcagaccatcagcagcaggccattgataccgtgcgcgagtgcgaagcccgctggcgcagtcttattcctgctgactatggggaacaggttcaccgcgtaggcgctcgctttgccattctggaagcagcgctgattctggggaacgttatcacaggatgggatgtgcaaacatgccgtgacgcggtacagcacagttacaacgcgtggctgcgagagtttggcaccggtaacaaagagcatcagcagattgttgagcagacagaagcatttctaaattcctttggcctgagccgctttgcgccgtttccatactgttcaacagacatgcccattaaggatctggctggataccgccaaaaagggagtcacgacgaaagccctatgattttttataccttccccggcgcatttgaaaaagagatagcgcagaacttcaatcataagcagtttgctgaagttctgaaaaatgccgggatgctgacaccgcctacaagcgggcgtggctatcagcgtaaatcccctcgtatcgatgggcggcagttcaatgtctatgtgctccactacatgccggagatcagccagccagaagaatga

SEQ ID NO: 170316 - DNA, 219 bp, Enterobacter cloacae
atgaacaacattgcaaagcagcgaaaagaaattggagtttcacaggctgcgcttgcttcggcaattggttggggtcaatcgcgtatcgctaactatgagctgaacattcgcaccccaagcctgagcgactgtcgctcaattgtagaaggattaaagaagttaggttgtaaatgctctttggatgatgtcttccctccatctgaaagtaaagccgcctaa

SEQ ID NO: 170317 - DNA, 252 bp, Enterobacter cloacae
atgacaacagtttacgtaaccaagtacgcattaacggatgggccattcaaggtagaggcagaactgaaatacgaaggtacctatgcatcgtggcgagcgaatgactatccgcaatcagcccaaggaaaggatttctggttaactcctgaggaagcgctggcagactgcgagcgtcgccgacaggccaagctcaaatccatcgagaaacagaggggaaaactggaaaagatgcaattcactattcctgaataa

SEQ ID NO: 170318 - DNA, 207 bp, Enterobacter cloacae
atgacaagcagagagctttttgaggaatggatggttagtgaatacgaatgggctaatgaagcgttaaacatggctgcattccacggagatgataaaaccggatattacacaggcggcaattatatttatgacggctattcatgctctgatgcattgttttggtgctggagaggatggcagggcagcaggacaaaaggtcggggttaa

SEQ ID NO: 170319 - DNA, 195 bp, Enterobacter cloacae
atgagaaagaaacaagctgaaaaactattttgtgacgcaatggatgctctggctgaagtcggagagagtccgctgaactactgtctttcgtttgctcggggatgcatggcagccgagaaaaagaccgaatatctgcatgagtgggaagacggcactatgcgactgaaggttagcgacggcgagcaggttcattga

SEQ ID NO: 170320 - DNA, 246 bp, Enterobacter cloacae
atggacgaatcaagaaagcagtttgagcagaaaatacagcattcgtatggcgaagattacttggttgttaatgatgatggcgattatgtgaattggataaccgctgacctgtgggagttttggcaggcatctcgcgaggccatcgagattgagcttcctggctgggatatgttcgacaccacaagacaggtattaggtgcggttgaagatgaactccgcgccgctggaatcaaagtgaaggagtga

SEQ ID NO: 170321 - DNA, 153 bp, Enterobacter cloacae
atgagtggaatgataagcggcttagcagctggcatgtgtattggctcagcagtggctgcaatcctttgggatgaacagtggaatctacggacgtttatcaaatatcaggtagcggctattgggattattactgccatatacattctgaggtga

SEQ ID NO: 170322 - DNA, 450 bp, Enterobacter cloacae
atgcaaatcgagatgatcaagaccgcagggggagtattcgttccggcgtttgagtatgacctcccccgccttaccaagtttcaaaacggcgagatgtacacagccgaattcaagttaacccgcaatccagcattccatcgaaaaatgttcgcgttcttcaacttctgctttcagcactgggctgctgacagggctgggcttgagcatgccgacgaaactactcagtttaaccggttcagaaaagacctgacgatactggctggcttctacgacatggtgacgaacattcgcggagaggttagggcagaggctaaaagcctgtcatacggcagcatggaggcagatgaattcgagcgttgctacagcgcgatgattaacgcagctataaagcatgtgtttggcaagacgaaagaccagaacgtgctgaatcagctctattcatttttctga

SEQ ID NO: 170323 - DNA, 240 bp, Enterobacter cloacae
atgagtacagcagacgatgattatcgtgaaagactcgaagacctgttcgacgacatggaaagcgatggtgtggatgccacaagaatgctcatgagtgcagtagccagccacgttgaaggtgcgctggaatctgaaggtggcgacgcatatatgtatcaattcgaagacatgaacttaatcatcattatccagccgcctgatgacgtgccggaactaacaacatcagaaaggatgcattga

SEQ ID NO: 170324 - DNA, 183 bp, Enterobacter cloacae
atgcttagcaaatcagaagctcaatcctacgagcagcagagcatacgcagaacgttgtgcgcaggctgcacgaaggagctatcagatggcgaggttcattgctgtgaagactgcgcctcactggcaatagcatatcgcgaccctaacggatttatgacggaggaagatgatgatattcagtag

SEQ ID NO: 170325 - DNA, 144 bp, Enterobacter cloacae
atgaacagagcattcgaatgctatatgcgactcaagcatggcgaccgctatgacctgaccagggatactgatgggctctattgccgtgaagtggtcaagcgcatgtttgaaatctggtgtcactgcaagggagaaaaccaatga

SEQ ID NO: 170326 - DNA, 489 bp, Enterobacter cloacae
atggatagtgcgctcagaaataaaatagctggcgcaattggtgctggcgcaatcgctattgccaccgcgatgctttccggtaagggaggtcttgagggtagggaatacgttgcctacaaagatgtcgttggcgttctcactgtttgtgatggacacactggcaaagacatcatccccggcaagcgatacacagacaaagaatgcgacaacctgctgaaggccgatctgcgaaaggtggcaaatgctatcgacccgctgatcaaggttcgtatccctgagcctacccgtgcagcgctttactcctttacctacaacgttggctctggtgcttttgccagctcgacgctgctgaagaagcttaactccggtgatgttccgggtgcatgcaaagaactgcagcgctggacgtatgccggtggtaagcagtggaaggggctgatcacccgtcgtgagattgagcgtgaagtatgcgagtggggccagaaatga

SEQ ID NO: 170327 - DNA, 789 bp, Enterobacter cloacae
atgagcaaagagctttccggcgctgctggcgatgtcctgcatgcgcttttcttccgtggcgcgctggtggatggcgatttgccatcaaagtctggcgctgccgaattgcgtgaactgggttatgtggtgacgcaagatacggtaacgccgttcgctggtgagcattatttcaactttctcacacctgcagggcaagagttcgcaatcagttacctggtggaaagtcgcttcggcaagaaagcggattttcagattggagcgggggagacgttcattaataacaccactctacaaggcaatatccacttaactgccgccagcgaccaatgcttgatggaaccactatcagaggctgcatgcgaaagaattagagcgttgaacaacactcatttagagggtttcaatgtcggtatcaatccgttatcacattcgatcaagctctctgatgagatgcgagaagctgttattgcagccgttcgtgaaagcggtcagttcgttgagaaaccaactggcgacgagcagcagtcggtggagttcagggctgaccgtttcaaagtgacggatggagttagtgaaagcagtgagcccacccacagggagcaagtccagcagggggctaacgccattattgaagcggcgaaagcatcacttgccagccaatacgcggcgatggcgcaactggcatctactcaggctgctattacggaaagcattaaccaagtggtgaatgatgccattgctaatgcactcagacctggtggtgctattcacaatatgttgcatcgctga

SEQ ID NO: 170328 - DNA, 441 bp, Enterobacter cloacae
atgctgacgtttttcatcaaacgcccgcgtttcgcgatggtgattgcgctggtcatcaccctgctgggggccattgcgctgaggattatcccggtggagcagtacccgcagatcgcgccgccggtggtgaacgtctctgccagctggcccggtgccagctccgctgacgtggcggaggccatcgccacgccgctggagacgcagctgaacggcgtggaccatatgctttacatggagtccaccagttcggacgaaggcacttacagcctgaacattacctttgcggcgggcaccgatccggatctcgcggccatcgacgtgcaaaaccgcgtggcgcaggccgtggcgcagctgccgaccgaggcgcagcaaaacggcgtgcaggtgcgcaagcgggccaccaacctgatgatggggggtaagtctttactcaccgaataa

SEQ ID NO: 170329 - DNA, 186 bp, Enterobacter cloacae
atgttgtttggcgagcgtcacgctggcggcagcaccgccaaaacgggaggactgtcgaaagcgcacttctacaaacacaatgacctgaccgtctttcatgatcaggtcaatttcgccaccacgcccgcggacgttggcggcgataaaacgcagtcctttgccttcaagccagcgacgcgcctttaa

SEQ ID NO: 170330 - DNA, 720 bp, Enterobacter cloacae
atgttgctgaatgatattattatgaaattaccttatgatttaaccgagagagagtttaaattactgcagaaggaagctgaagataaatatgattcgaaaatatcaagacatatgcttcgtcgatcgctgactgtaatatctaattatctggaaaactataaccggatattcgctctgcgcgctgacctgaggtttgctcagtcccatgtgccaggagagccggacttgccgatatgctttcagaaggatgatgagaaagccattactcgggctatggaatcccttaaaagccagttaagggaagaacacaagcgttctggcaggcctggtgagcctgtgccactcggctatatctgggccagggaacgggttaccggggaacatcctcactaccatctggttctgctgtttgacagagaggcctatgcctatctgggagattatacaaagcctgacgctgataatatggggacccggatacagaaagcctggtgcagcgccattggtcttgattatcctgaatatgcttatctcccgcattttccgaagaatcacagcgcgtggttcactcgggatgatgcgttaacgttaagtgctgattattatgactttctgctacgggtagcctatctggccaaagactacagtaaagacttccatgacggttatcgcaactttggcacaagccagctaatacagcgatccttgagcgacaaatag

SEQ ID NO: 170331 - DNA, 1188 bp, Enterobacter cloacae
  misc_feature (86)..(95): n is a, c, g, or t
  misc_feature (1151)..(1160): n is a, c, g, or t
atgcacacttttgccagtctgatgtacgatgtttatcggtcttttggcttattcagtaaagggaacaggcgggctgctatacgggnnnnnnnnnncttttccagccatcagcgctttttcggtaatcgtgaggatgaaagacatcaggaacagaaacactatgatgaaatcatcggggttcttgatgcagaacaggtgttcagcacaactcaacgaagggagattttttacaaatacgagcaactttataatgccctgatggctcgccccgtctttactgaactgagccgggaacaaataaaaaagcgatatgctctgcatataatccccagattaatcgcacttgacatatataaaacgtacaaagacgaaaacaaaaactgtttttatcaccatatacaccagttcttgctgaaagattattgcccatgctggcaggataaaaagaaagggggtttatctgctgtccagaagtatctgaaaagtttagcaagaaaacaaaagttctctcatacagattcagaaaacctggcgcctcttttcaaagtaattgaaaatatccgcccaggtaatacacagaaaaaaagcacgctggaagcatcaattatagactgcattaaggcgtattctggcattgttgacgatgatacgcttaacagcgtcagagtcagtcttgataatataaaaaaagcccattactccctgaccgcactccttaatgtcgaacgaaaactccctgtcattaacatcatatcacggtactacagaaactatgtagacaagggaataaaacccggaaatatatcagcaatgttatgcagactactgtatgagccagaaccccatgattttatccatcatgataccatgattaactcaattgcggattattatcatgagagagtaataaaaccgttctccctgaatataaacgaggaatgtttacagagtatcagcgcattaaaaaacatcattttcaacttcaatgataaaaccattatctccgaagcacagttaactgacatcgctgtaaaattaaaaaaagaatcccataaacagtttattcaaccgtattttgaactctggaagcttatagatttaatcagtaaaggggaaacagaggaagcctatgagaaagtcaaaattattcnnnnnnnnnnattattcctctggatgatttacctgtag

SEQ ID NO: 170332 - DNA, 498 bp, Enterobacter cloacae
atgaaaagcatccatctttctgaatccattttatcagatgccaacaatctgaccatcatgcgttcggtaaggatgtataataacatggtcaggagaataagtgactggaatgaccttgagctggaaggtatttatcctgagtctgtttacgggcttcttgataaagttgacactatcctgggtaagatactcaacattatctttgttgaaaaaattacttcctgccaggatttagctttcattctgaaaaataaaaaagttctggctcgaggtgaactgaatgatagccttatcggcatactgattaactgtcctcttttggcgtgcgtacgggacctggagagcttaacaaaatatcttcgctgtccgggagaggaaataaaaaatataattctttcagttgacaaaaaaaactggaatttgacatatggagccctgaagattctggaggaagaaagaaagatacaggcggggaaaacacagggaggtggaaaataa

SEQ ID NO: 170333 - DNA, 3039 bp, Enterobacter cloacae
atgagcatgaagattcagttcgatgccaatctggattatcagcgtgatgcgattgagtcagtaacgggcgtattcgccggccaggaaatctgccagaccaactttacggtagcaccgctgcattcctgggaagaaggctcgctgtttcatggtattcaggaagataccctgggtattggtaaccgcctacgcctgctggatgaagacatccatgccaatatccgcaaaatacagctgaaaaatggcctcgcgccgtcagagtcatttgactcgaaatacggcattcacttaaccgtggaaatggaaaccggaacgggtaaaacctatgtttacctgcgtacagttttcgaaatgaaccggctctatggctttaccaagtttattatcgtggtgccgtccatcgccattaaagaaggagtgcagaagtcactggaaattacggcgactcattttaaagagctgtacgaaaacgttgccttcgactatttcacctacgattccagtaagctgtcggatgtgcgtaactttgcgaccagccctgacattcagatcatggtcatcaatatcgatgccttccggaaaagctttagcgacccggagcaagagaacaaagccaacatcattcaccgggcacacgaccggatgaccggtgccaagccgatcgaatttatccagcaaaccaacccaattgtgattgtcgatgagccgcagagtgttgacaccacagataagagtaaagaggccatcgcctcgcttaatcccatgtgtacactgcgttattcagctacccatgtggaaaagcaccatatgctctacaagcttgattcagttgatgcctacgagcaaaaactggttaagcagattgaagtggcaggcattgaggttaaggacggccacaataaggcctttatcaagctggtcagtgtgaacaataaaaaaagcccgatcagtgccaaaatcgaaattgatgctcgcctgaagaatggcagcattaagcgcaaggaagtcacggtgaccagcggagcggatttgctggatgccaggtacagcggtggccgcgatgtatatgacggctacattattgatgacatctactgcgaacagggcaatgaatacatcagctttaccagtaagcccgatattctgaaactgggtcaggccttgggagaagttgatccggatgaatttaaacgcctgcagatccgcaaaaccattgaagagcatctcgataaagaaatgcgcctgcgcccacagggcattaaggtgctgagcctgttttttatcgacaaggtcgccaactaccgctggtatgacgaagacggtaacccgcaaaagggtaagttcgccctgatgtttgaggaagaatacgatcgcgccattcgcaaacccaagtacagccagttatttgaaggtgccgatctggatacagctgcacaaggcgtgcataacggttattttgcgatcgataagaaaaaagattcgtcaggcaaggaaatgctcaaagaatctaaaattggaaaagatggcaaggcggcaagcagcgaatctgatggcagtgcttacaacaccattatgaaagacaaggaatggttgttgagttttgattgcaaactgaaattcattttttcccattcagcgctcaaggaaggctgggacaaccccaacgtgttccagatttgcaccctgaacgaaaccacatcggtcattaaaaaacgtcaggagatcggtcgtggcttgcgcatttgtgtgaatcaggatggcgagcgggtgcatggctttgcggtgaataccctcactgtgatggctaatgaatcctacgagcaatttgcagagcaattgcagaaggaaatagaaaacgaggaaggcatcaagtttggcgtggtcgagaagcacctgtttgccaatatcgtggtaccggttgacgaccacaatcacgaatacttaggtgccgaggcgtcgaagcagttgtgggaacacttgcagagcgaaggccacattgacagcaagggtaaagtgcaggatagcctcaaggcgtcattgaagaacggtactctggcgttgcctgaggcattccagccccatgcagcacagattgtgtcggtactgaaaaaagtatccggtaacctgaacatcaagaaccgtgatgacaaagccaaggtttccttgaacaaagcggtctatctgagtcccgagttccaggctctgtgggatcgtattaaatacaaaaccacgttccgtgtggactttgataccaacgcgctgatcgaaaagtgcgccgaagagatcaaagttaaccttcaggtgggcaaggctcgtttcacttaccgcaaggcgaagactgaaatagaccgtagtggagtgcatacacaacaggttcaggaaacaaccagtgtgtacgaatcccgcgcgttcgatttgcccgatttgatcacttatttacagaatgaaaccaacctgacgcgtcgcaccatagttgccattatcaacaaaagtggccgcctggaatcattcaagaacaacccgcagaagtttattgagcagtctgccaacattatcaaaagtcagatgcgcctgtttattgtcgacggcatcaagtaccaaaagattggtgatgatcagttctatgctcaggagttattccaacagaacgagttgttcggctacttgaaagacaacatggttaaagccgagaagtccgtcttcgaccacgtggtttacgactctgatatcgaattggagttcgcctcggccttcgagcgaaacgaggatatcaaactttacgccaaactccctggttggttcaaaatcgataccccattaggcggttacaaccccgactgggcggtgctgatcgaaaaggacggaaaagaaaagctctatttcgttgtcgaaaccaaaagcacgctcttctcggtggaacgacgtccggaggaaaatgccaaaataaaatgtggttatgcacattttgaagcactgggtgatgaggtgaagtttacggtatctaattcgatggacgagttttcaagcaggtatgcgtga

SEQ ID NO: 170334 - DNA, 1941 bp, Enterobacter cloacae
gtgaaaaacgtcataccagaaatggattcacagagcatggacatcgtcgctgataatatcagtaaactcaaagagctgtttccagaagcctttatcgaaggcaaagtcgacttcgatgccctgaaagaagtgctcggtgactatgtcgatggtcgcgaagaacgctacagcttcacctggaatggcaaaagcaaagcccgcatgctggcacaaacaccaagcgctggaaccttacgtccctgtaaagaagaatccgttgattgggataatactcaaaatctctttatcgaaggcgataacctcgaagtactcaagctactgcaaaagagctatcacaaaaaagtcaaaatgatctatatcgatccgccctacaacacaggcaaggattttgtttataaagataactttaaagacaatatcaaaaactacaaagagatcactggtcaggtggatggtgaggggcgaaacttatctaacaatccggagacgagtgggcgctatcacactgactggctgaacatgatgtacccacgcctgaaacttgctcgtaatctactaaaggatgatggggttatttttatcagtattgacgacaatgagtttgccaatataaggaaaattgccgatgagatttttggcgaagaaaactttatcgctagcattgtatggcaaggcggccggaaaaatgactcccgtagattctctgtagtacatgactatattttggtttatgttaaaaatgaaaattatctatcagcgagagaagtcaaatggcgagagaggaaagaaggactcgatcaggtatatgaaaagcataaagctctgctaaaaaagcacggctccaattacgacgaagcatctaaggaactaaaagagtggttcaatgatttgggtgaaaatgatccttccaaggaacattcacattattcaaaaatggatgaaggcggcgtttattatggcgacaatatcagtagtccgaattatagagagaacctgatatttgaatacaaaggttataagccaccaaaaaacggttggaggtataaccaagaggcaatggctcgtctagatcgggaaggacttttgatatttccatcctcaaaagagagccgaattcagtacaaaagatatttgcatcacacggagacatgggcgcctagcacttttctatataaagacagacgagctgcatcgaagagtttgtctgcactaatgggtggtgagtttttcgactttccaaaagacatttccgttcttgctcgtctgattgacactttcacaggggagagtgatttggttcttgatttctttgctggatcttcagcttttgcgcatgcatgcattgaattgaatgtaaggagaagtaaagcgaatcgatttgtaatggttcaactcccggaaattactgacgaaaaatcagaggcattcaaagctggttataaaaccatctcggatatcagcaaagaacgcattcgccgagcggcgtgtcaaattaaagatgaaaacccagattatcagggtgaccttggctttaaagtcttcaaacttgattccaccaatatcaaaccttgggagctggatttcgatcttacggagcaggatctggaagatcagatatccaatattaaacatggtcgtaaagaagaggatgtgctctacgaggtgctgctgaagtacggtctggatctgaccttgccaattgccgagcacagtgtggctggccataaggtgtttgatatcggtatgggcgcgctcgtgatttgcctgtcggatgatattaccctcgatgtggtggaagggattgtcaagctcaaagacgaactcaacccagaaattatacgggtggttttcaaagacgccgggtttgccgacgacgtggtaaaaaccaacgcggtacagattctcaagcaggccggaattgaagacgtaaggagcctgtaa

SEQ ID NO: 170335 - DNA, 855 bp, Enterobacter cloacae
atgtctgatatgaggttaggcttgccacaattcgaagcctttctggaaggcttgaacgtgcccaatagctgtgtgctcaataagcccctgttcaaaaagatgtttcaggagcacgccgacctggacgctaaagacaaaaaggctctgaaggacgatgttgataaaatccgttggctctacaccctaaagcccagcaccatcaatatcgcgccttttagtgacgacctgcgcgactatggtgagctggcctttctgcacgtggaattaagcaataccaaaagcgcagaacgaattggtcagctgatcaacagggcgataccttacccattagtaattttctttgtgcacgctgaaaacaaaggcacagagggcactggcgattcggattcaaacgtacgcgaaaaacaacacgacaaagaacaactggctatctgcctggcggacaagcgcataaacagagcggatcaagcaaagtgggtcattgaagagttacagctatcaccttggctagggttgggctgcaagactcaaagtgaacaagcgttttttaacagcctgaactttaccagcttgccgcacagtaatttctggcagttctaccaagcctttatgtaccgtgtacaagcgcttcagtgtgctgaagtcagtgggcgcttttgtttggtggatggtttagtgaatggcgaagctgcagagcagcagcggcaacaattgcaacattaccgtcaaatcgagcaggacattaaaaaactacgcgcccagataaaacaggccgagttcagccagcaggttgtgttgaatacccagattaaacagcaggaacagcggctcaggcagatcgctaatacgctttaa

SEQ ID NO: 170336 - DNA, 3267 bp, Enterobacter cloacae
gtgttactggataacaaaactagcggtcatgttggtatcgaactgaaaaaacataccttttctggttccaagctctctgttctgtccagcctgtttaccttatatggctttgcctcgctgaagcacgagttgaagcagctggagtctgcaaggattattttcagcgaatgggattcgaccaatctgcagaacctggttggttctgattcagacgttcgcctgctgaatcagctgcaacaaaaacgcatcgccagtgagttttcgcaatggctggcaaacaaggctgaagtgaaagccagtgtaagacctcagccggggcagaatattattcatcttggggctaccgagcaaagttttgccatcagcggcagtgccacgctcagtccaactgggctcggcgacgtgcgctgcgactccctgcacatgaacataggcttgtctgaccttgagagcacccggcagcttttgacgtggtttgataatgtctgggctgatgcacagaatcttcgtgacataaagaatgatctgattgccaaattggatgcaatcgccgtcgatcaatcggccaattttatctatttcctcacgttatttcatttgttcaaagacttcctcgaagacatcgacgaagacaacatcatccgcagtaaaaccggctttaaagataccctagtctggagcaaactctacaaattccagaaagacggagtgctgggtgcaatagataagctcgaaaagcacaacggttgcatcattgccgatagcgtgggtttgggtaaaacctttgaagccttggctgtgatcaaatactacgaactgcgtaacgatcgggtgcttgttctatgcccgaaaaagcttcgtgacaactggaccatgtacacggtcaacgataagcgcaacctgctcgcaactgaccgctttaattacgacgtactgaaccataccgatctgactcgaccgaaaggctactcgggcgaaatcaatctggagacagtgaactgggccaattacgacctggtggtcatcgacgaatcccacaacttccgtaatacaccgagcaaggcggaaggtaaaagccgctatgagcacctgatgaacgacattatccgctcaggcgtaaaaaccaaggtgctgatgttgtcggcaacgccggtcaacaaccgcatgaacgatctgaaaaatcaggtcgccttcattactgaaggtcgggacgatgcctttgccgaacagggtattaaaaatattgaatccactctgcggcttgcccagaagcaatttaacaaatgggtcagtgagccggtcgaaaagcgtaccaccgcagccttgctcgacattatgagctttgactacttcaaactgctcgatatcgttaccattgcccgttcccgcaaacacatagaaaagtactacggcaccgaagatatcggccgcttcccaactcgcttgccaccgaaaaacatctatgccgacattgacgcatccggcgagtttccgccgttaaaagaggtcaacaaaaccatccggcggctatccctagcgggttattctccgctgaaattcgtgcgcgaagctaaaaaagccgaatacgcccgtcgttacgataaagccgtaggcgcaggtaaaggcgtgttcaaacaggtagaccgtgaagaaagcctgattcacctcatgcgcgtcaatttactcaagcgaatggaaagctcaattcattcgttcacgcttacggccacaaagcttgctcagcaagtcgaccgactactggccaaaattgatgcccacgaatcagaagaactgtccgagctgaatatcgaagatatccacgactttgagctggagtccacggagctggaaagttacatggtgggcaacaaaaccaaagtgttgctgcaggatatggatctcatccgctttaggcaggaactggaggccgaccgtgagtttttaagccacattgccaaaacagcacaaagtgtgaacgcaggccgtgatgcaaagctagagctgcttaaaaaaaccattgccagcaaggtggctaatccgctaaatcctggcaataaaaaggtgatcgtctttaccgcgttcgccgacacggctcaatacctgtatgtccatctggcgcaatgggcgcattccgaactgggcattcacagtgcattggtgacgggcggcggtaccaataaaaccaccatgacgggcttaggttctgacctcaacaatattctgaccgccttctctccggtatccaaagagcgcggcaaagtagacccaaccgctactaccgaactggatttactgatagccaccgactgcatcagtgagggtcagaacctgcaggattgcgatacgctcatcaactacgacattcactggaatccggtacgtatcattcagcgttttggccgtatcgaccgtcttggcagtaaaaacacgcaaatccagctcatcaacttctggcccaacatggagctggatgaatacatcaatctggaagcgcgtgtctcggggcgtatggtgttgctggatatatctgcaactggcgaagagaacgtcatcgatgaaaacgccaaagacatgaatgaccttgaatatcggcgcagacaactacagcaactcaaagacgcagtagtcgatctggaggacatgagcggcggtgtatccattaccgaccttaccctcaatgacttccgcatggatctgtcaggctacatgaacgataaggcccgtctcgcaacgctggagcaaacaccgctaggcctgtatgccgccgtcagcattgacgaagatatggtcgccgatggcatcaaacccggcgtcatcttctgcctgaagaatatccgcagcggtaaagaagcggttcaggtagatgataattacccgctggcaccttacttcctgatctacgtgaccgctgatgccgaaggcagcactgtagttgagctgaacttcacccaaagtaaaaagatactcgatctgctcaagcgtgaagcctttaagcacaaagtgcccgatcaacccgccatcaccgaagttaaccgcatgacacgccacgggtgtgatatgagccactttcagcacctattagctgtcgctgtagatagcattgccgggaagagcgaagaaaaaggcattgaaagcctgtttgccaaaggcggtactgtacttaccgccacctccagtcagggcattgaagactttatggtggtgtcctacctgatattgacagccgttactcagggaacagaaggtcaaggagagcgtgatgtctga

SEQ ID NO: 170337 - DNA, 180 bp, Enterobacter cloacae
atgagtgtgcaaataatgaccgtcaaggatgtcgcgtcgtacctcaagctcaacgagcgagctgtttaccgtatggtaatgtcagtgaaaatacctgccttcaaagtgggcacatcctggcgtttcaagcgtgaagacatcgaaaagtggatagaagaacaaaagaatgacagacaataa

SEQ ID NO: 170338 - DNA, 378 bp, Enterobacter cloacae
atgtctcgtaaagacgttctgtacacgccttataatggcgccgtactgctggaaaatccgttattaaataaaggcctcgcctttattaaggaagagcgggataattttaatctgcatggattattgccgcataacgttgaaaccattgaggagcaaacggagcgtgcctgggtgcagttctgccattttaaaagcgatatttcccgccatgtttatttgcgcaatattcaggacaccaatgaaaccctcttttacaacctcttgcgttcgcatctgaaagagacgttaccgattatctataccccgacggtgggtgaagcctgcgagcatttctccacgatttatcgccgcgcgcggcttgtttatttcatggcctaa

SEQ ID NO: 170339 - DNA, 267 bp, Enterobacter cloacae
atgaccagaaaattagcagtgttgggcgacaggacaagcaacggaaaaatcattaccgcaactgcaaattacttcagtgagggtaaacaggtggcgcaaaataatgataaagccatctgtactatctgtaaggggacattccccatccaggccactgccgccggtatcctcagtaatggcatgcttctggtacaggatcaggaccgtgtgctttgccagtgttccggccataaggtgatagcaggctctaattttttcaccagctga

SEQ ID NO: 170340 - DNA, 2763 bp, Enterobacter cloacae
atggcatgtcagggattatgcacagtgaaaggcctgacggtactgcccgtacgctatgccgttgtgccggaaaaaattattaccgctttaccgggatgggcgaacgatccgtgcattaccggtatagcccttggcaatcacgaaaagtacagcctccgtgcgcttcgtcagggttacctgtacgttttctatgaaaaaggaaaacagggcacccattactggcagtgctacagcgttgcgccggacggctcactgtggctgcagcaggtggcgtctaatccagctccggtggataaggcgctgtgtgaaacaggggagcatattgcgcaaaacgttgagtttatgagcattgaatcaccggataagtgcggcaatgtgtggtttgcgttcagccagtatccgtgggaacaggagacgcttgaacggtatcgctcagatgccaatgcccgcagtgagagaatgcagaaagtggtaccctcagcgtcgggggcccagcgcaccagaacaggaactgatgtctccgaagcaagcctgaatcaggtgctggactatcaggtgccttctgtttcgggtctgctgcccggtccggatgatgcgaaaattgtaaatgtcagccgggtatcgtcgctctgggatccgacggtggatgatccctggcgggtcaataatgatgcggtgaaaatgcagtccagcctgtatccctgggcaaaaaaacgcagcggcagggccgccgcgacggttacggccatgcaaaaccgaagtgaggggatgacgccgctgctgcttccactatgggatccggtgggaattgttcatgagctaaacgggtggagccaggatgtgctcgggcgtcaggcgcagtttctgcaggagcgggagcttgagttcgccacaaaaaccagtcttgatgcattaaaaacgatgctggctgacaaagcgcaggcgcgtggtgaggaggtgttggagcgatttgctcagcccaaaaacgcgatgttgtcggataaatatctggatgcccgtctgaaaacgctggagcaacgttttcagggcaagccagacgtactggcgcaaataagagctgacgacaggctggtcagggcgtggcatgcacaaaatgtgacagtctcttacccggaaaatgttttgctggatccgccggagccgctggcgcttcaccagcagaaggtcgcagccattaaagcgcaggtggataaggagctggcggaacgtccacagaacttcactgatgcccgtgccagaagctgggcaccctatcagaaaaagctcaacacagcccgacaggagaattttgatacctgctacatgagcctgattgacacggttaacgctatcttccagaagcgtatcgtcagcgtggtgaactggctcagtgcgccgctgctgctggcagtgctggatgatttccactgtgaggcgcagcgggcagggctgttctaccagtcagcggtggggatggcgatgcacgggattaacagctgtccggcaggtgccgcaaagatagacggctggtggaagacgtacagcgctaaaaaccgtgagaacctgctgtggcggcacgtggcggccaataacccgctgttaatcagcgagctggagccgtatctggcagcggtgaaaacgaagaaagacgaagacgtgactccgctgacggcgaccgccatgacggccaccctgatgcagcaggtcggcaacatgaaaaaactggaggggtactaccagaaatcgctgtccacggtggtgaaggggctgcgggaaaatgccagcaaactggaagtacagctcttcagtacggatgcgtttatcatcacggtgggagacagggtaagccgtattctgcgggtggataaggcaggcgagaagctggcgaccacggcgttcaggctgatatttatgataagagcggggataccgtcagagaccgtccacacgttagtgaatgagtacctccgggatgccccggcgttacgccagacggtgctggcaggtatccgcagcagcgggcgctttatggcaaaccggaatgaagtcaccgtgattaaacagacgctgagcagcaggctggaagagcactttgcaacagaaaagggcaggggcgaataccggctggcagggataaacagcctgttgctggtgctgaatgcgcttgattttatctacctgttcggacaggtcagggatgagaagaagccgctggcgagcctgctggccagcggtctggcgatggtgagccaggggacgacggttattttaccggcaatagaaaaagggctggaggccggtaagcttacggtgtcatgggtcaagggagttggggcagcagcggctgggggggcttcggcgatttcggtgtttactgatggtgcttcagcagtagatgaatttaagaataaacgtttttgcctgatgggtgtgatggtgttgaaaacttttgtagatggactggctgtcacaaaatcagttggtcttctgctggaacagtttagtagaccgatggctaaaaaagtagccggaaaaataacaggttttttggcctgggagtttttagggatccgaatacttgcagtactgatgacctgggaagccatggtggcggtaacgttgttacaggtggtggtgacctggatttctgacgacgagcttcagatatggtgtaagaaatgcgtatttggcacagcatctttcaaccgcagtgtggcagaccagaataaagccctggaagcagcaataaaggatatctcatga

SEQ ID NO: 170341 - DNA, 1245 bp, Enterobacter cloacae
ttgaaaaaactggaggggtactaccagaaatcgctgtccacggtggtgaaggggctgcgggaaaatgccagcaaactggaagtgcagctcttcagtacggatgcgtttatcatcacggtgggagacagggtaagccgtattctgcgggtggataaggcaggcgagaagctggcaaccacggcgttcaggctgatatttatgataagagcggggataccgtcagagaccgtccacacgttagtgaatgagtacctccgggatgccccggcgttacgccaggcggtgctggaaggtatccgccacagcgaacgctttatggcaaaccggaatgaagtcaccgcgaatagacagaggatgagcagcaggctcgaagagtactttgcaacagaaaagggcaggggtgaataccggctggcagggataaacagcctgttgctggtgctgaatgcgctcgattttatctacctgtgcggacaggtcagggatgagaagaagccgctggcgagcctgctggccagcggtctggcgatggtgagccaggggacgacggttattttaccggcaatagaaaaagggctggaggccggtaagcttacggtgtcatgggtcaagggagttggggcggcagcgggaggggcagcttcgatgttttcggtgtttgctgatggtgcaagcacttacgaagagtggcataacaatcgttttgtacttttctctttactgattattaaagcaacggttgatgtcctggttgtcacaaaatcagtcggtcttctgctggaggctataagttctgttttagaagttaaaagtaaagagaaagcatcaaaaataatcggattaggtggtaaatatatagccgacaaactggtaaacgcgataataatatttatttgcatgtttatgtttatgcttcatgatgttttaaattatagggggatttctgattattgggaggtatatcaatattccttgtgtgtgctattcgctatatcattagttctctctgggttgattgcttattttgcatataaggcacatgcaaataattgttgcaagttggctgaggaaatatttcagttgctgggggtgaagaatgttgcagtggtcaatttgaataaaataacaaaaaagcgtgagcaacatctgaaaaataaaggagggctcagctcggatgatgtaagtaaaatagcttgccccagttctaagtttatttattcaggggagtggtggttttactattaa

SEQ ID NO: 170342 - DNA, 897 bp, Enterobacter cloacae
atggacggtgactcttttaacgacataaaagaaaaaatcacaagtgctgcttttggaaaaaatggaaattgttttctactaatagatgcatcattaaaagagtatcaaacagaatcttttttgtccgataccctaagagattataaatcatactctataatattccagcacaaagagattcaaggcgctttaccactttacctctttcctcttggtaagttaagcgaaaaagatgaccgattattttataatagtattcgacattcattgagtgagttaaaaaaagagaaacttgaggccggggaggggcgcagtgtttgtgcgtggatctcgacgaatttagcaggggagcaacttgctgaacaaatagctttgaccgccgtacagtcaactcaaacattcggtaatatattaattcgttatttcgacccttcggtatttggtctattgatacctgccctcgataaatggcaaaaggaacagctattaagcaatatcaatacgtggtcatacattaatggagacggagtggttcatacaatgaatggcaatggtgaatgcagaaaaaaattaaaccactcacttgggttaacagatataaatgtgtcggaaattaatcttatattagttatcaataagatcttgcgtatatatcgaaatacgaccgctgtccataaacttagtgaatgtgaggcggcgaaattattgcgtactgcactgttctattattattcatcgttctccccatccgaaagcgatgttattgaatttgggcttgatgtgttgaacgcagagagattgttttatcatgatggggtgttttttaaatatatgcttaacagacgtggaaaagaatatgaggcatataaagacattaaagtaaaattgatgatctaa

SEQ ID NO: 170343 - DNA, 1107 bp, Enterobacter cloacae
ttgtctttattatttattttgttggctatggcagcatgttggtgcggaggaagaattatttctcctgttgaaggtggcgagtttttaagattatctgcacttgtgtttttgtggggcatgtttgtctttttttttattgtttcagtacgcatgtattactatggtttatgtttgtcagtaatcgaagtaagagagcatgaagcagaattaaccaggaaaaactggagtgaatgggccaatagaaagttttatgtttccgcttatgatttattccttccctctgtagtagcacaggccgatatagcatcgttacattctgctgaaatatataaagatcagaaattaaaattgcgtggtcataatgacacaatgtacactgaagaacagttgatctatgagttattgtcatcagtcagagcaaggctgttagggttaaaaaagttctgtgtctttgatgtcatatttacatatggcaatagttttattactttctcgacatttaaagaatgttgggcggcaattggttttaatgaggattgtttgggaggtttttatgattggaataatgaattagagcatgaatttgacatattatcggatatcgcactgaatcgagtgtcaataatcatatctgtaaacgttgagggtgttgaggggtattgtcctgactcatcagaatttgcctcgatttttttagtgtcccaccagcagcaaataccagtaaaagaaagtaattgtgtggctttgcgaacgatgacatgcaacaaaaaccataccgaacaagatttcctaaatatggtaacttaccagcaagatgtccttaaaacaacaaaagtagtttttggcaacatgagggcagaggatgctttgcatcttttagatatatttagatcttcatctttatctatgaatgtggaatggagttataaggtggaatatttaaatttgatgctcggtaagttaggtgatgcccatttgtggttggcgtttgttttatcgctaaaaatttcagaaaaaaacaatgagccggttttgatggtcacgagcgttggtgatgactatgtctttaatgttatcaaacagtttgataataacaaggagcgttaa

SEQ ID NO: 170344 - DNA, 1206 bp, Enterobacter cloacae
gtgagtcatcatttgctggaccaaatgacgaaatgcttgaaagaagcccgaaagaaacatgaagacctcaacaaaaaagatgcgattgagtttaacgtctttcggtatatcactcctgacgaaaatggtctttcacgcatcattgcggatttgctaaacgtgcatgatgttcatggtcagcaaagcctctttctaagtagctttctggaaatgattggaagaggggcgtgggatgcaacctcttgcaggtttgtacagtgtgagcagaaaaccgatgccctgggcactaaacgtcgaattgatatcgttgtacagggggagcgatggactttagggatagagaacaaacccagtgcagccgatcaacctaaccaagttttggactatctccacgagctaaggaagcgccgcagcgtactgaacgaaacgctgctgatttacctgactcctgaagggagcaggccaagcctgattagtatcgatgagcaccaatgtgatgcagctcttcagtccggcgaacttgtcctcttgtcttatcaaagcatcgttacgtggcttgatgggttatgcaaaaatgatgcgataccttatcgtgtgcgagtatttttattcgatttgcagcgttttatttcggcgaatgtgctgaattgtagagaggggaaagttgtggatgtgttgttagacaagatctttaatgacgaatcaacgctggatacgacgttaagcttattgagcctgcaaaataacatttatcaaaccctgactaaaaaagcgactgcagatttgataccaccggcaggttgggaagtatgtcgaaaattatatccagattacgggattgggttgcggccaccagaggccattggctggcactattgcatcgaaccagcaaaaggaagttatcaggattggagttacggtattaagcttgataacgcgttgaccactactgaatcggccttgctggctgcgcaacaactcaaaatagatttccctacaggggcaaaatccagtgattggtggccttggtggcgaagctttaatgggtatctgccgcatgaccttgatcccactgaatacagggattggctcacgagtaatcgtgcctggcttgatatgaacaatggtgagttttcgaggcgctgtgtcgatttgtttattcggctacataagtcggtgagcagcggaagtagttctaacatgtaa

SEQ ID NO: 170345 - DNA, 642 bp, Enterobacter cloacae
atgttttgtccagtgtccataggcattacccacaggttttgctttcttggtttctgtccaaatctgagtatctttagatttaccaccaatcggaacagccccaatcccaagaccagcagttccaggaagcggcttaccatcttcgtcaaacaacaccccaggcctggcaatgttgtagacttttgggaggcggtcgccgtgctctttctcaagctcttcctcatcatggccaggactcagcgtgttattctcaacctccaccttcgccgtttccgacgccgtcgccgccatggagacactgccatccgtcactgctgcgcccgccagaccacctgcgatactcacgaggctactgaccagccgtttctcctctgccgtcaggtcactggattttttatctccatacagcgcgctgaccagatggtcagtcatcgccgaggccgtaatggcccctatggcaccagccttcaggccatccgcactgctcccgccactcagttgcgtcagcgccgcagccacaataccgtgcagcgcggcacgggctgtcggatctttctgctccttgaccagggtcgccagcagaggggccgcccccgctgccgcacctgccttcaggttaccgccaagcgcacctgccagtaa

SEQ ID NO: 170346 - DNA, 483 bp, Enterobacter cloacae
gtgattgcatccacggcgtctgcagataaaaatagcctcgacaccggtacgctgggtttcagtaatctccataacgagagccagaccagcggcaacggctacacggtggcgctttccggcagcgcgggctgcagcggaaacggtgaaaaccgcaacctggcaccggccatcggtacgggccaggcaaaagagagccacaccggcacgacctcatcagcggtgagtggcggtagcattgtcattcgcaacccggcgggacagaaacaggatattgctgacctgaaccgtgatacggctgacgcccaccacggcgtggacgtgaacggtgatgtgcagaaggtcagggataacctggcggtccagagcgaaggcgcggcgctggccacctctgcgctggatgcttacggcaagtatgcggagcagaaagcgcgggaatccaatgcggtgctgggcgcgaagctggcgtcagaaggaaaactgtag

SEQ ID NO: 170347 - DNA, 525 bp, Enterobacter cloacae
gtgaatagtaacaaacattcaacacaatccctgcacatttccttcactgaaagagatgggtatgtatggaggaaaagacacgctaaacagatgctgtggatagggctttctaccagagacaagaacgttgctcagaaacgagcagctcagttaactgtacgcttcatccaacttaagcctcttggcttgagcaaggatgccatacagacaactatgaaaacctattgtgattcgattgttgatggtgaacttgtagctgagcttttaaatacgggaaattccgtattaacccaaactcaaaattttgagtttgcaccaaacggtgtagttgaacctactgagaatccagtagataagcatctcatttctgacgttctggaagagtgggtagctgacatgaaaacagaatggaaaccacgtacagagaagcttaaccgtaagggtgttgagctgttcattgaatgggctagcaaacgaaacgtaagccatgttgaggacgtgaataaagaagtggtggctgggtga

SEQ ID NO: 170348 - DNA, 516 bp, Enterobacter cloacae
atggaactggataaatcttttgaaattggaagttatcttgcgactatttttagtgcagtaacagcatactacgccattcggcaaactataatccaacgtagaatttcgatcaaaccacagctgataccgagcagaattaatttcacggttaaaaggatggagaagaatggtttcagtagtaatgtcttcggcgatatagatcttacaacatttcacccaagtattatcaactccggcactggcactgcgttgaatgttcaagttgaatgggaatacccctatataaaaaaattaaactggtttaaagaaaacattaacaaaatcgacgcaggtaaaaattttgatttcgaagtctttcgaaagaagacatatactagcgttcaagtatcagctgatgcaacagcagtatcaccaataaaaacaaccagttacatggactttattgccccccccttaacattgaaaaggaaccatacgttactgagtgcccatattttctatttagtcttgctttaa

SEQ ID NO: 170349 - DNA, 258 bp, Enterobacter cloacae
atgctaataaatggtaaattagagcaggagattgatggcccaaccttacatcttaagtatagtgacatagagggcaacaaatactcaacacaatataggagttcattaattgtaaaggaaatttatccttatatgtattggaatggaatgtctggttcattttcgttccaagcagttaataattcactacttagcaatatgcttttaaaaataaaaaaaagctacaacgaatttattaaatcagttgagatttcttaa

SEQ ID NO: 170350 - DNA, 318 bp, Enterobacter cloacae
atgggattcccgagtccgtcagcaaacatgcaagccgcttttgttgtagcaacagagcaatttcttccgccatcagcaagcattgtcgaaacgcaggaaggctatgatgtcattgataaccgagcacaattcaagcgcggagacactttgcttatctggttttgcggccgccagcagcatgcgtactgggccggtgactcgctcataactgatgatggtgaatccatcgaaggcgaggcacttgatgatgttcgtctggttggtgtagttacgcatactattcgcccagtcggttcagacgaaaatcccttcatgtag

SEQ ID NO: 170351 - DNA, 1212 bp, Enterobacter cloacae
atggtgcctaaggggtggtcagaacacacgcttgatgatctagctttagtcgaaagagggaagttttccatacggcctcgaaatgaccctcgttattacggtggggatatgccatttgtgcaaacaggtgatataacttcctcaggcacgtatctcaagaatttttcacagacattgaatgaaattggtattggagttagcaaggtattcccgaagaatacaattctaataaccattgcagccaatatcggggatactgcaataaccacattcgaagtagcctgccctgatagtgttgtagcgatacaaccgtatcaaaatatggccgatgtttactggctgaaaaagtatcttgaaacaagaaaaacagatctcgatgcacaatcgacccaaaatgcacaaaaaaatattaatttacaagtcttaaagccgttgttgatattgacaccaccctatgtggaacaaaagaaaattgcccaaatcttgtccacttgggataaggcaatttcggtgacggaaaagcttctcatcaacagccagcagcagaagaaagccttgatgcagcaattgcttaccgggaaggagcggttgctggatgagaatggggtgaggtttagtggggagtggaaatggcttagggcagtagaactgtttaagactctttcgcaaaagaataattctgaggatgaggagcttctggcagttactcaagacctgggcgtaatacctcgctcaatgttagagcgtagggtcgtaatgcctgatggctcaacgaagggctataagcttgttgttccgggtaattttattattagcttacgatcattccaggggggggtggaatattctcgttatcggggattggtgagccctgcgtatacagttttaaccccaataaaaaaaatggtagatgagttttataagcaatattacaaatcttacgattttattgggcatcttgccgtcgcagttattggaattagagatggaaaacaaatcagctatgaagatttctcttttctgaaacttccttatcctgggattgaagaacaacaaaaaatagccaccgtcctgtccgctgctgacgccgaaatctccacgctggagaaaaaactcgcctgtctaagagatgagaaaaaagccctgatgcaacaattactgaccgggaagcgccgtgtgaaagtagaagctgaagaagctgtgagtgcttaa

SEQ ID NO: 170352 - DNA, 285 bp, Enterobacter cloacae
atgtcaaatactctttttaccccgccaacacctgagcaacgccgcaacattctggcagagtacggaattaagtttgatcgtcgtattcgtgaaaatgaatgttttgaaataaccagtctttcccgttccacccgctggtatatggagaacgaaggtaaattcccgccacgctgccactttggccgtaatagttgcgcatggcttctgtcagatgttctttggtgggttcgcaatccacctgctgttgagaacgtcaataccccttacaaccgtagatctgcgtag

SEQ ID NO: 170353 - DNA, 1557 bp, Enterobacter cloacae
gtgcagcgggtcgccgtccgggtcgcggtcgttggtcagcagttcgccgccaatagcggtgtcttccggcgtggtgacgatttcaccgtcggccaccggcacggtattggtcatcacgacgctcacggcggcggtttcggtgacgccgccgctggtgacggtataggtgaaggtgtcctggccgacgtagcccgcgtttggcgtataaaccagctgcccgttttcaatagcgacggagccgtgcgcgccctgggtcacgccggtaatggcctggtccgggttaacgaagcggtcgttgccgatcgcatcaatcgtcaccggcacgcctgcgtgggtggtggcgctgtcatctttcacgtccgctaccggggtgacggtgatggcgagcgtcgcggtagcggtgccgccgtcgttgccgtcgctgaccgtgtaggttactactggcgccgtgccgttccagtcggcgactggcgtgaagcggtagctgccgtcgcggttaacggtcagcgcgccgacgcccgccagctggacggtgtcgcccggctgagcagtctggccgccgacggtgaagcccgcgataaacagcggatcgccgtccgcgtcacggtcgttgagcagcaggtcgccgcgcgcctcgtaatcttccggcgaagccactgtctcgcccgttgcgaccggcacgctgttggtcagggtgacggtgacgttggcggtttcgcgaacgccgccgctctccacggtgtaggtgaaggtatcctggccgacatagcctgccacaggacgataaaccagctggccgttttcaatggtcaccgagccgtgctggccctgatccacatcgataatcgctttgtcggcattgctgaaactgtcgttatgcagcgcatcgatagtgaccgcaacacccgcatgggtgctggccgtatcgtccttcgcgtccgccaccggcgttacgctaaaggcgagcgtggcggtggagacgccgccgtctttgccgtcgctgatggtgtaggtcgcggcaggcggcacgccgttccagtcggccactggcacaaaggtgaagctgccgtcggcgcggatcgtcaaatcgccatagcctgccagcgtcgcggtgtcgcccgcgaggtagcgggtgccgccgacggtaaactccgtcacggcgagggcgtcgccatcgtcatcgtgggcgttagtcagcaggttctgcgccgcagtgctgttaagcgtggtgtcttccggcgtggaaatcgtcggtacgctggtcagacgcggcgccacgttggtgacgtccacggtaacggtcgcggtttcggttttgccgccgctggtgacggtgtagtcgaaggtgtcgctgccgacatagcccgcgttcgggcggtagacgagcgtgttgttctcaatcgtcaccgtgccgtgggcggcagcggtgacgccggtaatcgtctggtcgctgttgctgaagctgtcgttgtcgagcgcgtcgatcaccaccggcacatcggcatgggtgctgacgctgtcgttgaccgcatccgcgatcgggttgacggtaagtaa

SEQ ID NO: 170354 - DNA, 1818 bp, Enterobacter cloacae
gtgcgcgccgttggtggtggcggtaatggctttgtcgctgttggcgaagctgtcgttattaaagacatcaatcaccagcgggtcgcgcccgtggccggtctggctgtcgttaaacgcatcctgcaccggcgtaacggagatatcgagcctcgaggtgacgtcgccgttggtgcgaccgtcggtgatggtgtaggtcacctgcggcacgttgccgttccagtcggcgaccggaacaaaggtatagctgccgtcggcgttgagggtcagcgcgccgtagcccgcaagcgtggcggtctggccggcggcccaggtggtattgcccaccgtaaacgatttcaccgtcagcgcgtcgccgttcaggtcgctggcgcccgtcagcagattttcgccgttggtaagcgttgtgtcttccgccgtgctgccggttttagccaggccgacctgcggcgcgtcgttgaccagagtgagggtgaccgtcgcggtttcggttttgccgccgctggtgacggtataggtgaaggtatcggtgccgacatagccgctggtcggcgtgtaaatcacctggccgttgctgatgctaaccgtaccgtaagcgccgttggtcttgccggtaatcgctttatcgccgttgctgaatttatcgttggcgaaaacgtcgatggtcaccggcgtacccgcgtgggtcgtcaggctgtcgtcaaaggcgtcttttaccggcgtgacggttatcttcaactgcgccgtggtcgcgccgttggtgcggccatcaaccacccggtaggtcaccgtcggcaccgtaccgttccagtcggcgaccgggacaaaagtatagctgccgtcggcgttgatggtcagtttgccatacccggtgaggtcggcggtctggcctgcggtaaataccgtgccgacgccgctgacggagtagttaagaatgctcagcgtatcgccatcagggtcggaatcgttcagcagcaggttttgcgcggcggagctggtcagcgtcgtatcttccggcgtgctgacgttttcaccctgggtgaccggggcggcgttattcatctgaatcgtgaccgtcgcggtttcggtcacgccgccgctggtgacggtataggtgaacgtatcgctgccgacgtagctcgtggtgttaggggtataaatcaccttgccgttgtcgataaccacggaaccataaacgccctgggtgaccgccgtgatcgctttatcgctgttgctgaagctgtcgttgcccagcacgtcgatggttttcgcctcgcccgaatgggtggcggcggtgtcgctcaccgcgtccgccaccgctgtaatgctcatgctgatgctctgcgccgtgctccagtggctggtctggccgctgttgaaggcgctttgcagatcctgcgtgctgcccgcggcgctgacgccggtatcggcggaactggtgctgtcggagacgcgcaccgtcaggccgcccggcaccgcgccgttgtagtcggccagcggcacaaagcgcagctgggtcgaggcgagcagcaccagcgcgttggtttcgctgtagcttgtgccaagcgcagtccaggtcgtgccgttggtagagtactcccagtggccgaggcttgcgtcggtggtgttgccgacgatcgccacatagccgatagcgccgctggcgttgccgccgccagcaattcccgtctggttgtcggcggcgtcgctgtagctgccaagaatagaggtcagcgttttgccaactggcgtatcttcctgcatggtcagcggcgtcgcgctaatcgtcggacggtcgttgacgttagtgaggctggttga

SEQ ID NO: 170355 - DNA, 159 bp, Enterobacter cloacae
atggtgtcgccggtaatcgctgcggcgctggtgtcttcgctcaccggggccagcgtctgggtagcgccgcccagcacgaccggggcatcgttcgacggtttcacggtcacgctaaaggtacgggtggtgaccagcgcggcggaggtgtcatcggcgtag

SEQ ID NO: 170356 - DNA, 483 bp, Enterobacter cloacae
atgtcgcccgggttcgcgttcgggttattgctgtcgccggtaagcgtggtcgggcggctgccgtggttggcgttatcgttcaccactacggtgacgttaaaggtgccgttccagtcggcggcggtgacgcccgcgttggtcggcaggttcaccgtcaggttagcgaggcggctgttgatctgcgaaagcgtgccggtaagtgtgaagctggtggtgttgacgccgcccgcatcaacggtgccgcccgtcccgccaatcgttttaaaggtaaagccgcccggcagagtgaccgtcaccgtcaggctggcgctgtcggcgtccctgtccgccacggtaatggcgggcagggcgacggtcgttgagccttcgttgactgacttgtccgtcaccgtgatggtcgccggatcgttgacgtcgcttgggaagacgctgcgccatgcggtactgacgttctggctcaggccggaaggcagcgcgccgtaa

SEQ ID NO: 170357 - DNA, 222 bp, Enterobacter cloacae
atgtcgctggcgcgaccggtcagcgtcagcgtgccggagttgtcgccggaaatcgtaaccggctggctgccggcggcgctggcggtggcgctggtgttcacgtccgcgccgccgatgccgagggtgccggacggcgcggtgatggtgacggtcaccggcgtgccgaaggcggcggattcggtgtcctgcaccacgatattgccgccgataaagcttgcctga

SEQ ID NO: 170358 - DNA, 201 bp, Enterobacter cloacae
atggtgacggacgccgcgctcaggttgccgcttttttccggtacggaggcgctgtaccagttgtactcggtggcgtcgacggcggtggccgccgcgcctctgccaggcgtcgcgggctggttcagcgtgccgccgttagcgcctgccgtcagcgtgccgcttgcgtcgcgcaggcggtcatcggcgatagtctgcacctga

SEQ ID NO: 170359 - DNA, 930 bp, Enterobacter cloacae
ttgcagcatggcgctggttatctggccatagcttccttcggtgacgtacagcgggttgttgactggcgtgccgccaatcaggttcggcgagcctgcggtcaccgtcgggtcggcctgggtcgggtctttggcgatctgcggcgcgtcgttgacgttagttatctggattttcaccgtcgcgtcgctggcggaggtggcgccccagcggtcggtggccgatacggtaaaggtggtggagcgcacttccgagccgtcgctgacgaagcgcagcccggtggtcgaggcgctggcggtaagcagcgaggcgttgagcgtctggccgacggtaacgtcaacccactgcgagccgttgtagtattgcagcgtgccgccgtccggcagcgttttgatggtgaacgtcagggcgttggcgccggtcgcgtcgttgttataggcgtaattgttggcgctggcgctgccgtctttgatcgtcgcgctctcttccagcccgttgccgctgttggcgtcgtccgggtcgcttatcgctatctggccggtggtcaggtaagcggtttcgccttcggcgatgacggtggaggaggagccggtcaccaccggcagatcgttcactggcgtgacgtagatgttcagcgtcggcgtccagatatcggtcaccgggttgccgttggcatcgagcgtggtcagacccgccgagacagagaacgccgcggcgtagacaaaggtctctccgccgtcgtgctggaagcgaatattgccgctgtcgaggtcggcctgcgtaaaggtggcatattcgccgagcgtcacccagctgccgccgacatttttttgcagctcgccgcctcttgcgccgttcgagaaaccgaggaaggtatagaccacctgcgaggcgtccacgcccgtggcggtgtagctcaggcccggcacgcttga

SEQ ID NO: 170360 - DNA, 459 bp, Enterobacter cloacae
atgacgctgccgcccgattcgatctccggcacgttctgggtggcgtcggccacgcttaccgggtcgttcgacggggtcacggtcacatcgatggatttgctggtgctgacgcccgcgctgtcgcgcaccgtgacgtccagcttgccgctggcggcggtgttgccaagctcgacgtcagcggaggtaaaggtgatgctgttaagccaggcctgcgcttcgctggcagtgccggtcatggtcagcgaagcgttgctggtctggctgtcgctgagtttgccgatggcgctgttgctcaggctcaccgtgacggtgacggtttcgctggcgtccgtggtgctgacctgccagccgctgagcgtggcggtatcggcgcctgcggcgttaaggctgctcggctcggcgacggtgatgcctttttccggcgcggtgacttccggcccggccagcagaccgtcgtaa

SEQ ID NO: 170361 - DNA, 198 bp, Enterobacter cloacae
atgcttatattcaacgggtacgccattgagcagcaggtgatgaaagactttattgctgacgaccagatccgggctgtgcgcatgggcgatacgcagtatcacctcctccagcacggaaacagggagatggggattgatggtttgcagctgctccagcattaccgggcgcagaaacaggtaatggtgccaacttactga

SEQ ID NO: 170362 - DNA, 198 bp, Enterobacter cloacae
atgccagacgacccccgcttttttactaccgggctgaatattactgtgcaacggcaggtgtttaccggtcgaggccacaatcgtcgccgtcaccgcttcacgcactgcatggaactggtgataggcggcaatcttcttaatcagccgtttgccgtcattctcaaacagggcaaaatagcggatataatcgagcaataa

SEQ ID NO: 170363 - DNA, 549 bp, Enterobacter cloacae
atgaacgtgactatgactgaaattcctgatgtattaatccttgagccaaaagtatttggcgataacagagggtttttcctcgagagttttaaccagaaaacctttaatgaaattcttggtagagaagtgaactttgtacaggataatcactcaaagtcagcaaaaaacgttctaagaggtttgcattttcaatcacagaatacccagggaaaattagtgcgcgtgaccgctggggcagtttttgatgtggctgtcgatttacgtaaaaactcagaaacttatggtcgctgggttggagttgaactttccgctgaaaataaaaaacaattgtggattccgcaaggttttgctcatggattttatgttttggaagagaatacagaattcgtttacaaatgtactgattattataaccctgcttttgagcattcattagcctggaatgatgagtcaattagaataaactggccactaccagagggtatttcacctattatatccgagaaagataagaaaggtctttctcttaatgaatgccagttattttaa

SEQ ID NO: 170364 - DNA, 450 bp, Enterobacter cloacae
atggggcattgcatagacagtacaacgatgctcgccatcatcgaggacaacagccagcggctcgggcggtttagcccgggagagactaccagcaacgtaagcccgccgcttcacgatcatagcgccgtaggcaaacagccccatatcgtccagccccagggcatcagcaagctcgtctacacgtttcagctcggcatcacgccactcgccccgggggcaccgcagcaccgggagaagctggacaaccttgtcccggcaccattgggagacgccaccacgcatggcctggcgaagggcggcatcccgcccctcaaccatgtgatcaggccactccgcgtcggtcagctttacgcagtcaaagtagcccacagcagcgcggcctcctcagccgatacgcgggtacgaacctcgaccgggcccgcggcgacgacgtactcgcccgtcaggtga

SEQ ID NO: 170365 - DNA, 297 bp, Enterobacter cloacae
atgagcttatacccgaaagacaaaaatcccgtgtttcagcctggcggctacggtctgcgctatgacggtcaggccgaggccattgcgcgtgccggtgagccaccgatcaactacgccccgggtcaggagctgtcccgtgctgctcctgcgctgcctgagcacccgacgcatggcgctgcgcgtgcgttccgtgatcacctgacgggcgagtacgtcgtcgccgcgggcccggtcgaggttcgtacccgcgtatcggctgaggaggccgcgctgctgtgggctactttgactgcgtaa

SEQ ID NO: 170366 - DNA, 351 bp, Enterobacter cloacae
ttgccgcgccacctgcagggcaaagctgcgctgccgctgctgggtggttgcttcccgaaggggcaccggctggcgttgctggctgtcatgccgatcatcgaggcgcgtcctggtgaacggcacgagggggaggctgcaaagctggcgttgtttcagcagctgttgctggacggggggcaaccgcccgcgttcgcgctgcatgagccgtccctgcatcgcttcggcgctgcgttgaggagcagccgacgcggattgactgatgcgggggtcgacaaggccaatgagctgctcgaccagcaccttttctcccgtgcccttgatgccattgtggcgactaaacaaacagattag

SEQ ID NO: 170367 - DNA, 405 bp, Enterobacter cloacae
atgtccatgttcgatcagctggttgcccgtctgcgcgacgagcaagctcaacaaatgaccaaatcccttaacccgggtgacgccctggaggcgatcggtaacggcgacgcgaatgcgccggtgctggatcagcgtgcgctgaccatcggcgtggctcctggggtggtggcgtgccataacgcccgcttgaaccagatcgccgacgcgcagctactgcaggaggttcgcgcctctggtgtggtgtctgccgttgatgcggtggcgctggacaatgcactggcggcgtcgcgccacctgccgcctgaggtgcgtgctgcgggtatggaatcggtacggcagcagctgcgtgcctccgctgctgctcctctctcgcccgccgccagggggataagttgggacgagtaa

SEQ ID NO: 170368 - DNA, 687 bp, Enterobacter cloacae
atggaaaacgaacaaatcgcccccgtcgatttcgagggcgcaaaccggatctaccttgcagacgtgctcgctgaggcatgctctgccctccctgaactgtctgatctccctgtgccgtcgctggatggcgatgatgctgctgttgcgtccctgcttcacctgatgaggcagcgtgacgagatggccagcgtgatcggtgtgctcaacttcgagctgggtaagctgaaggacgacgccaaagctgcgcgtgctcgcctgtctgatgctgaggcgcgtatcgccgccgcccgtgatgctttgctggctggcaacgagcccgagccccgtgatgcgatgctggcgctggttgtcgaccagatccgcgctgacgtgcaagccgccgatgctgcggtggatattaagagccgggaggtgggggcactcgatgcgcaaatgaacaccgccgtgcatcagatcgagggtgccattgacgagctgatctgctcctgccgtatcgcccgggctcgtgctctggagctggctctgcttaacgagctgcgtgctctggctgtgcatgacggcgacaaaaaccgctttaaccgtgcattcgttccggctcctgagctggctctgctgacgtctggctacggccagatcgagatgctccgcccggggcgtatgcctcacctgactaaaggggtgctgtga

SEQ ID NO: 170369 - DNA, 642 bp, Enterobacter cloacae
atgatcaccaacaccaccgccgtcgcctacatgcgagcgagcacccaggaacaggacgcgaaccgcgcccgcgaggagatcaccctcttcgccaaagagcacggcatcaccatccggggcttttacgccgagaacgtgtccggcacctatctggagcgccccgaactcaaccggctactggaggacgccaagccccacgacatcctcctcgtcgagaagctcgatcgcctgagccgcctcagcgccgaggagtggagcaccctcaaggagcgcatccgcaccaagcgcctccgcatcgtttgcatcgacataccgaccaccctcgccgtcctgcagggaggccagccagtaggcgcgggcgggtttgacgttcgccgagtggtgctcgacgccatgaatgacatgctgctcgacatcgccgcagcatgggcgcgagacgactacgagacgcgacggaagcgccagcaacaaggcatcgagaaagcgaagaaactcggacggttcaaagggaaacagaaagacgaggagctgcggggcaagatccgcaccctactggacacatccagcatgagccagaaccagatcgccaagctgatcggctgttcacggaacaccgtgagccgggtcgtcaaaggcgagtaa

SEQ ID NO: 170370 - DNA, 192 bp, Enterobacter cloacae
atgcagagcatacaacagaccaaccctgcccgctacccgggcctatccatcgagcacggcaccatcacccagcacggacgtgcacgcgccgtcatcatgaaccgccgaggcatccaccaggtcagcctcagaacggcagaggggcgcaccgtcacccttcccgtttgccgactcttccagtgggaggcgtga

SEQ ID NO: 170371 - DNA, 192 bp, Enterobacter cloacae
atgaccccaggcagaacgcagatcctgaaagccaccgccgacatagccaaagcactcggtaccgacaccgccgacgtagagcgccacttcctgcagcacgccgtcgtcctcgcacggctccggcaggagggcaagcgcccccgcgtcaaagcgtggatggcagagaacatcggcaccccgtcagcaatgtaa

SEQ ID NO: 170372 - DNA, 351 bp, Enterobacter cloacae
atgagaaccaaggccatcatcgctgcagcccttctcgccaccgcaggaaccgccgcagccgcaccagtcgccacgacctacatctgcaacgacgggacatttatccaccttaacgagcagaatggcagactcaccgccagctggcacggtgccgacatccccgtcaccaagatcgagacaagcaagctaaccgccagcctcaacggtgagcagggcagctcaacactgcagctcgtcgtcgggtacaacaccacacccaacccgatagccatgattaccaccatcgtcaacggcagcatgaacagccagagctgcaagccagataccgcaagtaagcacatcgacctatag

SEQ ID NO: 170373 - DNA, 243 bp, Enterobacter cloacae
atggcatttgaaaacatcgagcgccggttccagagatggaaggtgatcatggttcccggagcgaagtcatacgagtcatgggatgagatggtcacaggcgagaacttccccgaggaagcccggtacaaatacaagacgcaccgcaccaaggcgatcgacctcacgctgaaaaacccggactacgtccacaccatgtcggagaacgggatcactgtcaggtaccggctcgaacgctggcgctaa

SEQ ID NO: 170374 - DNA, 186 bp, Enterobacter cloacae
atggctaaacctacccccgctgaaagtgccatgaacgtgacgcgtttcatccgtgcgcagtccctcatcatgcttgaaaaagtggaggcgctcgacttcgacgaccttaccgcgctggctgaaaaactccacgacgatgccgaatacctggagctacttgtcgccaaacgggtaagaaatccctga

SEQ ID NO: 170375 - DNA, 1788 bp, Enterobacter cloacae
gtgtcacaaattgatgaaaattccggcgctgttgccgacaacgtaacgccgatcgatgctgccaagggcaaacctgccgccgatggctctgacctgccgttcatccggttttccggcggctgggtgtacctcaagacctgcaagactgacaagaagggcgaaacctattactcgctgcaggctgtctgtaagtctcacctgcgtgtcatcggcaccggctgggtcgatggcgaggcgttccgagttctggagctgggaaaggacaagcgccgggtaatgatgccgacgcgcctgattggctcgcgagatggctgggcgttccttcaggggcataacgtgcaggtcactccagttcccgagctacgtcgctggctccatgagtacttgatgtccgagacggcctacgatctgcatggctctccgtgcggcgttctacccgagtgggacgtggctgacaagcctggttggcgcggtggggcgtacctcctgccagatggcgacatgataggcgatgttgggaacgtgatcgccgacttcaaactgcgaagcaatcacgccgacgttggtgtgtgcggtaccgtcgactcctgggtggaaaacgtagggaggctgctgtacggcaacgactcgccgaccctggcactgggggtggcgatggcctcacctatgcttggagtgctcggcgtgtccgggtttggcgtccacctgtacgggcagtcctccggtggtaagacctcctcctgttacccggctatgtcgattttcggatctccttcaaaccgtcaggcttcgtggaacagcacgccgctggcgcttactctgctggctcgctgctgcaacgacgcactgatgatgctagacgaaatgaagctcctccgggctatggtcatggaagaggcgatctacggcaccttctcgcaacgatcgcgcatgcaggggaacaaggacgggacgctgcggcctgagtattcctggcgctgctgcgtgctctcaacgggtgagttggctgctgacgtattcattcgcatgatgaccgggcgtgatgctgacgcaggggcacttgttcgcctggtgcaacttccctatcgcccgctgacaaacctccacggcttccctgacggctccgcgttcgccgaccacctaagggcggcatctgacgagcactacggtgctgttgggcgggcgtgggtggattggctgtcgtcaaaccagactctggcccgggaaaaattcgcagaggttaaggctcgttggaacgggcggggtactcatggccagcatcagcgcgtggcggactacttcgcggtgatcgagacggcgctgacgctgtcctctaaaacgctcaagctcgacgtgaaagagtgccagggcgtgctcgatcgcttctacgccgactggctcgtcgatttcagtaagggtggcaatggctcccatgaagaggcgttgctggttgaacggctggaggcggttctgtcgcaacatcaacggttcctgtccaagacggcgaacgatcaggactacaagcagcccggcgagctgtggggctacttccatgaccggggcgacgcgcgcgagtatctgctattccctgcggtgttcaaagagcggatctccggcaccatcgacgccaaggtggcggggcgcttgcttcacactcgtgggcttctgcgtcgtcatggtgaacaccttacggtgtcagagcgtgctggcggatacccgaacaagcgccgcttctacgcgctgtctctccccgtggttgacgatctggacgctgaggaggtgctctga

SEQ ID NO: 170376 - DNA, 528 bp, Enterobacter cloacae
atgcagcgcaaaagcccgacattcagcctacgtctacccgccgacctgctcgagcagacgaacgagctggccgagaaaacgaaccgtacccgcaccgacgtgattaccgacgcactccgtgcataccttggcataccagagccacagggggagggcggcaaccgcctcgacctgatggtggagctgctgcaggacatctcgaatacgctgaaacacaatgtgctacagaagccaacaggacgcgctacaaggtcacgggctgaaaagctgactagtaactcatctgaaacacaaagcgcagcacagcgccccgctggcgctgaattttcggggcattacgacgaggccgaggtgatggccaccatacggcgcatgagggaggagcagcgcgatcggggattccgctacgacaacaaagctatcgcccaggcgctgaacgaggcagggctcctgcagtcgaacggtcgcccatggaacaacgaccgcatcaacacggtgatcacccgacggatgccggacttaaagtaa

SEQ ID NO: 170377 - DNA, 222 bp, Enterobacter cloacae
gtgacgaccggctgggttgctgaactcgcaataaatcggtgcgcctggctggatgatgtcacgaacaaaccgggcgacgtcgtccacagtcgtgtatccccgctcgctcagctccctttcatgctctgcccatatgtggcggacaccaaaccccctatttggcccggtgtgacgcccgacgcgcaggaaaatgtcgccagcggggatcacatctccgcgtga

SEQ ID NO: 170378 - DNA, 1149 bp, Enterobacter cloacae
atggtgaacgagagacgagattatgaggttaatttcctgtactacccggaagtgttcgctgcggctctgtcgcgtgttgaaccagacacgtcagtcctgggctggctgggccaggctcgcgctctggcgtgctggtgtgagctgctgaggctcgacccactggagacctgtgtggagtggtctgcgcgtggtgtgaacgcgggtaagggcgacagggcaatgttagcgtcggcgctgcgtgacctggatgacctcgaccggctggcggcggctggggcgttcctgcgctcctccggggtggctgctgacgttgctgccgggcgcatcgctgttcgtgagcccaccgaggacgagctggctgctcgtcaggcgcatctggttgcactacgggaacgtgcggctgctgctgcggcgaagctgacggaggctcgtattaaggcaaccggtagggcgcggatgctgctgcatcgcgccaaaaagccggggaatgcggcgctgtactggaaggccaaggagcgagctgcggagcgtttgctgccgtgccctgacgacgtgaagtgctcggactggagcacgttcctgccggtgctgggtcgcgtgtggtggaatgagtcgctcctggtgccgctgtacggggtgaatgagtccctgcgtctggagtgtctttcggtcgaggtgatttgcggtcgggctaacccggagacggctggcacgcagggtgagaagcgcgggctcaagagtgcgccgcgtgaggggctgttctacccgttcgacctgtcggcgctgcggagtgggctcccgatcgtgttgtgcgaggggttcatgtccgggctggcgctatcgctgctgattggcggcaagttgccggtggtttgcgcgatgtcggtggggaatttcgccgcaacagcgcagacgctgggtaaatttgtgcaggactctccgctgttcctggtgccggacgtcggcgggatgcagctggcgctcgatcagggtgttccgggtgcccaggtggtggatttgtctgcggtaccgggagccgagggcgtggacggctacgacccgttcgatctgctggcgcgtcacggcgtcgagatgggtcgcaagtacctgcggggcttgtttcgggaggcgcgtgacgcgagcctgtag

SEQ ID NO: 170379 - DNA, 186 bp, Enterobacter cloacae
atgaagtttcgtgcaagcgcgatctgcgacctgatgggtgtctcccgtcgtcagctcgatcgctggattaaagctggcacttttcctctgcctgacgggcgcgacgcaaagggttactggtgggaaggtgagaagattgcgccgatgctgcttaaggcgcgtgcagttaagcagagggctgaataa

SEQ ID NO: 170380 - DNA, 522 bp, Enterobacter cloacae
gtgagtaataagaaaataaaaaattactgtcgtgattgttgcaaagtgactaatcacgtcattttgtcagagcataccgattcgcatcgcgaagaatacagttgcgatatttcgtatcaaatattgcagtgtttaggttgtgacactgaatcatttcgtaacgtattttacgatttagaggctgcatacccaactgatgaaaatcaatgggagattccagaggatgttactgtctatcctaaggccgttgaaggccacaaagaaatacaaaacctatgggaattgccagatatcgtaagaactatctattcagaagtactcaccgccttgcgggaaaattcgaaagttctcgccggattagggctaagagcagttgtcgaggcggtatgcaatgacttaacaatttcaggacgaagccttgaagttcgaataaacaaattaacaagctctggatatatttcaaaaaatgatgcagagcggttacatggaattagggaaggtgcgaacaagttcctgatatga

SEQ ID NO: 170381 - DNA, 528 bp, Enterobacter cloacae
atgcattcattttctgagttagcatacagatgcacaaatttctcattagcaaaaattaatgaaggctatgatttatcagttaaagcattatctgaaactggtgccacaccacctttaaaaaatatgcaagctcttaatctgcaaaaaatgattcatgcagtggggttgttttctgtttacgaagctcacttacagcgcaggttacactgtagagacggtttcaaagaggctaaatctattctcgaacaggcaggcgagatttcgctgaaagataagtttcatgattactatcttgcaatcaatgcgttaaagcatggtgatggggctagctataacaatttggtcgctaaattcaataatcttgattttgtagttgatacacctactacacctgttcatgaagagggtgatgtttcaggtgttgagggtttggtccttgtggatgatgattttattcaaaattgtcttgctgtgataaccgaagtatcagaatgcatatcaaagcgacgtcctgattttcttgattaa

SEQ ID NO: 170382 - DNA, 1191 bp, Enterobacter cloacae
ttgaatattcttttagttgaagataattacgacaaatatccaattattaataaagcgttaagtatttttgataatataaactttaccaaagtagcttctgtttgtgatgcattggatgagcttagtaagacactctttgatatcatgattatcgatattcagattcctgatatagatgggggcgatataaaccctcaaggaggcgtggagttgttgaataatgttgaacatctgactcattcaaaaataccacgatatatttttggattaacatcaaactcctcggatgtaagctcacactttgatactttcaaaaaatttggttggcctttgtttgacttaagaaacgatgctgattgttggaaggacttgcttgtcacaaaagctcgtgcaattgaaaaaaatataaattacatgagtgctgatgttgctatcataacggcgttagaaaatacagagttagaggaattattaaagctagcaccatcatacacttcttcaaatattgatggctacaggtattatttctatgaagtaactacagttaatggaactaaactaaaagttgtttcatcttctgcagagagaatgggcgttacgtggtcgtcacaactagcaactagaattattgaaaaattcaaaccaaaaataatactgatgacagggatttgcgccggtgtatcaggaaaaacttcgttaggagatattatcgtcggcgatcctgtttgggattggggagctggtaaaatatctgaagatcacgaaggtaatacaattttcttgccagaccctcatcaattggctctcaacagaaaagtgaaggaacagctaagagatttatcgcaagacactgtttttttgaagtctttagttatttcttggccacacaacactttaacatcgtcaccgcaaatattaatagccccaatggcttgtggatcatcggtcattgcaactcaagctactgtagatgatattgcagataaacatcgtaaagtaacagctattgaaatggagtcgtatgcagtaatggccgcggccttttcttatgatattccttgtgccgttattaaatcagtttgtgatttagggaataagcataaagctgatgagattcaaaactactgtgcttattctagtgcttccgtggctataaaactcatcattgataaatatcataatttaatttaa

SEQ ID NO: 170383 - DNA, 462 bp, Enterobacter cloacae
atgattaaacttttaataatagaagatgatttgtataaatcaaatgcaatttctgaatatcttcgtgatgaactaaatataaataacattacaagccgagaatctttatcaagcggtgtatttgaagtgcttgacaatcctgactatgatctaatcctattagatatgagcatgtcaacatatgacatttctgacaaagatcccgttggtggtatacctgagagttttgctggtgaggattttttagctcaaatggaattattaggttataaaattccaattctcgtcgttactcaatatgatacgtttggtgccggagatgattcctttccgttgaaaatattagataataaactttcaaaaaaacacccggaaatttacaaaggatctattttctttcgctcaatttctaatgagtggaaagtattacttaaagaaaaattacacgaggtattaaattga

SEQ ID NO: 170384 - DNA, 375 bp, Enterobacter cloacae
atgcgcatgaccacccgaaaaaaagagatcctcagcttctttgaaccagaacaccgtaagtggataaccagtgaagttggcgcacctcctattgacgtttccggtgttacttacctgctgcacggcacaagtagctttgataaaagctaccaactggaatcaacccgcagaacgcttgaggcaatggtaaaagacgggctactggaaaaggttatcagctacgagagacgccaggacacgacgcaaagtggggatgggaaaggtgtatggtgcaactgctcacgctatggtttacccggtcaatgtaacgttatgcgggatgatggcgataacagacgcccccatatcgagggcgaaagcgtcagaattgattaa

SEQ ID NO: 170385 - DNA, 1317 bp, Enterobacter cloacae
atgacctatttcccagaacttgatcaagttaaattcgaaggcaccggctcacgcaatccactggctttccgccactacaacccggatgaaaaaatcctgggtaaaactatgaaagagcatctgcgctttgccgcctgctactggcacaccttctgctggaacgggcaggatatgttcggtaatggcgcatttgatcgcccatggcagcaacctggcgatgcgctggcgctggcgaagcaaaaagccgatgtggcctttgaattcttccgcaagctgaacgtgcctttctactgcttccatgacgtggacgtatccccagaaggtaaaaacctgcgcgaataccgcgaaaacctggccgtgatgactgacgttctggcgcagaaacaggaagaaaccggcgtgaagctgctgtggggcaccgcaaatgccttctctaacccgcgttatgccgctggcgctgcgaccaaccctaacccagaagtcttcgcctgtgcggccactcaggttgtcagcgcgatgaacacgacccagaagctgggcggtgaaaactatgtgctgtggggtggccgtgaaggctatgaaaccctgctgaataccgatctgcgccaggaacgtgcccagattggtcgcttcatgcagatggtggttgagcacaaacacaaaatcggcttcaacggtacgctgctgatcgaaccgaagccgcaggaacctaccaaacaccagtacgattatgacgtggcgaccgtttacggcttccttaaacagttcggcctggaaaacgaaatcaaggtcaacatcgaggcgaaccacgccactctggcaggccattccttccatcatgaaattgcgtcggccattgcgctgggcatcttcggttccgtcgatgcgaaccgtggcgatgctcaactgggctgggatactgatcagttcccgaacagcatcgaagaaaattccctagtgatgtacgaaatcctccgtgcaggcggcttcactaccggtggcctgaactttgatgccaaagtccgccgtcaaagcacagataaatatgacctgttctacggccatattggtgcgatggatacgatggcattgtccctgaaaaatgccgcgaaaatgattcaggatcgtgggctggaaaaagccgtggaagaacgttatgcgggctggaatcaggggattggctgcgaaattcttaatggcggtcttactctggccgacctagcagagattgcagaaaccaaaggctttaatccgcagcacacaagcggctctcaagaaaaactcgaaaacctggtgaatgcctacatcttcaactaa

SEQ ID NO: 170386 - DNA, 954 bp, Enterobacter cloacae
atgtatatcggaattgatctcggtacatccggggtgaaagccattttgatgaacgaggaaggcgccgtccttgcttcgcataccgaacctctctctgtctcccgcccgcgcccgatgtggtctgaacaaaatcccgaagactggtggcaagccactgatcgcgccattcagatgctgggcaaaaagcatcagctcaatgacgtgaaagccatcgggattgcaggtcagatgcacggggcaacgctgctcgatgaaaaaaatcaggtgctgcgccctgccattctctggaacgatggccgctgtgaagaagaatgcaaactactggaacaggcggttccccgctcccgtcagatcaccggcaatctcatgatgacaggcttcaccgcgccgaagctgctgtgggtgaaacgccatgagcctgaaaccttcgaaaaagtgcgcaaagtgctgctcccgaaagattacctgcgctatcgcatcaccggtatgtttgcgtctgatatgtccgatgcagcgggaacaatgtggctcgatgtcggcaagcgagactggaatgatgagctgctggcggcatgcgatcttacccgtgaccatatgccagcgctgtatgaaggtaatgagatcactggctgcgtgacggcggatgtggctgaacgctggggcatgccgcaatgtagcgtagtaggcggcggcggtgataatgctgcgggcgcagtcggcgtgggcatggtcaatgaaggcgctgcaatgctctctctgggcacgtccggcgtgtatttcaccgttaccaatgctttccttcgaaaccctgaaagcgctgttcacagcttctgtcatgcgctgccggatcgctggcatttgatgtcagtgatgctcagtgcggcgtcctgtctgaactggatcactaagctgctccagattgactccgttccggccatgatcgccctcgcctag

SEQ ID NO: 170387 - DNA, 414 bp, Enterobacter cloacae
atgttctttggcttaacccatgaacatggcagcgctgaactggcgaaagcggttctggaaggtgtgggctttggtctggccgatgggatggatgcagttcatgcctgcggcgtgaagcccgattctattaccctgattggcggcggcgcacgaagcagctactggcggcagatgctggctgatatcagcggggagattctggattatcgcgtcggcggtgataccggcccagctctgggcgctgcacgtctggcgcaaattgctggcctgccaggagaagaatttgacggctatctgccaacgcttgagctggaagaacgccatttcccggccccagccacgcatcagttctatctcaaaaaacgcgaaacattttccgaaatctataaacgactcgcgtcactaatgtcctga

SEQ ID NO: 170388 - DNA, 1458 bp, Enterobacter cloacae
atgagtacacacaacaaacttaattcgtacacgctgggggtgacgcttgtcgccaccctggggggattgctgttcggttatgatactgcggtcatatcgggcacggtcggatcgctcaataacatctttgtcgcgccgcagggactggccgaaggtgcggcaaactccctgctgggtttttgcgtcgccagtgcgttgatcggctgcatcatcggcggtggtctggcgggcttcctcagcagccgctttggccgcaaaacctccctcatgattgccggtgtcctgttcttcctctccgccctgggatcttccttcccggaatttgggcatcatgcgattaacggcgctgccggtgtgccaacgtatttgagcggctatgtaacagaattcgttatttaccgcatcattggcggtctgggcgtgggaatcgcatcgatgatttccccgatgtacatcgctgaaattgcaccagccaacatccgtggaaagctggtttcgtttaaccagtttgcgatcatcttcggccagcttctggtgtactgcgtgaactacttcattgcgcgcagcggtagcccggaatcgctggataccatgggctggcgctatatgttcctgtccggggcgatcccttctgcgattttcttcctgctgctgttcactgtgccggaatctccacgctggctggcaaccaaaggcatgaacgaccacgcttctgcggtgctgatcaagctgctgggcaaagtgaacggggaggcggagtttgcgtcggtgctgaaatcagtgaacaccggccccgaaaaatccgcgccgctgttctccttcggtatcgcgattatcgttattggtgtgctgctgtccgccttccagcaatttgtgggcatcaacgtggtgctgtactacgcgccggaagtctttaaagaaatcggctccagccaggataccgcgctgctgcaaaccatcatcgtggggatcattaacctcctgttcactgtgatcgccatcatgaccgtcgataagtttggccgcaaaccgctccagatcgtcggcgcgctgggcatggctatcggcatgctgctgctgggcaccgcgttctatgctcactgggcaggtggtgtggcgctgttcgcgatgctgctgtatgtggcaatgttcgcggtatcgtgggggccagtctgctgggttctgctggccgaaatcttcccgaaccgcatccgctccaaagccctggcaattgccgtggccgcacaatggatcgcgaactacttcgtaagctggacattcccgatgatggcgaaatccacctatctgcaaacccacttcaacaacggctttgcatactggatttacggcatcatgggcatcatgggcattctggccgcgctgttcatgtggaaattcgtgccggaaaccaaaggcaaaacgctggaagaactggagaaaatctggaagaaagcttaa

SEQ ID NO: 170389 - DNA, 1200 bp, Enterobacter cloacae
atgctgtccagttttacccccagaccgcttaaaaaactgttcacagctaatcagtgctggacttccttcctggatgcaggcggcctgcgtgatatcgaagtcgaagccgtcaccaaaatgctcgcctgcggcacccgcatcagcggcgtgaaggaatatggctgcgataatcccggctgccggcatgttaaatatatcaccaacgcctgccacagcagggcctgtccctcctgcggtaaaaaggcaaccgacctctggattgccgctcagcttaaccgcctgccggactgcgactggatacacctggtcttcaccctccccgactcgctgtggcccctgtttgaggttaaccgctggctgctcaacgacctctgccgactcgccgtcgataacctcctgtacgccgccggcaaaagggcgctggatatcggtattttctgcgccatccatacgtacggaagacgactcaactggcaccctcatgtccacgtctccgtcacttgcggcggcatcaatgcgcacggaaaatggaagaaaatcagcttccgtaaggatgccatgcgcgcccgctggatgtggaatatccgtcagcttctgctgagcgtctggtccgaaggcgtggccctgccgccgtccctgtcacatatcaccaccgaatcacaatggcgaagcctgatactgactgcgggtggcgactactggcacgtctacatgtccaaaaagacgaccggcggcaaaaacaccgttaaatacctggggcgttacctgaaaaagccgccgatagcgggctcccggctggcgcactacgccggaagtgccacgctgagcttccgctaccacgaccataacacgggcgagcaggccacagagacggtgacgcagcgggacatcgtggcgcgtctgaaacagcacatcccggtgaagttcttccggatggtgcggtattttggttttctggccaaccgggtgtgcggagaaaagctgccgcaggtgtacattgcgctggagatggataaaccggagccggtgccaaaggtctgctacgcgcagatgagtaagcagttcctgcggcgtgacccgtttgtctgcgtactgtgcggtggccagatggtgtaccgcagggcggtggcgggcctgaatgtgcaggggctgaaaatccacgcgcgggaaatcagtctgatgaggtatatcccggcctga

SEQ ID NO: 170390 - DNA, 189 bp, Enterobacter cloacae
atgatgactcgtaaaagtatcgataccattctgctctccgttggcgcggataagctctctcagcgtgaatgggactggatgaagatgctaaaacccatggatccgccgcctgttatggtcgccaaatccatgctggagcgccggggtgacaccgctgcgctcacccgcctgcagacgactgaagcttaa

SEQ ID NO: 170391 - DNA, 954 bp, Enterobacter cloacae
atgaccacacaacgcctcacccgtgactggcgtctccctaccgctgggttgatgctgctggcaattctctttgccggttttaccctgcatgcgcactggaacgcctttatccagtggtgtcttgccacgcaaattaccctgcaccgctatctggtgatgtacctgctgcagctgaataaccaccagtacagcggcggattatggttgttaacgggggctttcctttatggcgtactccacgccattggccccgggcacggaaaattcattgtgacgacctatctgactaccaataaggaaagcgagctggccgcccgggtcgtccctttcctgggcagcctgatgcagggcgtcagcgccattctgtttgtctttattctggcggtaggatttaacctcgcctcaggggatatcagtaccagccgctggtacgtggagaagatcagcgcagtgcttattggcgcattcggcgcatttgtcatttaccaggcgctgaagagcctgcgcccacgcaggatggcagtgtccgccattaagccgcttcatcagcacgacgaacactgtggctgcggtcatcacggcgtaggtgcagacctgacgcagggcgactggaaaacccgtctgggcgtgatactggcgattggcgcacgcccgtgcagcggggcgattatgattctgatgttttcgaacgcgctgggcattgttacctgggggatggccgccgtcatgaccatgtctctgggaaccgctctttctattatggggctttcactggctgtacgttacgcccgcgaacgcacggtggcctggttcggagaaagcgcctcgttaaaatggctggtgccgaccgtcaaaatagccggagggatagtcctgatcctgttcgcgacggtgctgttcctgacggtgatccccatcagcgccaatggcgactacatcgccgcaggatgctaa

SEQ ID NO: 170392 - DNA, 990 bp, Enterobacter cloacae
gtgcagacctggcgtcctgagctgtccagttataccgccaaccttgcggccgcgaacacgctgttcagcacccgcctgcacgaccgcctgggtgaaacccagtacacggacgtgctgaccggcgagaagaaagtgacgagcatgtggatgcgcaacgtgggcggtcacagccagtttacgatgaacgacggtcagaataagacgacggctaaccgctacgttctgcagattggcggggatgttgcgcagtggtcatctgacggactgaaccggcttcaccttggcgtgatgggcggctacgcaaaccagcgcagcagcacgaagaacaacctgacaggctaccgctcgaagggaagcattgacggttacagtgcgggtctttacggcacctggtaccagaacgatgcagacaagacggggctgtatgttgacacctgggcgctatacaactggtttgataatgacgtgacgggtgatggcctgagcgcggagtcctaccggagtaaagggatgacggcctcggtggagtcggggtacaccttccacgtgggctcgcaaaccacggacaaggggatgaccaacgatttctacctccagccgaagatgcagctgacgtggtccggcgtgaaggcggatgaccatacggaagtgaacggcacccgcgttcagggtagcgggaatgacaatcttcaggcccgcgtcggcacccgcttctacctgaaagggaaaagcgccctggacagggacacccagcgtgagtttgagccgttcgttgaggccagctggatttataacagcaggcagtacggcacacagatggacggagccggcgcagccattcagggcagccgcaacacgggagaggttaaggcgggcgtggaaggcaggctgacgaataacctgaacatctggacgtcggtgggccatcagatgggcggagacagctaccgggatacgcaggggcagctgggcctgaaatacctgttctga

SEQ ID NO: 170393 - DNA, 252 bp, Enterobacter cloacae
atgagagcagtaagttacagtgaggcaaggcagaacctgtctacaacaatgctgcaaacggttgaggacagagctcccgtacttataacccgtcagaacggtgaatcatgtgtgttgatgtcacttgaggagtacaactcactcgaagagacggcttatcttcttcgttctccgaagaatgcgcgcaggcttatggactcaatagaaagcctgaaaagcggtaatggtgtggaaagggaaatcattgagtga

SEQ ID NO: 170394 - DNA, 285 bp, Enterobacter cloacae
atggtatgcggcaatctttttgataagccgtttgccatcgttttcaaacagcacaaagaaacgaatgtaatcgagcagcagttcgcgattaaagaagccctgcactaccgttttaagctgccagtcaaactgcggcttgtcgtcttcgttagccacggttttccacggcaggaaacgctcttcatcggcggtcagcgagccgatacgcgcattctgcccgtcgcttaccaccagcgcttcattgcagataaacaggtcgctcagttcgtttttataggtctgtag

SEQ ID NO: 170395 - DNA, 303 bp, Enterobacter cloacae
gtggataaccttgtcttcctgcttgtactcaacgggcacaccgtcgagcagcagatgatggaaggctttgttgctgacgacaagatccgggctttgggcatgggcgatacgcagtatcacctcttccagcacggcaacagggagatggggattgatggtttgcagttgctccagcatcaccgggcgaagaaacacatcatgaaaggaagcacgcaacgggttgtcgccatccggcgcaatatctggcccgtgcagcacttcccagccctgtacagcaaaccattgcaggcactgctgttctaa

SEQ ID NO: 170396 - DNA, 1443 bp, Enterobacter cloacae
atgagttttgagttatatgaatacaaaattgaggatctaggtaaagttatcactggtaaaacaccaccttccaaaattagtgatgcttttagcgcacaaggtattccttttgtaacgccaaaagatatggacggtcgtagacttatagataaaaccgaaaggtatttgtcttcccagggtgtcgaagcggtgcggaattgcttactgcctcaaaatagtattgcggtatcttgtattggttcagatatggggaaaacggttttattacccggtgaaagcattactaatcagcagataaatgccatcgttgtagattcagaacattttgattacaagtatgtctattattatctttcaactctgcaggatgatttcaaagcaattgctggaggaagtgcaaccccaattttgaataaggggcactttagccaatttaaggtttcattacccgttaaacccgtgcaaaataaaatcgctttaatacttgactccttggatacaaaaatagaagtaaataccgaaatcaaccatactctcgaacaaatggcgcaagccctgttcaaaagctggtttgtcgattttgaaccggtaaaagccaaaatggcagtgctggaatcgggcggttcgcaggcagacgcgatgcttgccgctatgacagcgatttccgggaaaaatgctgatgcgctggcggtttttgagcgtgaacatcctgagcaatatgccgagttaaaagccacggcagagctgtttccatcggcgatgcaggagagcgaggggagggatattccaaagggatgggcggttgttaaaactgaagaattgactagtaaaattggaatggggccatttggttcaaatattaaggtatccacctttgttgatgaaggtattcctataattagtgggcagcatttaaaagaatctattcttaatgatggtgagaataattttgttacactcgaacatgccgataaattgaaaagctcaaatgtatttagcgaagatatcatttttacgcatgcagggagtatagggcaggtttcaatcattcctgaattttcagaatatgatcgttatgttatatctcagcgacagttctttttgcgtgcagacaaaaaactaatatctccttattatttgctatatttctttagatcgcggacaggacaacatctattattatcaaacgcctcgcaagtaggtgttccttctattgccaggccatcatctcatctgaaaaatattgagttagtagcacctgattttaaactagtaaaaaaatttgaagatcattgtaaaaccataatcaacggggtagttcagcgtaaaaaacaaacggtgttattaaaaaatatccgagacacccttctccccaaactcctctccggtgaaatcaccctgccggaagccgagcaggcggtaagcgaggcggaaaatgtataa

SEQ ID NO: 170397 - DNA, 543 bp, Enterobacter cloacae
atggcaattttaccagaaaagatttatatggtttcaaacccatatgaatacagtgtaacaattcctgctcaaacacttctcgttatttcatatgtcagtaccggtaattcaattacattagataacagtcaaagtgatagtgatgaagtatttgctatcacctttgaaactagcgttgcttcagaaaagctattctatacaaccattactaatggaaatgccagtacttcccaatgtgaagtaatcgatccaacaaaacatactgaagaatacgcacgtattcgaaatatgatcgatgagattgaagcagtaattgaagcaaaaatacaaggtggtgcgaactatagcattacaattaataacaaaactctagttagtgagtcattagcaaacttagaatctattcgtgctcgttatattgaacgtgctaattctctatgggctaaaatgaatggtcaatctacatctggttcaagtaaaccatttaagagtatgacggtatttcgtgatcctaactatcaaaatagatggggaacacgttaa

SEQ ID NO: 170398 - DNA, 2373 bp, Enterobacter cloacae
atggcaagaaaaataagcactttagacaaaatattcaaaagcagcggaaataaaaatattattttgaaaaaggcatttaaagaactagaaccaaaaactcttcaaactttttctaagattatgtataaaaaatttcctttcaataatgtgactagtatcggcgaagcaattgaaaacagaacgatatatgaattcaaaatatttatacctgagcctgtgaaatctgctagtaacaatgtactatttcattatgtgattggaattcttaatcgaaaccaaaattcaatctctaaactcatctctttagagaaaaaatatattgacagtttgctattcgataaaccgaaagatgcacttgatattttagacgaaattgattcgagttttggtctaagtttttggagtattacccaaagaaataacatagaatacctaatgtatggagaggttcgaattggtgatgaaacaaaaaattataatgatgttgatgacattttaataaaaattcaccaaagcaacttaaatgaaataaatgatgggattttaatcgctccggaaatcatagactcagaagctttgaagaacggtatttatagcttcatcaactatagaatttttggtttaaatagtagtgatattacgtttgacattttccaagtaattaaacatgagttaagttcaacattagtcgatttatataaggcatttgaaacactctgttacatgaccattaccggcatatacagtggttatgatccatattatgaagacatactgaaatatatttcttctatagatcactatctttttagaaacttaaacttaaatgaagatttatcagaagaagcacagttgatttatgatagctatacgctgaatgattatgctgtcactatcaatatattatctaaaacaaaggaattcgatccttcaagattcaagattttcacaaaatcactatcattaactgatacaaaattacctgaggaatgtttttatttcttgcaatcaaatctgatgtctgatgtctattcaaaaaatgaaaaattccaacattcgtcaactagactatctaatttaaatttggcgtttagaggaaccttagtttttaatttgataaagcacagaattaatattgagtcaaaaggatattataaccagaaagaatcctatattatcaaggctgaacttttattttcaaaagataatacccctttgaagtctatcattttatctaatagagcacagggaagtaatagttacaaactaaaaggagtaactgcagacatcttcatgaaaaaagaagaacctcatgatatccatcataatgaaagaaagctcaagtacttcatacttcagttaatgaatgaaaataaagtcagtgaggcatcgaattatcttgtcgataaagtaacttataaagacaaggaattatctcagctatacataaaaatcaaatcgatgacgggaagaatagaagatgcatgcagatgttttttagatatgtacaagatttctccttcagcaatcaactactttattactgaagaattttactctgcacttgagtcaagtgctaaaaatgcaactaatattgacacggccatttgcttatatttatgcaaagatagttttgtcgataaaaaaatgaatatcaacgctacaggtatcgctataggtaaatcaattagatatatgggattaaaacatccttcagaattgccaattgataaggctgatggaatgttaagtttctatttatctgacgtttgcgaaaaggatatattaactaaatcatggttgtatagaactcaaagcgaagcatatgatgaaagaattagaatttgcaacatactagttagcaacaaaatgggcaatcaagataaattagtaaatgagtcgaagatattgtctaaaagaaaagttctagaagttgcagaaaaacaagttaatagcactaagatctatgcggataaagattatatactaaataatgtttgggaacagttgaactttctctttaaagacatagtagaaaaacgaagtgagtttggagatattctcgatagcgagattgaacgagttttaaaaaacttggatctagaaaaggttgacataagcaccgtgacaaacatggggttaaatattttacctgcacacatacttcaatatgcagctcttggacaaaattataagttaaaagcaatatttcaaatgattaagacgtacattgaggagtattgttttggactgaaaggacttaatacatatcttagtacaagaattcgacacggcacgttagaatcaaccattacaagtagtctagtaagtaatgggttcatgcctgccgatgataatgatgaagataggtaa

SEQ ID NO: 170399 - DNA, 492 bp, Enterobacter cloacae
  misc_feature (317)..(326): n is a, c, g, or t
atgaaggttgctttaatcactggtatcactggacaggacggatcttacttggcagagtttctcctggaaaaaggctatgaagtccatggtatcaaacgccgggcctcttcattcaatactgaacgtgtcgaccacatttatcaggacccgcatactaataatcctaaattccatcttcactacggtgacctgaccgatacctctaacctgacccgcattttgtctgaagtccagccggatgaagtctataatttgggtgctatgagccatgtggctgtttcatttgagtcgccagaatacaccgcagatgttgatgnnnnnnnnnngaagcgattcgattcttgggacttgaaaagaaaactcgtttttatcaggcgtcaacctctgagctttacggcctggtgcaagaaattccgcagaaagagactacccctttctacccgcgctcaccatacgcggtggcgaaactgtatgcctactggatcactgtaa

SEQ ID NO: 170400 - DNA, 927 bp, Enterobacter cloacae
atgcgtgccggtgccggtattgcccgccgcgtcggtaaccgatgccgtaacggtcacgctgccgtcgctgaggccggaaatcacgctcgccgggacgcccacgctccagttgcccgccgcgtccagcacggtggtgtaggtctcgccgccgatggtgacggtcaccttatcgcccgctgccgcgccggtggcggtgccgctgatgatgtgcgcctggctgtgttctgcgaggttaatgacatcgtcgcccgccacggtgttgatggtcaccgccggaacggtggcgtccaccgtcaggttgtgatcaacggacgccgggttgcccgccttgtcgctgaccgatgcggtaacggtcacgctgccgtccgtcagggccgcaacatcggacgccggaacgttcagcgtccagctgccgtccgcgctgacggtggtggtgtagtctttgccattcagcgacacggtcaccgtctggcccgcttcggcagagctgctgccggacacggtcagatcgctcttcgcttcggcggcattcagaatgtcgtccgtcgccagggtgttgatcgtgacggtcggcgcggtggcatccacgctgtactcacgtcccgccgaggcgctgttgccgttcacgttggtgacgctcacctgcacgctggcatcgccgtccttcaggccagccagatccgcagacggtacggtccaggtccagttaccgctgtcgtctactgtcgcactatagattttgccgttcaggctgatggtcacggtctgcccggcttccacgttgatggtcgcaccggacagcaccagatccgcgcccttctccgccgcgttaatcacgtcgtcggtcgcaatcggattgatgctgatggcaacggtcgccagatctaccgtcacatcgtggctgatggtaatcgggttacccgctga

SEQ ID NO: 170401 - DNA, 750 bp, Enterobacter cloacae
atgaatgatcttcgcgccagggtttttctcgaggaacgcttctgccagcaggccgacaatgtagtagccctcgatgaactgccctttctcgtcgaacaggaagcagcggtcaaaatcgccgtcaaaggcgatacccatgtccgcgccgtgttcaatcaccgcgttgcgggtgtcgtcacggcactccggcagcagcgggttaggaatgccgttcgggaagttgccgtccggggtgttgtgcactttgacgaaggtcaccggcacgttcagtgctttaaagcgcgcttcaagggcatcgaccaccgggccagccgcgccgttgccggagttaatcaccagcttcagcggcttcaggtttgccacgttgatgtagcccagcaggtggtcgatgtactctttctgcaggttgatttttttgtagctgccgcgcttcgcctcgttcaccggcgggaaatcgttggcttccgccagacgctgcacgtcgcgcaggccggtgtcgccgctgataggacgggcgcccttgcgcaccagcttcatgccgttgtaatccatcggattgtggctggccgtcacttcaataccgccgtccacgcccaggtggaaggtggcaaagtaaatctcttcggttccggacaggccgatgtccagcacgtccacgcccgcgtcctgcagccctttcgccagcgccagcttgagggattcactggtcagacgcacgtcaccgcccagcacgatggtctgcggttttaa

SEQ ID NO: 170402 - DNA, 201 bp, Enterobacter cloacae
atgaatgccgtcattgagcagtttttccagcagttccactgccagattacgctgcggcatttcccgcacttcttccaaaaactcatcggacagcaaacctatgttcggtttatccagcccggcgagtgcgaagacatcctcaaccccggtcgcgacaaccgcgttatcgaggatcttgctcagcagagagtttttttctga

SEQ ID NO: 170403 - DNA, 153 bp, Enterobacter cloacae
atgccatatattctgcatggcttcacggccatgcagaataaaggccagaatgccatccgttataatttcttacatagtttgtcatattaccgaaatatcctcccccacccattctcctctatgcgaattaagattgatctgtatcaattttaa

SEQ ID NO: 170404 - DNA, 1083 bp, Enterobacter cloacae
atgatgaatgaaacaaacttaaaggccgcaataatcctcgcattcatggcgattatatgtgcattgttatttttaaataagtttaacaaggtaatatttggtttttttgagtttactgatgaaagcctttcaaaacagaaattattcaagatatcactaacatttcctttttttattgcgttcttactgtgctttccaatttggtttgacaattctattaaattggaccttagtccaagtggttatgaaaattttcttagtatattcaaattacctattggtgtttggtctttatcaatacctttagttgctattgttgcacatattcacaggacaattcagacagctgcacaattagaagtcacgagaaaaaagaatttaggcgatacatttttcgcacatcataaatacatcactgaagcattatctaagttccctgagtatactacaagtattaataagtcagggtttactaaaaaagtcagcgaaccatacaaagtatataataaaatctttgaaaactcttcttatgaaaccggattagttatcaatgatatatctggaaaattcaattccattcaagatagtataaataatatcgtagttcaccttaacaaggctaaaacaagaaaagataacatactaggtaaggttgatgatctaaaccagataataagcaccctaaatagcctcaacagaagttgtactgtaagcattcaggaatcaaaaacaaattatctttatatggtaaaagatcccaagcagactacaaaactagtatttgtttacgaaaatgaagaagagctaaaaaatgatttaaaatactcgatagaactaatttcatctatttgtgcattgatgaacaaacgcttggaaataaaggacatactgcactattacgtcaacaccttcaatgaacgacatttttattttaaggatattttcgataaaataattttaacaactaatccaataggatatggaacagctttgaaaatttctgataagtatgacgaggattatcaagcatacacagaaagtttaaaaatgaaggcgtatgttgctcaagcaaacaaacattga

SEQ ID NO: 170405 - DNA, 576 bp, Enterobacter cloacae
atgaatttagaaaaaggcgggcgcggagctatagagcgtatggttgaggcctatggttttaagacaagacaagctttgtgcgaccatctgggcatatccaaaagcacccttgcaacacgttatatgcgtgactctttccctgcggagtgggtgatacaatgcgccctggaaacaaactcaaccttacaatggcttgcgacaggtgagggtctcaaaacatgttcacaaaatgaaacctcaaaaaatatacctaaacaagttttgattggaggagagttgagaactagcggttcatacattttcgacgatgcctttctacctaaagacttgaaaaatccctctgtgatttcagttgattcagagtcggacttcatttgtgaaagagattatggtgatgttcgtgatggaagatggttcgtgagtatcgatgacgaaatcgtacttagaacccttaccaggctacctggcggtcgtcttaatattgaaggtgggtacacctcgtttgagtgcgccattgctgatattggtattattgccaaagtcgtaataagttgcatcaggcaaaaaacaccttga

SEQ ID NO: 170406 - DNA, 1392 bp, Enterobacter cloacae
atgcaaaaaatcgatgtacctaaaaatgtacctgaatttccccttccaaatccatcgcttaagcgtcgtggcaacacatacagcatcagggtgcaacttccttcacaaattctgaaaatgtactctcacaaatacagtgacgtgatagtttcgctgaaaagatgcagtgacttgataaccgctcaaaaaatgttaagaaaagttaggtttggtttcagtctgcaacgcaatttgaaagcgaaaaatctatgtgaatatcgattcaaattaaaggaattaatattcagtcttatagatattgaacaatctgaagaaattattgtgaacgatattcttaggactatcattctaaatcaggcaaaaacagataacgtgatattgtttaaagactggtttccaaaatatcagaaagaaaaagttaactccgggaaatggtcaaaaggaactgaggaaacaaatcaaacaacttacaatgagctttcattatatttcaatgataaaaatttaaattcaatgacacatgatgattttattgaaatgagagacgcttattttaaagataagttagagctagggagaagcaagggagaagatacattaaaagcaacggtgaatcttaggtttagtaaaatcattgcattctttaaatggttacaagtaaaaggggtgataaatgacaatagggcaacggatattaaatttagagataaacgtgccaataatgacaaaagagggacgttcacgaatgagcaatgccatataatcctggaatcaatccgtaatggatttcggtacggaaaccgtaagaaaagaacttacggtgatgatggtgaacgcatagtacagcaacttatagtgctaggaatttttacgggggcgcgtatagctgagttacaagagctatcccaagacgattttctgtgtgatgcggatagtaatccaaaggggatttatattcatggtcaaataaaaaatgcatcaagcgagcgccttatcccgttaggggattttccagaatggtttaagcttgatttatcattatttagagtaagtaagagtgatgattataaatactttacaaagaagacgttggggaaagaaataaataaaactatcaaaaaaatattacctgaagcattagagtataatctaacgtttcattcatttcgtcactcatttgaaacgcgtgcaagtaaatatgaggatattagcacaacacatattaatcagataacaggccacgcctttaaagatacgggtcgaaaagtttatcttgcaagtaatagaagtttaaatgacatagcacacttgttttctgtcattaaccagataaatggtgtattgctgaataacaaaatgaattgccctgaaacaaacccacataaattttaa

SEQ ID NO: 170407 - DNA, 396 bp, Enterobacter cloacae
atgaataagtttattttaggggttctgttggcggcatgttccaccactgcttttgcaacaccggaaaattacacgcttaaatgcgatacctacaccggaaaagtaatgttattcactggtcagggtttccgtgatgtgctggttgtaggtcaggataaagggcaggattttttagcaaccttcgatgttgatgcgggtaacgggctgcattatgaaaccctttcgcctattacgcatatggaaaaaggcgataccacaattaaaaccgtttttgtggaaggtactgttgaattaatttattacggtgatggcgcggaaaaacattttaatattattgatggcactggaaatcacaggtgtaaaatgaccggatataatcaggacaaaattagttaa

SEQ ID NO: 170408 - DNA, 207 bp, Enterobacter cloacae
atgactaaccataaccaacaatcaacacttccagatgatttaatatcaaccacgcaagcccaatccctagcgggcgttggggctgctgaatggaagcacgccaaacgttataacccttatgaatttcccactaattacagcaagaattgccacgggaaatacagcattaaagaagttaaagcatttttcaccaaatttaaaaaatag

SEQ ID NO: 170409 - DNA, 1545 bp, Enterobacter cloacae
atggaaaatcaaaagataaggggtatgtatattgacccgctagcaaaaccatttgattacgaccctgaaattaaaaatgaagtggtggaaactaattccgttaatgtaattctaattaatgcgcctattgagagtttaggggaggataaaaataatagttatgccgtgttgcctgggtttgatcagtacatttttgaatatatgaataatgcggcgcaccgtgaattacaggcggcggctattatggcaacattgcaaacgctttccgcagtatcaccaaatattattggatataataaaacaccattaggtttagtgacttttaccgcgtgcccgtctggggctggtaaagataaaccacaggaaatatttgatgatattatttgcgcggctggaatggcggcggcgggtaaattcacgtctacaaaatcaattttcatggatatttatcacggaaaacgccgcgccgcatttttgagtgatgaagttcacgaacaattagccgctatgacttccaaaaaatcggagtatatgaacggttcggaaggggcgattatgtcaattaccgaatccaataaagcaaaactatcatcaacatataaggccgacatttgcaaattaatcagcgatgaaataaaaggctacaaagccaacatcaaaaaattacaggctaatgaaaatgatgatgggaactttatttcacctgaaaaagcaaaatcaatcattgcaaaaattgaggctaaaattaattttgctgaaaccgaattgaaacaaattcgtgaaactggttcattaaacaatgtgcgtttaaatttctttggttccaccacgccaattgaaatggaaccgtatataaataaacgcatgttgaataatggtttccttgcgcgttgcctttttgcttacattgatgaagtaaatccgtctaaaaaaccaaccgcaaccgaattagaattaaattccatacaacgttatgcggcgtgggtagcaaatcgcaagggagaaattaccgcagaaccagacgcagaggattttttagagggaattaggctgcaatatgacgagccgcattatttgaacaataaagattacggcgcattgtatcgccgcatgtacgcaaaaacatgtaaggttgcatctttattagctgttggtaatcacgatttaaaaattacgtctgcacaagcggaagcggcttatgaaattgtgcgtgaaagtttcgaaaatctaaaagatttgtgtgaaaatggcgattcatcaaatgaaaaattagatttcgagcttgaattagagttaaaaatttatgagtttattaattcatttggtggtgagtgcgcggaaggtgtgattatagataaattgataaacaggaaaaagattttatctaaattaagcaaatacaatattaaagcgaaagatgttttttcaccattaataagatttgggtatgtttcaggggaaaaaggcgcgaggggtggctttaaatacaagctaaccgaaaaaggaataaaacgcgcaattgatttaactaatgatgcggtttaa

SEQ ID NO: 170410 - DNA, 207 bp, Enterobacter cloacae
atgaaatttgaatgggattttgataaattcgttgatgattcaattgaagaaatgaaaatcatcaaaagtaaacttgatgctgtagggctggcatcgcctgaaaccgtagcggcaatttataacgcaagaaagcgtgaaatgattttcactgatgaatgtgcaaattcaattgctgatttaatgcgatacaaaaccgaagttatttaa

SEQ ID NO: 170411 - DNA, 216 bp, Enterobacter cloacae
atgaaaaataaattcaaatatattattcgtgggcgtaataaaatgaaacccttaattgaaaccagtgcattaaatgaagaaattcaaaagctaaaacagattaaagaagaattggcgaaacaagcccctgatttgtgttgtgctgaggtgtgcgccgccatttaccgcgaattggcaacagcagaccgcgaatttttcgccgctaacaagcattaa

SEQ ID NO: 170412 - DNA, 459 bp, Enterobacter cloacae
atgtcaaaatgtcgtaagtggtgcattaaaaggctgctaaagtcagttgatgaaaatctgattgaaaaaccttttaccattgtggatgcgtacaataaaaaggtatatgacagcccagaaaaagcgcaacgcatcattaatgcacagaacgccgcgcacgactgcacacaatggaaatttgtgttgttcgaaattgaaattgatgaacgtcacagccatctagcctatgacccagaaaatccggcatgtaacttcattcaagcgcctaaaacgttcacaggcaaccgaaccacgcagattaaaaataaattgcgtgaagaagcagaagaagcgcgtaaaaaagatatccgcgataaagcgcaacgcgaatttgaagcaaaagaaaaagcgctaatggcaaaaatgacgcctgaacaattagcggcctatatgcaacttaaacttaatgaaggtaaataa

SEQ ID NO: 170413 - DNA, 264 bp, Enterobacter cloacae
atgtatacggtaattatggttaacgccgccgatgaaatcgacccagccaaaaaagcacttaaagcggaggggcgcacgttcccaacaatggcacaggcgcaagaaaatgcagacaagcgcaattcacaaatccccgaacgtatgcagggcgttaaaaaatatgttgcggttgaattgagcgtatcagcacagcgcgaaattgctaaacgtggcgaaactctcacagtaggcgagcgtgcgcggcgcgttaaagcggcattttga

SEQ ID NO: 170414 - DNA, 654 bp, Enterobacter cloacae
atgaccgtacaaattaaagccgccgtgattaaacccgcagccgctttcaccctaaccattgataaccagccagcaaaaaatgaagtggtggaacaaaaatccccattgcacccctatgaatcatccgactttaaaccggaattttgtcaaatcgccgtggaagtcatagaaagctacattgaccgtggggcatgtgttgaaccgcttgcaccaattgcggcgcgtctgggcgttcctgtgcgtgctgtgctgcaatggacaacagaacacagcgaattttacgatgcaatttacgacacgaaaagcaattgtgattttgaggtattgcagcgcgtgcgcgaggaacaatatcaactggcgctgggttatgtaatcccagaaacaaaagtattttataacaagtcgcttgataaaacaattgaacatacgattgacaagcattttacaccagaccttaaagcaatcatggatttgaattatcagttatcgccagaataccgcgatatgatggataaaaaagagcgtgctggcgctgcacagatgccaattagcgtaaatttcggtgttgctgattgttcaattcctggtgctgaagaggcaattttggctgaaatgcgggagctaaataatcagtatggggagggtgaaaaatga

SEQ ID NO: 170415 - DNA, 387 bp, Enterobacter cloacae
atgattaagccagaagaaatcattgctaaatttcaggccaataaaacccaacgtaacgtaatagccgatgtggtgcgattcgttgaaatgggtgttgaacgtcgatttgtggcggcacaatttggaattagtgaagattctgttgatgcaatttaccagtatcaattaaagcatggcggcacaaaggcgggtttactggcaaagatgcaagccaataaaaaacagctaattcaggagcgtaacaccgcaatatgtgaaatgtataataaagggtttagcggttatgatattgcggctaaattcggtatttcaggttcagcggtgtacaagattttgaaggataacggaattaaaacggggaaaaattgggagcctaaatttgcctaa

SEQ ID NO: 170416 - DNA, 1596 bp, Enterobacter cloacae
atgattgaatttacagtgttacctcctaaagtttggccttcatcgccagggccaaataaagtttatctggttcatcaaacatggaatgattattcatacaaaacattgtttaaactttttgtgtatagcccgcaagaaaataaaattcttgacatcggccatatcaaaataggctttgttggtcaggatatttcattaagtacgtacgacaaaattgataagaaattcatccagattgataatgatttttttagccttgcagaaacaccagaattttatgaaaatctctataaggttggggcgcagcgttgtaaagaaattttaaaagcacttaactgtgtagttgttagcgatgaggcaatgagtgttgctaaagaggaggaggttttcaagatatccttgctgagagatattaatataaataccattcaaggtcagtttgtaaggattgttgagggagataaggccttagtagaatttaatttctcttttgttcgagaaaatcataaattttcggatatgaaattaaaattcaacgttaatcctatgcaattaccttctagtaatatacatgctttaataggtaggaacggattaggaaagacaacattacttaatgaaatggtctcttctcttgttggtgaaattaagcctcattcagcttcttttcatgattcttacggtaacgtaataggtaaaaattattttagtacagttatatctgtttcatttagcgcgtttgacccattccgcccaatgatggaacaagacgacccattaatgggaacttgttactattacattggtcttaagaaaccacaaaatacagattgtcagaatgacctgaatgacctgaatgacctgaatgacctgaatgacctgaatgacctgttgccaatgcctgaacttcatgaaaagtacgccaactcggtaagtaggtgctgttctgatgattcaaaaaaagaattgtggaaaaaagccatacggaatttggagtctgatacaaattttaaagatctgaatttaacagaacttgccgatgttgaagaaaatgaaagagtgactgtatgtatagaacgtctgcaaaaaatgagttcagggcatgcagttgtatttatgacaattagtcgtttagttgaggttcttcaagataaaactctaatcttatttgatgagccggaaggccatttgcatccgcccctattatcagcatttcttcgttctttaagtgaattgttgcataaacggaatggtgtggcaatcatggctacccactctccagtagtggtgcaagaaatcccacgaggatgttgctgggttttgacccgttttggcgatacaactcattatgctagaccatctattgaaacttttgctgagaacgtaggtgtaatcacaaaagaagtctttaagttggaaatggaacgttcagggtttcataaactttttcaagataaagtaaataaaaactattcatttgacgaaatagtggcaatatttagagggagtatagggttagaaggtcaagctattttgatgagcatgataatgctaagggataaaaagcaaaatgagaatggaggcaagaatgcgtaa

SEQ ID NO: 170417 - DNA, 858 bp, Enterobacter cloacae
atgcgtaagttgacataccctaacattcagtgtgctgatcctttttcaacttgtatattatctgtggatgttaagtataatgattacatcaccaggatgaggggcatatccggcattgttgcttcggattggaatgactttaggagtcgcagcgaagctaaagatttctatttatttacaccatgcttaccaagaaatgtaaagcaaataattgctggagacgtaaaaaaatcagaattgaaagctctttatgaaattcatatgttgaaaaaagggagtgaatcaagaaaaatatatgacaagctaagagcttgtgctggtggtacatgtccactttgtggaataagggatgtgtcaactttggatcattatcttcctaaagctcgttacccgttgcaatcagttaacccgaaaaatttggttcctgcatgtcgagactgtaatacagggaaattagacaaaatatttaaaactaaatctgagcaaacgctttatccttatgacgaggacgcgaaattttatgaagaagaatggatttacgccaccattgagagaatgcaaggacagttggtttttgatttttatgcaaatcctcctttgacctggcctcaagttgaccgtgaacgagctataaatcatttcaatgcctttaaccttcgtaaagcttactccttgaatgcttcattaatggttacgacagttaaaaccaccattacttttcttttgaccatgggtgacatcgatacagtaagaaattggtgtcgagctaatataaccgctgaaacacaaaatccatctaataaagcaatgtaccgagccattattgcagacgatgatttgtgtagcggtgtattttga

SEQ ID NO: 170418 - DNA, 333 bp, Enterobacter cloacae
atgatgatggcaacaagcaatataaaaatgcagcccgcgggtctggcaatgtgtattgccttcgcgctggcgaatgcagtccccgtggttaacgcccgtgattcctttaacgccgaactggtggagttggataatccgggaatggctaaagccgatttatctgcatttgaatcaggttcgcaggcaccagggaaataccatgttgacatcatcctcgacgaccagcttattgagaccagcgatattgattttgttgccgggaaagatgggctggaaaacgatagcctgcagcccatgcctgagcatggatcagctaaaaaaatggggcgttaa

SEQ ID NO: 170419 - DNA, 813 bp, Enterobacter cloacae
atgtttatggcttttaatagctcagttcgttctggtgatttatcacgtcaagtcggtgcagtgattagccgagatacacaaataattgcaactggcgctaatgatgtacctaaatctggtgggggcctttactgggctgaagtgaacgaagaaactggaaaagttgaagatcaaccagacggaaaggactatacaagagaaggggactcaaataaacatgcgcagtcagtcattatccaagaaattgcgacgaatcttttaaaccaaggcctagtagatagtttgcgtgaactcgatcttaaaaaagcacttaaggaaagtaaaatatcggatttgactgaatttggccgtgttgtccatgctgaaatggatgcattgttatcttgtagtcgtgctggtattcctactacaggttcaacactttattgtacaacgttcccctgccacaattgtgcaaaacacattattgctagtgggattaaacgcgttgtctacgtagaaccttaccctaaaagtcgtgcgttagatttccattctgaatcgatccatctaagatctgaattggaacgctcacttaaagataataataatctagtcagttttgaaccgtttattggggttggaccacgtcgtttcttggatcttttttcaatgagtcttggcagtggttctaaattacgccgcaaggataagggcggtggtatccttgattgggataaagcatctgcccctattaggacacctttattatcaaagtcttatatagaaattgagaaagctgctgctgagatgtgggatgagtgctcattttga

SEQ ID NO: 170420 - DNA, 1062 bp, Enterobacter cloacae
atgatcgcaaaaagaattcagggggttgaggtattaagagtctttgctatatttatggtggttttgatacattcaactccggagtatacaaatagttcagggtcaaacttagctgcactaatcttacagtcaatatcacgtgcaggatttatctctttttttctaattagcggttatttcgctctaaacgaaaaaatagttagcttgaagaaatattattacaacaggtttgttactatagttatcccgtttttactttacgcttatattcattattttatggtgcattatgactttgggcgggccgttaattctctgtcaggttttttttctataaacactctgacggattttctacatgcgattattatcggacccgcttttaatggttcaatgtttgtttctttacatttctggtttatctactggatagtgggtgcttatgccgtggctccctttgttggttatgttattcaacgtatagagccagcttcgagactcaagtctatcgcctttttgctaggtgttagttggttgcacctctatattaatcgctatttcccaaatgctaacattatctctattccttttattaccgatggatggtttgtttattttcttataggcggacttctgtacggcttggatctcaataaatatagaaaatatgcactcctgttttgcgttataggatatgtattgactattttcttaacttggtacaattttgctatattgagtatttatcaagcgccttatggtattgatatcaacatggtgctttgcgcatgcggattttttattattttccaaacgcttcgcgagaatccgttagcgacgtggtttgcaagggcatcgaaatacacctatgggatttatttgactcatgtatttatgatgtattttgtaagcggctttactaaaacagctacgagcagtgaaattgccaactctgtatttacggcggtggttgcttttacattggcgttaattttttgcttttttttcgataacctatttatttttaagttgataaagaaattgaagttaagaaatgcttaa

SEQ ID NO: 170421 - DNA, 1131 bp, Enterobacter cloacae
atgataagcgaaaaattactgtatatatcaatgtccctggagaagtctaactatggcggaagcattgtatctcgagcaaatttaaaagccctgaaagccaacgagcggctacaggttaaagagctcgcgatcgtcaggaaagaagagagttcttatgcttgggaagtgctggcgaagagctcaaaaatacagacggccctcaataatttacgcggttacgcaggcagactaaatgctgaaattttcagaaaaattaaagagattattgaggaatatcagccaactacgttatatcttgattcaagtctgctgggtagcgtggccgaatggtgtaagagcgcatacccagctattaagattttaacctttttccacaatgcggaagtcgatttcgaaaaagatcgccttaagagcggtaaaatacaatatctaccatcgcttttctcaaccgctaccgctgaaaaaaaggcagtcaaatatagtgatgtattggttgcgctgcatgaggccgactcggaccgtctccttcgtctctacaaaagaaaagcagacttctgcgtacccgtctgcattgttgatgaacgaattgatgatgaggtgctgtacggtactgaggccgcgcagtcgaggccgtttaccgttggttttatcgggacagctttctatgctaataccgaggccgcacaatatatctcgcagcacatcgcgccggcatttattgacgatagccagatacagtttgtgatcgccggaaacggatttgaagcatatgcgactaagcttgataaacctaaccttaaaacttacggcttcgttgagtcgttggcagatttttatcagagtatagatgtgattttatctcctatctccgttggaggaggtatgaaagtaaaggttgctgaggcgcttaaatataataaaaaagttattgcatcaccttttaccctgattggttatgaacagtcacttgcttgtcctgatatcatcagttgcagcagcttggacgaatataaagtagccattcaaaaattaaaagacatgcgaactatatcgtctacaacaaggacactcttccttcaatattattctgacagtgcatgcgcagaatattttaaaaaaatatttcaataa

SEQ ID NO: 170422 - DNA, 1320 bp, Enterobacter cloacae
atgaataccgatatgaatagaattggaataagcacttcgggtagaaaaaactacgtattttcatcaatgtgcttactgataattctcctggcgatgaccctgaacgatctgccggtgcaggcttttttaggtacactgggcgccagtccaatgtgggtagcctcggcgattatctttatgctatttcttgttcataataagttttgtctatactttgataagtacagtcgactctttatgatctattttttgctgacatttagcatctcgcttatccagtgtttctggttctatattgctgaaggaactatactaaattcgtacggagtgtctgttctcagtaagcatatctttgcttcttcttattattttttctatttcttgactatttattgtgcaggttatgcaatacgcgctgtaagcagaaaatttctgaacaaagcggttattttaatcgcgttttttatgacattgattattgctatagaattcgttgcgcctgatgtacttgcaccgttccaccttagcatggaaggctatggcgttggattgcggcaacgcttgctctcgcccgaaccgtcaatagccgcttttacgtttaatatctttttgttattggcgattaccctcagcaacgttaatctggtcagacttattctttggggggcgctgctagcgggtaacatgttgattggctctaagtcctcactagtgttgatcatgtttggcgggctgctggtattctatttcaacatgacattgattcagaaactaaaatcactgtttgcacttatcccggttgcaggaatagtcatttatattgttatgcatacggtacttcctgcgttgatggttgatattgaaaatttcaccagcgttagcacacgcctgatcacctcgctatgggccgtttgtagtttattctactatccgcttggtgaggggtatggaacctataccgcctggttcgttcatccgctagaggcagctataagaataggcaatagtcttacaccgttttcgcttaacctgtccgaaatcaatgatatgatcgatactggtaactatctttctgcaaaatcaggtattctcttttcagttattcatagcggttttatggctgttattttctactttattgtttttcgaaatgcttttcgggacgttcggcagaccaatgcaggttactaccaaaaaatattgttgcgtataacactttggtactcactgctgtcaattctgtttgctgttaatatagaagtgttatatgcgtttctgttgccttttattgtcgtaaattatctaaaaacaaattcatag

SEQ ID NO: 170423 - DNA, 2016 bp, Enterobacter cloacae
atgtcaaatataaattttaaagaattagctaaggattgcgttaattacaaaaccaaacgattagtcaatgcattaagctcgactggaaatgaaggagggttacatagctttcttgagtatcatgttaaaaattttaaaaatttccaaatgcatgactttgataaaagagagaaaagaaatgtttttttagaatcaattattaaaaattgtagtagtcaggaaataatagacttgacgaaaaaagtattaacaacatgtcaaatttctgaaaatctacttgatggcatcaaggatggattacataatttagagatcatgaaaaaatcggtacgggaacaatgttggtccgtaattagccatgctctggatgaggggtattttctccaggatttgatagagaaaaatatacaaagctttgatttcaaagaatcaatgcttactacaaatgctcggaatattaaaaatgatgaaggaaagtcgttctctcctgattcagcattagataaaatagtgaactatttgactcttacgttaaaaatgttttcctatgagaataaactctgcaaaggggacgtaattgtcttgccggaaaatattgtaatggttgaagaggatataaaaaaagcaatccctgttttttactatgctctcatttggaatgaacttctcacatgtacaaaaagctgtatctattttgataatcaattattaacgatggagtcaaaggatattccagaagattacaagagagagggggttgaatcagttgtagtttttgatagaacaattgatagtcttgagaggtatgatgtgatctccaatgaaagactttcaagaaaaattagccagaatttttgggaaggagtcgctaagtataatcttgaggaaaatttacttaaagatattacagagtggcctggaaaaattgaccataggatggtaatccttgaagagttacctgccttggtttctctctttgatgtaatttcgagtaatgatgttaatactgtagttctagggctcaccatccgtgagtgggttaggggatattctgttattacttatatttccaaaaataaaaagaaaaaaatacattatagtcacagtgctcttgtaggcattctgcgtcttggaggtttgtcagagagtagtgcgaaaacatttattgataagcttacattcagtatgaaaagtcgagatatatatgactcgccattaattaaagttgaggataatacatatgtattattcactcctgcttatacatcccctttaattagtaacatcatactatcaaaattcgcctctgaagaagcagatcttacggcaaaaggatatggatttgaaaaggatataataagtacgcttgaagatcatggcttaaatgttaaaaaatttaaatttactcgagataaagaagaatatgaatatgacgctgtatttttattagatgataagttatttgttctagaatgcaagaatactaatttatcttctggatccgttactagagcctatcagaggaaaaaatttctttttgaaaccacctatcaagtcaagaggctcgttaaaggtcttgagatatatccggaaatattcgaagaatactttggttttgatctgcataattatgaaataatccctgttattatgaataatctcccccattcaattccagggaaaattaatggtgtttatgtgaccgattcatcttcatttagtcgattaataaagtcaaagtatataaatgcaacaatgatttcacatgaggaaaggtttaagatgtcggagtcgagagcaataataaatcaatgggaaggggaggtcttatctgcaatggatataattagatcttttgaagaacctatacaagtaaatgatttcaaaaaacacgagaaagttaatgtttacccgcttcaagttgacagggaaagagtatttattaataaaataattgaaactgattatgatagtatggtaactgaacaaaacacaattttgaagtcattacgttaa

SEQ ID NO: 170424 - DNA, 261 bp, Enterobacter cloacae
atgccaaattcaccagtcctagaattacaggagcttgccagtagtagaacgaatgatattgtggatgttcttcttaaagccaagatgatagcagtgaattatgaatgggcaagtcttccgcctggaaggtatggtcagccagcgaaaacaaagtctgaagcactttatttatacaattattatctggatgaagaagttaagggacaaacagatcttcaccttgacattggttatattacaaaaccagcggagtcagaataa

SEQ ID NO: 170425 - DNA, 435 bp, Enterobacter cloacae
atgaaagcttggccttttacattattgttaatttcaatagcaacccatgcagactcaaactttggagtgtggagtactagttgtgatgatgatggtttttctattagtattgacaaaaacaccaatccacttgttgttaatgacaatcagattgttgtcaatgttcattctaacgaaatatctaaagagaaagttgatattttctacgccagtgtagctgatcttggccgaggtggaatgaattttgattggaagaatgtaagttcaactacgcctctggcagaattaaacatcgttaatcgaaatggcgaattgcgatggaatggattttacgatagaaagaaatccaaatattattgggtgaatgatcctgattttgtacaatcttatgcaaacaatggcgtaattaaattgcataagtgcgaaaaagaatga

SEQ ID NO: 170426 - DNA, 429 bp, Enterobacter cloacae
atgactgtccagcaattgatcgagtgcgatgatgtgccgcctgaagattcggttggtgcgaagtcaatccacaagcatctgaagatttacaaatcgctgttcaaaaccttcctaaccgacaacaaagacatcctggagaagtctccgactgatggtgcagtggctgcgccgtccaaagcgagatttggcgcatatagtgcagcagaaatgagaaaatttgttggctgggcgctcaagcagcctaacggctgggagaaatggatcacgttgctgttggcatacacaggagcaagaagggggcaggagaaaaccgaaaatgcaacgcgacaagttgcgatccaccccaaactgaacgagtggggttcctcgatttcgttaatcgtcagtggaaagagaaaatcttctcgcctgtgtcggataagaacatga

SEQ ID NO: 170427 - DNA, 2232 bp, Enterobacter cloacae
atgataatcagcccgccgtttgtccgcccccggaatgccggagaaaatgatccgtcatgggtcagcagaatgatgcccgtagacataaaccgggacttcccgctcaacagacaagcatcatggcacggtggtgtgcatgtcctccacactgaccgctatgaggaaggatacgaccgcattgaggttgttcgcgccattgcggatggagaagtcgtctctttccgtaaaccatccggcacgaacaaacgcgacgtattcccgctgaattacactggcaaaactgatgacggctatgtcctcctgaaacacgaaaccgccattggctcaggtgacagtggcaccgtagtattctattccctgtatatgcacctgcgggacaagttagacccggcgattcagggcggagccaaaatctggcgtaaggatcccatcgggcaaaatggcatggtggataacgtgaacgcctttcactttcaggtattctgtgacgacgagaacatgctgaaactgaccgggcgaaacacacccggcctgaacatcgccacagatggcaggacagacacggtttacggcgatatacatttttatctgccttcgggaacaccgttttatgagcaggtagccaatgcaggatcacccgatacgggtaatctgaacaaggtccacaccagcaccgtgccgctgtttgtcagcatgacctttgaaaacggtagctgcacgatggtcacccgaagtaaaaatgcgaccagtgattttatctatgacacggtgggcgatcccctggtggatacagacagcgaaaaaaataaggacggaaatcctgttggctatgaatacagtctgtaccacacagcatgtcgcctgtacccacaaaatccgtcagcaggctttgaactcctccgcttcgggcgggtcatcaacaccgaacatgaaaccctgacacctgccaacgctccgctgtggcgtaccgtcagttttcccggtggtagaggaatggttaacctggcctctcccgatataaaaaaattcagtgatgccgattttccccactggacaggatggtggatggtggacgatgacatggacaataacagccagtgtaattccccgctcattgctgctttacagaaaagcgggcacctcagcgaactgagcagcaagcttgtctgccattttccgctggaatggaatgcagccacctttgaccagcgctatgcctggctgaaaaaaggcagcgaaaatgtacccgccatgtcggttgtggactacagcaaaatcaaagaacatgcatccgctctgtgctttgatacaggcacacttggcactggtcgactgtggcacttccacccggccgcatttatcagccatttccgcaagtgttgctggctaagtacgtcagagctaaaacaattaattccattgcatgcaatcagcaatacacattggagttcagttatatataacgatgctgaaaatagtgttgctaacaaaatccatagcagcctaaataacacaatgcaaaagtacttaattaatacacctttacgaatagcttgcttcctcggtaatgcaattcaagaaacagcttggttaagcaccactcatgaggcatatcgatatacagatagagatcggcacaccagaactgttatagggcatcataatgcttggtactatccgtggcatggcagaggtattttgcagctaacaagcccagataattacttcacatatttcagctttaggggttttagttaccctagcaacatcaaaaataggctttccgctgaatacaaaagactctatgacaataaagcattaagagataccgataatcaccttggcgactctagcaatacagaccttcccgtgaatattattgaatggcgagataacattcaaaataacagttatgagtcaaatgatagtgcagggttctactggagcttaaatgtgatggctaagtacgccgatgctgggcactcactagagagatgttcagtaggtggcaaggtatattatcgcagccaagccttctggaaggccagtgcgtcagttaaccttccgggatgcattggagacaatcattaccgagggctgaatggatttgaaactcgctgctgtgtttacggtagtgctatttcagtccttactgaacagaggttccccaacgttcgtggtgaattagcaaatgaaaaaccagaatcaaaccagcttcggagagaaatatga

SEQ ID NO: 170428 - DNA, 411 bp, Enterobacter cloacae
atgaaattattaatctcattaattgcaatgcttacatcttccttatcgattaatgcaaatgcgaatgagctaatgttcaaatgctcaacacaaaataataaaacaatctctatctatcaagatggtaataacttaacgtataaatttggaaggaaaaactccaaaccagaaatggatttaacaaaaaacaaagaacagctaagtattacgcaagaaattcctgtaggtacagggctaaacagctcagtagagtttaaaaatggtatctatagttacacgataaacgaaagtttaaacagagttagtgatgaacacgaggcatctgcatggctagatgtatcgaaaaataaagacattatcagttcaatagactgtaacattgactacggctcgctttctgatatcaagtaa

SEQ ID NO: 170429 - DNA, 180 bp, Enterobacter cloacae
atgaatacaggaaacaacactcacacgacgtttgcggatgggtaccgtgaaggatatagggcaattatgggcaacttggtggttttgcccgtaattcccgtcgccccggtaacaccagtgggcagcaccccttatcgtgaggggattaaagccggtattgcggatgcatctcgccgttaa

SEQ ID NO: 170430 - DNA, 2796 bp, Enterobacter cloacae
atgagaatagaagagcgcctcaaacaacttgctgatgaaaactctaattactctttactttgggctcaatgggaatttgataagagattattaacacgtgccctgacaaccatatctagagattttcctcattacagcttacatgatgcatctcattcatcaacaatcatcactcaaatagaaaaaataatatcgcctgatgtagtcaaattatccgcaacagattgttggttattgcttgaagcttgttattggcatgatgctggtatgattataacgaacgatgagaaaaaaacattattagcaagtgattcgtttaaagttcatttagaaatgctggcagatagtcagcatgaattatcctcatatgctaaagcagtaatttataatgaaaccctagacggtttagagaatgtcttgtatgaaagtaatgcattaacatttttaatatcagactattatcgttcattgcatgccgaccgttctgggggacatgttttaaatccaatgggaataaaaatttcatctccaaggactacccttatacctcaaaggttttttaattttgttgccgaaatagttcaatgtcatggtaagaaaaggacagaaatacttagccttgctaagcaaaatgatggaatggatgcaaatgattattcacatccaagatatatagctgcgttgctcaggattggcgatttactcgatatagatgatggacgtttctgcccaaccttattggaaaatattggtgaaataccactttcatcgttggatcatcagcataaacacggatcgatcaagcatttaatgattaatcatgaagttattgacatcaaggctgagtgcgttgaatatggagggtataaggcacagaaaaattggtttgattatatacaagatgagtttgattatcagaaaagaatatggaataagatagttcccgattcctcatatcgagctcttccaactattgaaaatctagattgctccattaagggctatattgcgattgaagggaaggttcctgcaatatctttagattctaaaagggtatatgattatataacaggtgcacaattatatagtgaaaaatatcctttcgtgagggaaattattcaaaatgcaatagatgctacttattatcaatgttgggaagaacttacggaagaggttaatgtatctgattataaaaatagtaagttacgcgaggattttgaaaaaatattgtctgaaaagaaagttcaagtaagacttgaagaagcccataataagtataaatcaatatgcagtgacaaggtaacaataaattacaagtttagtgtccaagattatgcgactggaatgtcattagatgatttggcaaaacttctcaatgttggttctgaatctgttattcagagaaaaacaacattaaaaataatgcctgactgggccaaaccgtctggtttctttgggatagggtttcaaactgtattaaaaatgtgtaatagagtagttataactacaaaaaaaatagacaatccatgctatgaattagaagtaaataaagataaaaatgaattatatgaaataacaatcaaggtaaatgattcaataaaaaaaaatggaacttctgtttctgcatattttgattatccatttatacctacatctgtttcgagtgctggtttcgatatattacatggtttcgatcctttagttaatgataaattagtagtggttccagaatatattaggcatgaaattgacaaaaacttcaacttatctccagtgaagatatattttaatgatgtttgtacaaatgatatgatccttgatgattctgggagtgctcaatggttttctgattatgaagccggagctgattttgatttgatagtcaatagcgatttaaaatcccatattgattttttatataaaggtgttatttttgacagtaatattattagcaatggagttgtagggagtataaatattttctcaaaagatgctggttattggttgatgatggataggaaaaaaggccgtaatgataaacggcatgagcttatatcaatgataaagactattgttgaaaataattatgaattgattaaggaacggtcgccaaataaatctgcagcggatttttatggctttgctgtattgaataataatggatgcactcgatgggaagaatacagtatattagggggtaatgttgggggctacttattaaggggcgttccactatcaatatcttctggcaatccgcatggtgcagaacttgaaatcccatctttagatgtatcggaaacagctttcgactatattattgcaataagaaatagattgaatatttcttgtgaaattaaatttgtaaaagatgttgaatatgatattcacggtagaaaacaaaaagctcaaatccactcgatgaatttcacaaatgacaaaaaaaataatatatcaatagatgtgaaaattatacaggcagaattaaaccccaaaaaaatgggtttaagaggaaggatggtgattcctttatatgataaaaagtatgaagcaatatcaatagaagctaatgacataccgctatgggtatccaaagaaactgcttactcggaattgtgcaataaattcttatttttaccattcagaagcgagcggaattcatcattcaattatgaagatgaaaaagatatctctcttatttatgatttttatgcgcggaataatttgactaaacttgacgaaaacaaatttaaaagtctttatcataagtattggaaagaattaagttgtccccattaa

SEQ ID NO: 170431 - DNA, 1257 bp, Enterobacter cloacae
atggcgctaactgatgtaaaagttaaatctgcaaaaccttccagtaagccaatcaagctcactgacgggtttggtatgcatctacttgtgcaccctaatggttcaaagtattggcgttttcaataccgcttcactggtaaacaaaagatgctggcgcttggcgtctaccctgccgtctccctagctgaagcaagggagagacgtgacagtgccagaaaactgattgctaatggcattgatcccagcgaaaagaaaaaagcggaaaaaattgaagagagtggcgctttaacttttgaaacggtagcaagaagctggcattccagcaataaaacatggtcagaaggccaccgcacactgataatcaacagcctaaccacgcatgtttttccgataattggtcagagaaatgttactgacctgaaaactcgtgatttactggttcctgtaaaaaaagctgaactgaacgggcatctggaactggcctcacggattcaacagcgtatcaccgccattatgcgctatgccgtacataatgcccttattgagcataaccctgcttatgatctggcgggagcaatagcaacagccaaaagtgttcatcgtccagcccttccccttgaacgtattgctgaattgatggaaaggatagaggcatacaaaggtaagggacttacccaattggctgttcgattgtgtttgctgacctttatccgttccagcgagttacgatttgcgcgttggtcagagtttgatttcaaaaatgcgctatggacgattcctgcagaacgagaacctcttaaaaacgtcaagttctctcatcgcggctcaaagatgaagactccccatctggtaccgctgagtaagcagagtctcgccgttctgaaagagattaaagctatcagtggcgctcataaatttgtattcgcaggttttagctatgctgacaagcctatcagtgaaaacacgattaataaggcattacgtgctatgggctataacactcaaaaagacgtttgttgccacggattccgcacaatggcctgtagcgctctgattgaatcaggattatggtcaagagatgccgttgaacgacagatgagtcaccaagaacgtagctctgttcgagccgcatacatccataaggctgaacatctggatgaacgccgcctgatgctccagtggtgggctgatttccttgatgccaacagcagcagtatgatcaggccgtttgagtttgcccacaggaatcaaagctaa

SEQ ID NO: 170432 - DNA, 1245 bp, Enterobacter cloacae
atgtctaaaggattcacattcgaaaagaatttacctcatcaaaaggctggcgttgattcggtgatgaatgtctttgtatccgccatacctcatcagacggatcatgttgctattcgcctgttagctaatccagaactgaatctatctgaacaacaatactacaacaacataaaaaatgttcaggaattcaatggcattgagcacttaaaagataattacgatgctaaaagcaaagtaattgatgtttctatggagacaggtacaggtaaaacttatacttacaccaaaacaatttttgacctgaacaaatcatttggcattaacaagtttatcatcattgttccgactctatcgatcaaagccggaaccgttaactttttaaaaagtgatgctttaaaagaacactttcgagatgattacgagcgtgaactaaagacttatgtagttgagagtcagaaaaactctggtaaaaatacaaaatcgtatatgcctcaagctattcatgattttgttgaagctagtaatttcaataagaaatatatacacatccttgtgatcaactcaggaatgattaactccaagtctttaactgacacttatgatgttggtttgcttgataatcagtttgatacaccatttgctgctctaagtgcggttaaaccatttattattattgatgaacctcataaattccctacagctaaaaaaacatgggagaatattgagaaattcaatgctcaatatattattcgttacggcgcaacctttagtgaaggctataaaaatttagtttatcgcctgacagccgtagatgcatttaatgaagatcttgttaaaggcattgatgcttacattgaagatattgttggtgatggtagcgccaacctcaagttcgtaaaatctgacggtaaagaagctatttttgagcttaccgaaaatggtaacaaaaaaacgttcaaattagcaaaagatgaatcgctatcgaaaacacatagcgcaattcatgatttaacactcgatgcgttaaataaaagcactgcagtgttgagtaatggtattgaactaaaaattggtagttcaataaacccctactcttacgatcagacgctcgctgataacatgatgcttaaagctgtcaaagaacactttaagttagaaaaagagtatctgacacaaagaccacgtataaagcctcttactcttttcttcattgatgatttcagcatcaaaaatttcattcattag

SEQ ID NO: 170433 - DNA, 129 bp, Enterobacter cloacae
atgaagattctgggttacggaacacagttttgcttaagcctaatacttgttgtgcatgtggttattgtttgtaaaatgaccgctgtaattatttctataataagcaaagggacttatgcagcaatatag

SEQ ID NO: 170434 - DNA, 471 bp, Enterobacter cloacae
atgcagcaatatagtaatgagatcacgcctggattccgagattccacctctctgccaccctacgatgaagatttcttagcgagctatgacagcaagacacgcgaacaatttgaagattttaacaagcatgttagtcgcccagtaacttatatttttcgattcactgttgtgggaatcgttacccgcaacgggggagtgacccgcaatgcttcgggaggcagtacggatggaggggaaaggatggcacgagttggagataaagttgtctacgctgagggcagtgaagccactattatttcctgtgcaggtggagtgcgtattatgcagggcgcatctgcggcactgtctggaagtatgcttgataatggcgacgaaataatctcaacaccacaatccggcagcatactggttttctgtaaaggcgacacattccagaaagaattcttaacgatgccagggagtaagcactaa

SEQ ID NO: 170435 - DNA, 141 bp, Enterobacter cloacae
atgctccagtacactaatttactaaaagagccttaccttagcatcatccctttttgtcaggtgacctccctggggcgtaatcaagattactcacttctgagtacggaaatcatgatctgcgtcaattttccaccaagctga

SEQ ID NO: 170436 - DNA, 2550 bp, Enterobacter cloacae
atggatgctatgttaaatagccttaagcttgcaaattcagctaacgaattaataagcgatgaaacgtctgaacgcctcaaaagattgatttcaacaggtaatgccattgtatttgtaggtgcaggattttcaaaagaatcaataaacataattggaagtaccccgcctttagcgaaagatcttgctttgcaaatttcaaataagtcagcaaactatttaaaagaaattggtgccgactctcattatgttgaagaaattaaacaatgtgatgatttaatggtggcttcagatttctttcttaacaatatccctcaaaaagacgaactactacaattacttaaagataattatacaattaaagatgttacgcaagagcagatagatatcttcagtatgaagtggcgaaggatatacactacaaactatgacaatgctattgaactttctttgattaaatcaggaaaatcggtcacacctctaacgctcgaagatgcaccaaatcagtacaaatcagctgaagatatctgcctccacatcaatggaagaattgagcgttcaaaagaaagcgatcttgattctgctataaaactaacaacatcatcctatctttctccggagcagttcctaacatcgagctggtataggcagtttaaagccgatatagacaatgcaagtgctatagtttttcttgggtattcgatgtatgacattgatattcagaaaattttctttaatgattcctctattaaaagtaaaaccttttttattactagggaaggcaccaccaaattccaaaattataagttagccatgtttggagaagtgataaatataggtgtgaacgccttttcccatatttctgccaagtgcattgaagaatcacatcaagacaaagaagttggtttgataaattctttagagctctatattcctggagaggaatatgatgaaataagagataatgacatcgccaattttatgatctttgggaaagtgagcgatcgttatatagatgaagtcactctcaatgataatatgcaagacaagataattttacgtgaagaaattagtaagattattgaacatattgaaacagacaatgatattttaattgccagcgatttaggtaatggcaaaagcataatgactcgaatgttaatgtcgaaattatcaaggaaaggatatctctgtttttattatttatataatgaatttagcttcagtaaggacattgaacgattatccaagttggggcaaaaaattattattttcatagatgattatagtaactgcattgatgatactcgttatgccatagaaaaccgtaaggacaatatacagcttgtattgactacgcgtcattttggctatgaaaatactaagcaacatttattaacgatggatatgagcagttttaaaactcatagcgtcgattatttatcagattccgaagttgataatttcgtacatatagttgatcacttagggggatggggcgaaaaagcagggctttctaggcatgaaaaattatcagaacttgatgaaaatgctaggagccaactttcgttcttgctattatcaatcctcaaatccgaagctatacaatctagaattcgagaaatatctaatcttgcactgaatgataaagactataaagaaacagtttttgccattctattattagatgtcataggtctcccattggtaagatctttaatttcagatgtggcggttaatgaaaaaatttacagcgcggagtttactgaaaatgaaggtgttaaaaacttattcatcataagtaatggcatggttaaaactaaatctagcacgttgtctagattccttatagcaaatgtttttgaacataagtatgttgtaaatcaattgcttaaggttattgagcatttgcatgtcattaataaagatgcaaaagatcatagattacaaactttgattactgctctactgagattctcgattattgaaaagcttctcccacaaagacgtgtggaaataaattatttttatgagaaagttaaacatattattcctaatctaataaatgatccgcatttctgggtacaatatgcaatgtctatgataccattcaaagactatccaagtgctgatagatatttagctactgcctattccttggctgcaagaaaagataactatcatacaaaaaatattgatacgcagcgtgcaagattacatcttttggtctctcttacaaaaactggaaatgaagcgttccttgagtttgaggccggtgacaaccttatacgaattattccaaatgatatttataaataccgtcaggtgcatagatatagggacatatatgaaaaagtttatccaacatttaatgctaaacaaaaggtattttatgagcacgctgtaaaacgtattataaaagaatcagaaaaccctgagttggttgaggatttaacttataaaattggtgtaaattggctcgataagttgcgtggcaatttaaaaatgatagtggaaaatatacaggaaaatagacctaaaggtaaaaaataa

SEQ ID NO: 170437 - DNA, 129 bp, Enterobacter cloacae
atggttgtctcttatgagcgaaaagcggacatcttaattgtttttttttgctactacctctatgtagacatgttatatggctacatttatacagaagtaaggattagtcttttcccggaccataattaa

SEQ ID NO: 170438 - DNA, 1371 bp, Enterobacter cloacae
gtgccggatgccggaaaacgtacagaatacgcagacagccaggttatcggtcttcgtttgcgggtaacagctaacgggagtaaaagcttctgcgtggtgagaaaaaggaacgggaaattcttccgcgtaacgttagggaaattcccggatttgacggttgatcaagcgcgggatgttgcgtcaaaggctttggccgaggtggccacaacgagagaaaatccaaatgagagacgcaagcaggataagaaaaaattaatcacgcttgctgacgccctggcggagtacatcaaatcccgaacaggacgcatcaagcaggacacgatcgaccagtatcagggaatcatcaacaatttttccggcgactggctcaaaaggccgcttgcggcaattgaccgcgaaagcgtggaaaaccgacatcaggccatcaccaatggtggtatatggtttggtgataagcctaagcgctcaggtgtggctgcagggagtaaatcacaggccgacctatgggcacgcgttctgcgtgcgatttaccgctattcacatgaccattatcgcgacagcgaaggcaagcggctgttacccgatccgccaacaatggtactgagcacgaagcgcaaatggcacggcaccacgcgcaaaacaacccggattcgtaataatgagctggggcgctggttgggggccgttgacaccgtccggcgctattctatcgagataagagacgatttcgctgtgtcggtctgtgacgctctggacgttgctttgtttactggcctgcgccgcggtgaagttttcggcctggagtggtgccgggttaatatgtccggccgctacttctggattgatcagaccaaaaacggcgacgcgctggagctgccgatcaccggcacgctatttaaaatttttcagcgtcgtaaagagctgcgcaaggacggtgatatgtatgtgttcccgggtgcaaagcgcggaataatttccgaacccagagatgtgatcgacagaatcagccgtgaaacggagctggggggcgaatataccccaattcgtttcacctgccatgatgcgcggcgcacgttcggcagcgtcgccgagctgacaggggtgggatcatacattcttaaaagacttatgaaccataagactttccgaagcgcagacgtaacacagggatacttacatttttccgccgatgaattgatggaaccggcgcaaaaagtagaacgcgccattctggaacacgccgggctggtggaaaaggctggcgggctggataaccagttattagcggttatgggaacgatgactgacgaggaaaaacgcaggatgctttttgatattctcaacatacagagcaatgagaaaagcgcatga

SEQ ID NO: 170439 - DNA, 663 bp, Enterobacter cloacae
atgagccatatttttcaaaacatagataattcttttaaaagttttgctgcggggtctattgatactaaaaaatggaattgcagcggaacaaagcaggatttagtaaatgcattcactaaatatcgcgaagactatcatccgtttgatgcctgggaattagctggaaagcatgcacaagattattgcgaacttattgaagcaggggatgccgagggcgcgtgcaaaataggaaagaaatacggaaagaagatccctgcagatgatgcggaaaaaatggagttgatgatttttttacaggcgttagggatggatcacttagcaaaaaaagcggctgatgatttttattatggatgtattaaaagagagttttatgaatcgcatggtgaattgcttcataatttggttcgccatgaaggtaataagattatcgccagtaaaccaagaaataaaaattatccgaaagcaattgctatcgcgaaagctacctgggctgaataccccgaaaccagtttgggtgggatgtgtaagaagttatatgtatatttcaacggcagcgtaagtatggactcccttgaaagatggataaaaaaggctggaattaacccagcgaataataagaaaaagaataattgccctccatttaaactcataattcctgcgtga

SEQ ID NO: 170440 - DNA, 201 bp, Enterobacter cloacae
atgagcactgaatatgcaatagataaaaaatttactcgccctgaggctgcggactacatcggcgtagccgctcgcactctggcgaactggcacagctcaggacgggtaaaaattcccttctacaaagtaggccgcaaaaaaaccatctacctgaaatcggatctggatgcgtacctggcatccgttcgccagtctgtgtga

SEQ ID NO: 170441 - DNA, 1131 bp, Enterobacter cloacae
atgcagacacaaaaaagccgggtggtcccggctcctacttatccttttggctcgatcccacgcgactgtaactctttacgtatgatgcgttttagccaagctgcaagagattcgtcgccgtcttgctgctgtgctgcctccatcatctcccgcaattcaggatccaaacgaaactggaatggtgggttaccgcgtctttctgttttgtgtgttgacaccttagttacaccttgtgtgatgtatttatgtgtcattacacattacacacggtgtataccaaaagcaacgtcccgtagtgcttgcggcacatacgggacgtctaaccaatacgttaaaaggactaacgctatggctggaacacagcatacccaaatcaccccaaatttgcatggctcattatcggtacgccgagatggaatgatgcttacctggcattggttctgcagctgcgtgaggtggactttgatagataaaacaatggcggacatgtcgggacgccaatgcaatcaaacgataacagactatggccagataacttggcttttcgctgacggtcaaaatcagccttttggctctataccccgcttccttaactctgctctacctaactccttaagccaattactggtgctcgtgttctctgcttgtgcgagttcatcgaattgcttgcgtaggtctgcaggaatgcggattggcagcattggtgacttgccgccgcccttaggttgtttgtctcgagatattgacatgtatatgcctataggtttatggttaactcaaataggcatatacactaacatgtgtgagtctataaaaacaacgtcccgcagtgctaccaacaccaacgggacgtctaaccaacacgttaacaggactaacgctatggctggaacacagcatacccaaactcaccccaaatttacatggctctttctcgggacacccaaagggaaagtttgcacgcctgttgttattcgtattgccgcggataccgaagaagaagcgcgccaatggcacgccaaatgggatctcaccttcgctgcaaaaatccgctctgaatgctctttgtaccagtacgcaaacggtgcttttgagttggatgtcatgaaaatgggggcgagccatgcttaa

SEQ ID NO: 170442 - DNA, 1815 bp, Enterobacter cloacae
atgaagaacgcgccaaaccttaagcatctgccaaaagataagtttactgaggcagttattttcgccggggctgatgccttcgctcatgcacagcactggacagagaaagccggtaaagaggttggagactccgtaccgccaatttatctgggcccaaaacatctgtcagaccttggaaacgtccggattatcgataaagggcgacgctgcgcccgggtctaccttgctggtgagatcgagccaatcatgattaacgccatagcggaaaagctggcgttggctggcgtagaggatgcgaaattattcaaagggattccggatcaatttccagagaactggcgcgagtatttggccagacttcgcgatgaggccgaacgcggagaaagccttgttaatgacattcgcccagagctaaaaattaccacacccgctcttaaccagatgggaccgagtcagcgcggtgacgtgctggcggcgcattatgataatgacctggcgattgatggtgattcagatacggttcaccactacaacggcaaggtatgggaaccggtacatgataaggagctgcagagagtgatggcgcggatctttattgatgcagatatagcctattcgccagccagcgtaaaaaatgcggtagatgccatgaaattaagtctcccgcaaatgggatcgccagctcgacatcttataggcttccgtaatggtgtgtttgattcccgcgtcgcacagttcaggacacacagcaaaagtgactggttgcttatcgccagtgacgttgatttctgccaggcagagaacggagaaacccttgaagcccatgcgcctaatttctggcgctggctgcagcatgccactgcgaaagactcccggaagtcagatcgccttctggctgcgctgtttatggtgctggctaaccgctacgactggcaattgttccttgaagtcaccgggccgggtggcagcggtaaaagcgtgatggcggaaatttgtaccatgctggccgggaagggtaacacggtgtcggcgagtatggccgcgctggaaaacccacgcgaaagggcgctggtagtgggttattcgctgattattctgccggatatgagccgctatgcgggtgatggtgcggggataaaggcgattaccggcggtgatcgggtgtcgatagatccgaagcataaagcgccatattcaatccgcatcccggccgtggtgctggcggtcaacaataacgcaatgacattcagcgaccgcagcggggggatctcccgccgccgtgtgattttcaacttcccggaggtggtgaacgagaaagaccgcgatcccatgctggtggagaaaatcgaggctgaattacccgttatcattcgccacctgttaacccgctttgccagccaggacgacgcccgccagcttctggccgagcaacgcaaatccgaggaagccttagccattaagcgcgaaggtgattcgctggtggatttctgcggctatttaatggcgctggtggagtgtgaagggttgattgttggtaatgcggaaatggtgccattcagtccgcgccgctatctctatcattcctatctggcctatatgtcagcgcatggcctgggtaaacctgtctcgctgacgcgctttggttctgatatgccgggagctatgtctgaatacggcaaggaataccggcgcaaacaatgtacccgggggccggataaaggccgcacggtttcaaacgtcttattgaaggatgaggcggatagctggctacccgcagcaacgggtaataataccgaagataaggggaaaagttaa

SEQ ID NO: 170443 - DNA, 219 bp, Enterobacter cloacae
atgaccaaaagtaagaagccccgctcgatgactgtaatgctcgatgtggaattgacggaagcagtccgcaaagtgcgtgaagagattatcaaccatctggacgaggttggcgttaatggaaccgttgccgcgccctctatgggctatgtcgcccgctcgttactgcgttctaagctgggcttatctactaacaccagtgatcacgtcaacaagccttaa

SEQ ID NO: 170444 - DNA, 174 bp, Enterobacter cloacae
gtgactctgacagagcgcgaagtatccatttttggcgtaatcggcgaggaggttcgcgccatgatcaaagaggccggggaaaggcatcaggctgaattactggaatgtaccagcaagattgcccgcctcgaaaaggaggtggagggactgataagcctgctgggggaaagctag

SEQ ID NO: 170445 - DNA, 921 bp, Enterobacter cloacae
atgaagcatttaacaagtattcgtaccgcccgctattgccgtaaaggtgggttttcccatgcaatcgaactggcaacaagtgagaaagatcccgccgcggtagccctgcttaaatcggttattcctgcattgagcacggcaaacactgctttagttgccactaatagtcaggcaattgagctttcgacaaatcttcttgatgaatctgttgtcgggatcatcttgtcccgcgctctggaaatgccgtttaacgtaaaagcaaacgtcataaaaggttgtgatgcggattgggttaaggaggcacaaaaaatccgggttaaggccggtagtgcgcacggaaaaacgctttacccttacaagctaggtacgctgatcgttattgatgaagatctcgagaacagcgcatcgcctaaaacggataaagccatttacagcatgttaaaaagtgcagctgtagaaaaaatggatcgcaccttcctttctgatgcggcagcagtggcggagctctctccagctggtgcactcaaagatgcggtgactgcttccagctataaagagctattcaagactcatgccgcgaacggtaacaggctcaaaacctcatttttagtcatgcctgttgataccctgcttgagacttcgggtgatttcctccgtgtggtggagaaaactggcgcaacggttcttacaagccagtacgcgcaaggcgtgtcgctaattgatgcgggcaacatgatgatcaacataggcggtactgtcattgactcatctaatcagggctctattgatatggatgacggctcgtccgccgttaacgctgtaagcctctttcaggctctggcgctggcgtatcgtgccaaaacgttctgtgactggatgccgttagccggtacaaagccagtaacggttttgcaggcatag

SEQ ID NO: 170446 - DNA, 228 bp, Enterobacter cloacae
atgaaacttacccgccgtgaacttgaggtagtgaacgccattaccattcaataccgcatgaggcatgcaggggccggagagcgtgaggttgtgacagtattccattgcgcccgcgctgccgttctggaggcgcgtcagacgaatgagaagctgtcgtccctggtgaatgcagcaccgtctttaacgtggcgtaaggctcaccagttccggcgcactcatgctaattaa

SEQ ID NO: 170447 - DNA, 666 bp, Enterobacter cloacae
atggctgagtattatccggctatatttgaagctggggcatttaactgcccgcactgcgatgtgtacacaagacacgaatggctaagtttagtggggcctagagctagcacctttgcagtgagtcaggttactgatatgaaggtgtcggtctgcggtcattgtaaagagatatcgtattggtttcggggtgatttgataatccctgcttcagcgaatgtcgaaatgcctagcccagatatgcccgcagactgtaagtccgactacatggaagccagaagcatcattaatctgtcacctaagggcgctgccgcactcctgcgcttgagtcttcagaaactgatggtccacctcggtgagccggggaagcatatcgacacggacattaagtctcttgtagctaaagggctgtctccactggtccagcgagctgctgacatctgtcgtatcgttggcaatcaggcagttcatccgggtgaaattaacattgatgacgaccctcagttagcgcatggtctttttaagctgctgaacattattgtcaccgagcagattactcgacctaaagaagtcgaagccatgtttaacagtatgccggaaagggcgctcaagggcattgaggaccgggacaggaaggcaagggaacagcagcaggcagctaacgaataa

SEQ ID NO: 170448 - DNA, 306 bp, Enterobacter cloacae
gtggaatttgaacaggacgcagacctgcgcgacaacgagaacgtggcgctcgatccgtctgtttcgaccagcgatttgattgaaggctatgtgaaggcggaagtgctgccgcacgtgccggacgcctggattaatgccgacaagcgcgacgcccgcgacggcgaggttggcgttgtcgggtatgagattccgtttaaccgacatttttatgtctataagccaccgcgcccgctggaggagattgatgcggagctggatgcgctgagcgcggagattatgaagctgctgcaggaggtacactcctga

SEQ ID NO: 170449 - DNA, 1344 bp, Enterobacter cloacae
atggctaagtataaggcgtatccggaatataaggattctggggttatatttttagataatccaccttctcattggcatacaattaaaattaagcatttattaaaacttaagaatgagatagtcggtaataatcataccaacttcactttgttatcactaactttaaatggagttattactagagatatttcttccggtgaagggaaaatccctgaaagctttgcaacatatcaacgcgttgaaagaaacgatttaattttttgtctatttgatatggatgaaacacctagaactgtaggattaagttcacaaagcggaatgatcaccggagcatacaatgtttacaaatgcaataacaaagcagacccgtcattcatttattattacttcttgtacatcgactcatttaaaaggttaaaaccttactatactggattacgtaaggtagtaagaagtgaaacatttgattcacttaaactacatttaccttctatcaaagaacagttaaagattgctatttatcttgggcatcaaataaccagcataaatgggttaatcgaaaaacaactacaactcatcgaactactaaaagaaaaacgtcaggcagtaattagccatgccgtaactaaagggctaaatcctgatgttccgatgaaagattctggggttgagtggttggatcgaattcctgaacactggaatataatccaggtaggaaggttatataatagaataaaacgtaccggaaaagcagataaagagctgttatcagtttacagagaacatggtgtcataccaaaatccagcagagatgataataataacaaaccctctgatgatttatctcaataccagttagttaaaattgacgacttagtgttaaataaaatgaaagcatggcaaggttcaatagccatttcaaaatttgaagggattgtaagccctgcatattttgtatacacaccccagaaatcaataaatgaattagctcagagtcaatatatacatcacctgctaagaaatacgctatacattacccaatacttatgtcgttctaaaggcatacgcattaatcaatgggatttagatcctgaagaatttaaaacaattcccgtacttttacctcctaaaacggagcaaaaagaaattcatgaaatgattgataatgaaactaaaaaaatcgacaccctcatccaaaaacaactccagcaaattgagcttctgaaagaacgtcgcaccgccctgatcgccgccgccgtcaccggcaaaatcgatctccgcaactggacacctcccgccagcagcaccgaagcatacctcaccgctgaggaggccacagcatga

SEQ ID NO: 170450 - DNA, 1098 bp, Enterobacter cloacae
atgacaaccattacacaagagattaaaagcgaaaaaattcatttgcgtattacaccatctcaaaaagaggtatggaaagccctggcagagcaacagggtataagtttggctgcatggattgaaaagaagatagctacagcattagcctctaataacgatcttttccaaaaagaaaaatataaattgatttctcttttttcaggctgcggtggcatggatttgggtttttgcggtggtttctctgttttaaacaaagaatataaaaaaacaaaatttgaaatcatttgggctaacgaatttaactctaacgcagttaaaacatacaagaaaaactttacacataatatagttgaaggggatatatgggagcttattgattctgtcccgacagagtgtgatgtattaattggtggttttccttgccaagacatatctattaatggaaaaagagctggcgttgacggaaagcgtagtggtttatatcttgctatggtcgaagctgttaaacgttcacgtcccaaaatctttattgcagagaatgtaaaagggctacttatgaagtataatgaagagtctttagctcgtgttataaaagattttagcgcattaggctataatgtcagttataaactatacaactcggctaattttggcgttcctcagacacgtgaacgtgtttttattgtaggaacattacatggcaacccattatttaaagaacctgccgatgtacttcataaaagcgagtggttgacatgtaatgacgcaatccatgatttggaaaatatcgacgaagatcgctctttcaatcatgtatggagtaaagccaaaaaaagtccagatcagggaagtagacgtcttaataaagataaaccatctcaaacaataagagcagaatgtcatggaaacattcaatttcattatagcttagatcgacgaatctcgatgcgagaagctgcacgccttcagtcatttcctgataattttatttttgaatctaacttaagggaaactgaaaggcaggttgggaatgccgttcctccagctttagcctggcatttagcacaagctgttgaagaatatttagataaattatag

SEQ ID NO: 170451 - DNA, 1005 bp, Enterobacter cloacae
atgatagagcgtcgtagctttgaagagttattatctaaagccacattaaaattaacacaggatttaaaatcatcaacaaaataccatgcatcaaagtcttttgaacaacaagtaagagttgttttaagtgaaatacttaaagatatgggatttccagttgatatgagtccaccggcgcaagaatttccagatattatcattggtaattttggagtggaagtaaaatactctgacaataacacttggcgctccatcgcaaatagtatttttgaaggtagtcgtaaacaaggtgtggattatgtctaccttctcttcggaaaagttgggggcgtaccagaggtccagtggggaagatatgaagaatgtatcatgcacgtcaggacatctcatgttccacgctttgaagtagagattaatgcaaaagaaccgttattcaataaactgaatattagttacaacgattttagagtgcttccacccgaggaaaaaatgccctatattaggaagtatgctaaaggaaggctaaaatcaggtgaacgactatggtggcttgatgatcagccagaagaaaggagcttaccattagaagttaggctttatacgaaattaacacaaaaagaaaaaattcgttatcgagccgagtcgtccgttttatgtccacaaattgttaaatcaggaagagtaaaagggaaatatgatgatgtcacaatgttcctccttacatattatggaatattatgcaaccaagctagagatctttttacagctggcagtgtagcgatgagaggatcccaggaaagaggcgggaattatatagagcgtgctttaaaagatatagaatgtgaaatgtatcatgcgtttttaaatttagaaagtgcattatttatagagtattggggagtggatatacccccacatgaaagattacattactggctaagtaaagctgattcatatgctgacggatggaaaccatccgaaacattatttttaaaatatagataa

SEQ ID NO: 170452 - DNA, 1092 bp, Enterobacter cloacae
atgaagatcagcgattttatatttcaatttactccaacgaacatgtcgcgaacagacagtttatgtagggtacgtattttttttaatgaaaacactacgtatacactgctcacgaacattgacgggaaatatagtcctgccagtgtaactaatttcattgaacatatcagaaagcagctgatagaaaaaggatttatacaagataacacctttattgtagaacactatgaagatagattatctggatatggttcatttgatttagtaacatttgggtcaggtggctcgcccagttgggaaaaaatatctattgaaaaagtcagcgaacggtttggttgtgaccatcaggaattagtggataagactttaaaaaataagagactattcaatcaacttgaactattacacgaaacaattcgtccgtttactactaatacctggattgagagttacgcagtgctgtctcgacgttacaaaataatagataatgcaatcacaaaaagtgaattatcaaaatttttagcgggtaatccgatagaaagagaattagcttctttctttaaacgcgatcttgcattttttgctgacctttatgcaatgccttcagaagagtatattgttattccggaacttaagattgaaaagggatttgtggattacgccatattttctggccgatcacgaatggacgttacgcttattgaaataaaaggcgccaatttcgatttaatgagttcaactggttaccataatttctcttataaaactaatgaagctctacagcaagtcagaggaagacaaggcaccattatcagggactaccctaaatttcgggaatactttcacgatattcgcgagatgatagatacggacaggcataaatttgaggctttttgcggaccaaaaggaaaattactggttgatcccaataaggatataaatatcagaacggtggttatcgcaggccgatctaaaaacgatctggaagaaagcattgagcggcacaaccttgaaagaaattcctcgcttcccctaaggttagagagctgggacagcttgctcaataagctgtccgggcagagagcaacgtag

SEQ ID NO: 170453 - DNA, 2760 bp, Enterobacter cloacae
atggatgagattcattcgcgtcgtataaagtcggcaatgattgtatatgctatagagcaggctttagggaattttattttaaataattcagagttcagcgaggatttatcagaaaatactatttccgatatacttaagagagaacaggcaagagggaggaatatttctaattcagatacgcaattaattatagagtcaagttatttgaatgaaatattttcttttgcattagatattactaaaggctctacaagatatgatgatttaaaaaggttaaaagaattttgttcctatttagaacttttcgaaatcagaaatgcaattagccatccaaacagaccttttcccgagagttattggtatagatctgctgctatagcgagcgatccattaattgaaaaattaaatttgtatcaggtaactcaagcattacatgctgcgatttcgggtaatatatcgcctcctcctgagcaatgggtcaaaaatgttatatgggctgtaaaaaacagtttgccagaaaattttgatcatgaaattacaggtcttttaggtagggataaagaatttaaagagttaaaaaaagtattagaggttcctagaaatagtttgattgcaatcgttgctccgggcggggtaggaaaaacagcattaatacttcagttcttacgagatttgagtttatcaccggaaacaacgaaatatgctgaggctattcttttttgtacccttaaaaacgaaaaattgacagctgatggcattgagaagatagatgctattcaaggcgttgagcagattaaagagcatgtgcttcacgatctttctgtgctttatgaagattatgagtttgaaaattttgaaaatgcatgtgataaattaagcgataaaaaaataatactttgcattgataatttagaaaccttgctccttaataatcaacgtgaatttatagagtttaatcagtctcttccattacattggcgcgttatcgttactagccgaataactgttgattcagcgactacggtggtattggatgcattagggaaaaaacatgcattgcatctggctagaaattatttcagaaaaagaggagtaagccaactaatagaaagtgagttagagacaattgtttctaaaacaaattataaccccctggcaatcagattgacagtagacttatttttacgtggtcaagatttaccttcatcaatatcgcaatcgcagaaagatatagcagcattttcttatagaaacctcattgatactttgttacctgcctcaattgcaatattagaagctatcttctcaagtggtgcttcttcgagaaatgaacttgcagagattctgacacttgataatgatgaagtcgcccagtccgttaacgaactaagtaagactagtctaataattagaagtttggatgatagtgaacaggatttatttagtttaagcgattcaattagagaccttcttcttgttaaccctaagaatattgaagtaagaaagcatgtttctgaaactataagaaagagaagaataatgcttcaggagcactctcggagtcaagaacagagaggagtaacaaagtttgacgaggattatataccgtctgatactcctgacggattaaaaatgcttggggtggagacgaataaactactgaggaagcggcaaatcccagtaggagtcttggctgatatctcaaataaatatcgagatgctttaagtcagtactcaaaaaattatttgtttaatttcaactatgcaagagttttaatgcagttgaaagttgatggttctgctctgcattatttactggaagcggggaagttaaatccaaaatcaccaatgattaaacttgcaatcgcaaaataccatttttcaaatggtcagtatcctgaggctgaaaaatatttcaaagaattgttcaatgaaggctatgggaataaagaaaattctaatgagcatttttctcactctgttgttaaaggccggttgcaatctttactataccaagggaaacatgatgatgtaattggtattactgaagggtggcaggggtttgtcggccatagagcattatttggttcttatcgcgcttccgcatacaaacgttctattgagcatcaactaaatgatattgataaggttgagggtgctcttgataaagcaatttctgtattatctgaagtgttcaaattggaaggcatgggtactattgcatgtgcagaagcctttagagtaattaaagagctccattacattctacaatcgcaaagtacattctctgttgggttcctttatagagcactggcgttcgtgtctgataatttatttgaaatgttgcaggataatagaaactattctctcgattcatctgagattaaagattggttgaaggtgttctataatgtcgatatcaaaaataaccctgttcataatttaggttggtatcattcggaagaagtgaattactcccttgaacatattaatatgcttgaaagggatgggtatacaattgttacagtttatcaccttccaaataatgaagatggggttcctaaatatatgtttgcagcagatgataaagggacacagtattatttgaatgttaatttcttcaaggcaggttgggaaagatggtctttctttgatgtaaatacaaagcttgcaataaaaacaaaaaataatgtgcaaacaggtaagacaatagcagcaaatgaaatagttgaaattaataaggaaaaagcaataagctga

SEQ ID NO: 170454 - DNA, 330 bp, Enterobacter cloacae
atgtcggcgcgcgtgatgaactgcctggaggtactggcccccagggtggaacagtattccattgatgagatgttcctcgacctgaccggcctggagcactgtatggggcttgaggacttcggccggcagctgcgtcagcacgtgtatgactgtacccgcctgaccattggcgtgggcgccggaccaaccaaaaccctcgcaaaatcagcccagtgggcctcaaaagagtggaaacagtttcgtggcgtactcgctctgaccaggggaaatccgcagagaacgcggaaactgctttcactgcaaccggttgaagaaatctggggggggtaa

SEQ ID NO: 170455 - DNA, 228 bp, Enterobacter cloacae
atgacaaatatcattctgtgtgatgtaactgccagcgtcagcgaacttaaaacgatccggtggccagcgccggtgccggctgcggctactcggtcgctattattgacagcaaccggcctgtttttttattgtgtgcccgcggttctgtatgaaaaaatgctcgatcttctggacgaaaaagacctggcgcaattgataacagaacgtcaaaaccagtatattttgtga

SEQ ID NO: 170456 - DNA, 690 bp, Enterobacter cloacae
atgaagaacaaagtggaaataaactcctttagctttgttttagagccatcatacaaaaaagatggctcccttcattcatgggagattttaacaaaaaatatatttaaaaagaataccaatgattaccaagctaatgaaatgccgttttctttcgatgcgttaaatgagaaggaaataattgatgcgtttaacaagcaactattgacaattgaaaagcttgaaggttttcacttaaagtttccattgctatccttaaacgtagatagcctcataagcgattatatattgaccgacaaatatgtaagtgagcacataaaaagaaaaaataatattgctttagaaattaatgaaaacttccatgaatttaagtccttgaattgtatgtctgatttgaaaaaactttctaggctggggcctttgtggttggatgatttcggaggagggttaacgagtttaaaactcattgagttatttaaatttgaatgtgtaaaaatagataaggattatttctgggaaattcaaaacaagaaaaacctcatggaaataataaataaaataaaggtatattgtaattttttaatagtggaaggtgttgaaactatagagcaaaaaaatatagttttttctgttaatgatagtgcttgccaaggacgattatggaaaaaaaactaccacaacattgagtgttaa

SEQ ID NO: 170457 - DNA, 273 bp, Enterobacter cloacae
atggtaatatcactactcacccggataactcggagagaagatacttgcggcctgtcaggtaaagagctgggggcttattctccggtggaaacgaactttaattacgattctaataaaattttgcgtcttaacgtctgtgtcagcaatatccttgataagcagatctaccgattttcagaaggggctagtccctataatgagttagggtgggcttattatgtggggggcggtagtttcattctgttcctaattattaagactaagcaagaataa

SEQ ID NO: 170458 - DNA, 222 bp, Enterobacter cloacae
atggataaaaagctttttcaataccctgaggatgatttttttattcttctttataatgaatctttgttggagtttaatatacagaaagccaatgcgtttttaatcgaaagttgcaattgttttcttgaaggaaaggataatggatttaggcctctggcatttttaagctcgtgtgatgagttacttgagataaaaaaatatttgatccgtgctagaggttaa

SEQ ID NO: 170459 - DNA, 141 bp, Enterobacter cloacae
atgaaagcactctttaatttatctatttccacatacttaattttactgattccccccctcgtcattggaatgttcctcacacttatccaaaaatatcctgtcattgataaatgtaacatgaataacaaaatgaatagctga

SEQ ID NO: 170460 - DNA, 423 bp, Enterobacter cloacae
atgggtgacattgatcgtaagatcctcatattgttaagagataacgctcgaatccctgttagcgaaattgccgcgcttatcggtgtatcgcgtgcgactgtgcagaagcatcttaaccagatggaatcgaatggcacaatctgcggctatactgtgctcacgcggcagataccagagacgaatctcatcagggcatggatgagtattgcaattgaaggcaacaaagcgccaaaaattatccagcaattgcagggagagccggcgatagcgactctgcataaaaccaatggtcgctgggatatcctggtagaaattcatacccgcagtcttgaagagtttgacaagattttaggggggattcggcgcatccctggggtggcaaatacagaaacaagtattcttctttctactcgtaaaatgtga

SEQ ID NO: 170461 - DNA, 1014 bp, Enterobacter cloacae
atgacaactttcattaatatttcacatatgcagcaactggtcagaaaaaccggcgtgcagcaattcattactgaacttacggggtttattgaggatgattatcggtcctggccttattttcagaaatgcccacgtgtcgcaaatcattcagcgctgggcgttattgaactgatgccaactgccagtaaaagcctctatggatttaaatacgttaacgggcatccgtcgaacgcggataaaaataatttgacggttatggcatttggggcactcgcagaaatagacacaggttaccctttgctgttaagtgaacttacgctagctactgcgttacgtactgctgccacatcagtactggccgcaaaatatcttgcgccacatcatgttagaaccatggcagtgattgggaacggtgcacaaagcgaattccagattctggcattccacacgttgctcggcattaatcacttccgtctttacgatatcgatcccagagcttctgaaaaactaaaaaataatcttacagagtatcaggcgattcatctacacatatccgattcggtggcagaagcagttcaaggcgtggatattatcaccacgatcactgcggacaaaaagaatgccaccattatcacgcccggtatgatatccgacaatgtatatataaatgctgtcggtggtgactgccccggtaaaacggaaattcatcccgatgtcattaaccgtgccagggtagtggttgaatatgagcctcaaagcagaattgaaggtgaaattcaaaatatgccagccagtttcgctgttaccgaactctggaaaattattaacggtaatgttaataatagtgatttccagcacgggctgactgttttcgattcagtgggatttgccatcgaagatttttccaccctgcgctatatcaggcatctgtctgaaaaatatcgtattggtgaaaaaatcgagttagtgccacagcctgccgatcctcgtgatttgttcagttgtatcaaataa

SEQ ID NO: 170462 - DNA, 918 bp, Enterobacter cloacae
atgcaaacaaccagtcgtattttcatggttcgtcccgcttcctttaccgttaatcaggaaaccgccgtcacaaattatttccagcagaccgcgcaaatccctgatgcagcacaatcccttgcgcttgccgaattcacccgctatgtcgacaccctgcaacaagcgggtatcgacgtacatgttttcgacgatcccacgggaacggatacccctgattcgttgttccccaataactggctgacgctgggtcatcagggcgaggccatcctctacccaatggaagcgccaaatcgtcgcaaagaacgaaatcctgaactgatcgccacactgtcagaacaattcacgattaaccaggtcattgatctttccgcgtttgagcaacaaggggaatttcttgaaggcacggggtcgatggtgtgcgatcacgagaataaaatcgcctggatttgtcgctcttcgcgaagttcgccgcatgtcatgacgtcggtagaagaaattaccggttaccgcgcaatgtggtttaatgctgacgaccgcagacaacaaccgatttatcacaccaatgtaatgatgagcatcggcaaaaaatatgcggtggtttgctttgaagcgatcagaaaccgtcaggaagccgccgtactctataaagggctacgtcaggcaggtaaagaaattatcgatattaccctgacacagacagaaaacttctgcggaaacattatcgaattgcatgccgaaaataatggccatcccgttctggcgatgtcaaagagagcgtggcaggcgtttactgactctcagcggcatattctttcagattacgctactattgtcgctccgtctctggatattattgaacaactcggcggtggcggggcgagatgtatggttggtgaaatattcagcccacggcgttag

SEQ ID NO: 170463 - DNA, 1239 bp, Enterobacter cloacae; identical to SEQ ID NO: 94178

SEQ ID NO: 170464 - DNA, 1038 bp, Enterobacter cloacae
atgatggttattcgtcccgttgagtcccgcgatctgcctgcactgatggcactggccggcaaagccggtgtcggactcacttccctgccgcaaaatgaagatattctggccgggcgcatcactcgttctcaggaaacctggcagggcctgcgcccccgtggtgaacagggttacctgtttgtgctggaagacacagatagcggccgtgtcgtgggcatcagtgccctcgaagttgccgtggggttacacgaaccctggtacaacttccgggttgcgccacttgtgcacgccagcacctcactgaacgtgtacagttcgcatcaaacattatttctcagtaatgaccatacaggttgtacagaattatgcacgctgtatctcgacccggagtggcggcatagccataacggcaaattactctccaaagtacggtttctgtttcttgccgcgttccgcgactgcttcgcccagcgcgtagtggcggaaatgcgcggctacagtgacagcaacggacgctcaccgttctgggaggggctcggcaaccgattttttgccatggacttcgcccacgccgactacctgaccggtatcggccagaaagcatttatcgccgagctgatgccccggtatccgttgtatatcgattttctccccgaagaagccagagccgtgattggggaggttcacccggatactgttccggcccgccgactgctggagaccgaagggctgcgccaccgcggttacgtggacatctttgacggcggcgccacgcttgaggcggaactggacgaactgcgggtagtaaaagaaagccgcaaagtcacggtgtcgaccaacgaagcgccagtatcgacacctgactccacgctgctggtcgccaatgatcgctacctcaactatcgcgcgacgttagcacccggccatttttctcccgaaggcgttctgtacctgacgccgtccacagcggatgcgctggaaatcaagacaggcgatcgcgttcgggtggtttccctcaatccgctggagaacctgtaa

SEQ ID NO: 170465 - DNA, 1500 bp, Enterobacter cloacae
atgttgcatccttcactctatatcgcaggtcagtggcggcatggccgcagtgctgaatttatcaagaccgatccgctggataaccagccgctgtggcggggccgggcggcggattcggcagacatcgccgacgcctgtgatgcggcgcgcacggcgttccccgtgtgggcgcggctgacgctggggcagcgcacggctgtggttgagcgtttcgccacgttgctggaacaacacaaggcgcaactggcggaagtcatcagccgcgaaaccagcaagccgcgctgggaaacgctgactgaagtgcagtcgatgatcggcaaggttgacatctcgctacgcgcccttgagcagcgcaccggcgacagccataccccgatgaccgacggcgcggccacgctgcggcatcgtccgcacggagtactggcggtgtttggcccctacaatttccccggacacctgcctaacggccacatcgtccccgcactactggcgggtaactgcgtggtgttcaaaccaagcgagctgacgccgttcaccgctgaagagacagttaagctgtggcaacaagccggactgccgaagggcgtgctgaatctggtgcagggaggacgggacactggcgtggcgctggccgccagcccggcgatcgacggcctgttgttcaccggcagcgccggtaccggctaccagctgcaccgccaactggccggtcagccggaaaaaattctggcgctggagatgggcggcaacaacgcactgattatcgatgaggttaccgacttgaacgcggcggtcaacctgactatccagtccgcctttatctccgccgggcagcgttgcacctgtgcccgtcgtctgctggtcaagcacggcgcggcgggcgacgcattcctgcaacggctggtcaccgtggcgggtcgcctgcgcgctggtcgctgggacgcggagccgcagccgtttatgggcggggtaatttccgcgcaagcggcggaacggatgatggcggtacagcaggcactgctggaactgggcgcgacgccgctgctggcgatgacccggccggaggataacaacgcgctgctgatgccgggcatcctcgatatcaccggcgtcgatggcgtgccggacgaagagtatttcggtccgctgacctgcgtgacgcgctatgacgagttcgatgatgcgctgcgtctcgccaaccacactcgcttcgggctggctgtagggctggtgtcgccagaccgggcgctgttcgaccgcttgctgatggaagcgcgcgccggaatcgtcaactggaacaagccgttgaccggcgcatcgagcgccgcgccgttcggcggagtgggggcctcgggcaaccatcgcgccagcgccttctacgccgccgactactgcgcctggccgatggcctcgctggaaagcgcagcgctgacgctgcccgccaccttgccgccagggctcaaccttaatgatgcgcagagcgggaacagagaagcatga

SEQ ID NO: 170466 - DNA, 990 bp, Enterobacter cloacae; identical to SEQ ID NO: 94175

SEQ ID NO: 170467 - DNA, 687 bp, Enterobacter cloacae; identical to SEQ ID NO: 94174

SEQ ID NO: 170468 - DNA, 717 bp, Enterobacter cloacae
atgatggatatcctccacgaatacgggcgcgccctgctgtggactgacggctatcgctttaccggcgtggcgatgaccctgtggctgctggttatctcggtagttctgggcggggcactggcgctgctcctggctgttggacgggtatccagcaataaatttatcgcgctgcccatctggctgttcacttacgtgttccgcggcacgccgctctatgttcagttactggtgctctacaccggcgtgtataccctggaagtggtgaaaggcagcgaactgctgaatgcatttttccgcagcggcctcaattgcacccttctggcgctcatgctgaacacctgtgcctacaccacggaaattttcgcgggcgccatcagggcagtgaatcacggcgagattgaggcggcgcgggcctatggcttctcgccagcaaaaatgtactgctgcctgaccctgcccgccgcgttgcgtatcgctctgccggcgtacagcaacgaagtgatcctgatgctgcactccacctcgttggcttttaccgctaccgtgccggacctgctgaaaatcgcccgtgacatcaatgccgccacctatcaaccgtttaccgccttcggtatcgctgcggcactgtacctgatgatttcatttgtgctgataagcctgttccgcaaagcggaaaaacgctggttgtcacacctgacccattcgcctgcaaagtga

SEQ ID NO: 170469 - DNA, 774 bp, Enterobacter cloacae
atgtcagaaactaaattaaacgtcgtcgagttgcacaaaagctacggagagcacgaagtgctgaagggagtctccctgcaagccagggctggtgatgtgatcagcattatcggctcttccggctccggtaagagtaccttcctgcgctgtatcaattttcttgaaaaacccagcgaaggctccatcagcgtgaataacgagatgatccacctggtacgggacaaagacgggcaacttaaggtagcagataaaaatcagctacgccgtctgagaaccagcctgaccatggtatttcagcacttcaacctgtggagtcatctgaccgtgctggaaaatgtgatggaagcccctgttcgcgtgttagggctcagtaaggaatccgcacgggaacgggcgatgaaatatctgtccaaggtgggcattgacgaacgggcgcaaagtaaatatccggccaatctttccgggggacaacagcagcgagtgtccattgcccgggctctggcgatggagccggaagtgttgttgttcgacgaacccacttcggcactggacccggaactggtgggggaagtgctgaaaatcatgaggcagctggcagaagaaggaaaaaccatggtggttgtcacccacgaaatggagtttgcacgtcacgtatccagtcaggtgatcttcctgcatcagggaaaaatcgaagaacaagggcctccgtccggggtatttggcaacccgcaaagcccgcgccttcgtcagtttttatccggtgcgctgaaataa

SEQ ID NO: 170470 - DNA, 786 bp, Enterobacter cloacae; identical to SEQ ID NO: 94171

SEQ ID NO: 170471 - DNA, 564 bp, Enterobacter cloacae
atggccgttatgtatgggtatgcccgcgtttcaaccaacgatcaggatctggccttgcagacacaaaccctgcgcgatgccggctgcgaaatcattcgcgcagaaaaagccagcggtgccagccgaaaggggcgttccgaattgcagctgttgctggacttcctgcggcctggcgacacccttaccgtcacgcggatcgaccgcctcgcccgcagcatcaaagacctacaggacattgtttttgccctgaacctgaaaggcgttaccctcaaggcgacggaacaacctgtcgatacgcgtaccgccgctggcaaagccttcctcgatatgctgggtgtttttgccgaatttgaaaccaatctgcgccgtgaacgtcagttggaggggatcgcggcggcgaaagcgcgcggtgtctaccgcggccgcaaaccttctatcgatccggccgaagtgcatcgcctctatgtggacgaaaaaatgggagcaaccgccatcgcccgcaagcttgggattggccgggcatcggtctaccgggctctggatgcttatggacagccggcgtaa

SEQ ID NO: 170472 - DNA, 1662 bp, Enterobacter cloacae
atggacagccggcgtaaggttatccctgcggattcgttgctgcaattgcggcagcggcttgatcgtctgccccctaaaagccctgaacgggccgctcagattgcgtctgtcgccgacctgtacggcgtttctgccacctcggtctaccgggctctccggcgtgacctgaaaccgcatgccgcccaccgccgcgattacggcaaatctagggtgttgcccacctgggagctggagctgtattgcgagattatcgccgccctgaaactgcgtaccaccaacaaatccggtcgtcacctgtcgacgtccagggcgatacaattacttgaagaacatggggtcgaggttggtcaggaactgatcaaagcgccgccaggattgctacgtcgccagacagtggaccgttatatttcccggtttcgcctcgaccagtcccgtttattacgggaaccgccagtcgtcaggtttcaggctgaatacagcaatgactgctggcagttcgatatgtccccgtccgatctcaaacatatcgagcggcctgaatgggttgatcccgccagaggcgaaccgacgttaacgatattcagcgtcgtggacgatcgtagtggcatcacctatcaggaatatcggtgcgtttacggtgaagacgccgaatcggcattgcgttttctgtttaatgccatggcacccaaaccctcaattcctgaaccccatctccagggacgccccaagatgctgtatctcgacaacggccccgttgccaaaagccgggtattcagtaacgtgatgcgggaattgcatattgactggcagacgcatctccctgccggcaaagacggcacccgcaccacggcgcggtccaaaggtaaagtcgagcgtcctttcaggaccgtcaaagaggcgcatgaaaccctttaccacttccataagccggaaaccgagcaccaggccaacgaatggctctggcattacctgacgcagtacaacaaccagcgccaccgcagcgagaagcactcccgcatcgaagactgggtggcgaatttgccgccagaggggctgcgggacatgtgtacctgggagcagtaccgccactttgcccgtgagccggagtctcgtaaagtagggagtgatgctcgcgtgacggtcgacggcaccgtctatgaagtcgaaccggatatggccggcgaaaccgttattctgcagtggggcctgtttgacgacgagatgttcgttgagttcgaacatgaaacatggggcccctatttcccggtgtcgggcccggttcccctgcaccggtatcgggcatttcggcgggggaaaacggccgagcggtcagatcggatccattccctggccatccagctgaatgtccccatcagcgcgctgtccggcagtgagcttcaactggtcaacaatccccaatccggcgacgatttaaagcatcagccgtttgatatcacggagtctgaatacgtctttccgacggttatcgccgcgaaactggccattgccgatgacctggcaacgccactggccaaactctcggacgacaaccgggcatttatcgatggcgttctggcgcaaacgctgatccgccgcgaggtccttgcccggatcagggaacacttccgcaaccgattatcagaagcagaccatgcgggttga

SEQ ID NO: 170473 - DNA, 969 bp, Enterobacter cloacae
atgcgggttgaggtaatggagcattatgggctgactcagcctgttgcacaggccggatactatgaaactgcccaccacaggcaacttatcaaggatatcaggggggccatcgatgaaggtcgtctggttgccgtctgcggcgtggtaggcagcggcaaaaccgtcacgcttcgccgactgcagcaactcctcagagaggaaaagaaagtcatcgtggccaggtcgctgtcggtagaaaagcagaacatcaagctggccacgttgattaacgcgctgttttacgatctgacccaggacaaggtggtccagatccccaagcagggcgaacgtcgtgagcgggaactgcagaaactggtcaagaagggcaaacgcccggtggcgctgtttgtcgatgaagcgcacgacctgaacggtcatacgcttattggactcaagcggctgatggaaaccgtagaagacggtggaggacgattgtcggttgtgctggccggtcaccccaagttgcgtaacgatctgcgccgcccgaccatggaagaaattggttaccgtaccgatatctttaccctggacggtatcaccggcagccagcgggaatatattcactggctgctcagtgcctgcgcggaacacggcaaaccggaagatatcctgacgaccgaagccattgaactgctggctgagaaactgcgcacgccactgcagatccagctgcatctgacgctggccatggaagccggttatcaaaccggagaaaagccgataacggcatcgctgattgagtcggtcctctcgcggcagctgaacgacctggagccgaccctgacgcgtcacgggtaccgtctgaaagagatggtggaactgtttgacgcgaggccggcggagatccgggccttcttcaacaatcagctcgatccggttaggtcgtctgaatttcgtgaccggctactggccatcgggctgccaatataa

SEQ ID NO: 170474 - DNA, 447 bp, Enterobacter cloacae
atgaaaaaaacactcattgcactattcctagcaggcttgaccacatccgcgtatgcgcaagatgaactaaccatcagtaaactggcggcagatcaggatacaaaggcggagtttcagaaaatggcgtctaaccagcacttgcccaaatgggtaactcaggggggaacagactctcagggccagaaagtcaacatcgcaggtaaacagtatctggtgctgaattcatgcaaaccgcatgattgtggttcacagcggatcgcagtgctttacgccacggcaacgaagaaaatagcgggtgttttctccacggtagatgagaaaacaggtaatgaaaaactacagtggttaaacatacctgatgatttgtcgattgatgggaagacagtcctgctcgcttcactgacaggcagtcttgataatcaccctgatagtttcaattttaaatag

SEQ ID NO: 170475 - DNA, 504 bp, Enterobacter cloacae
atgccgtccagcagcatcgccagttgggctggtgtcagatggattttaccgtttctcgccaacgggcaaacgaagcgaccgcgctccgggcgtttggtggacaggcacaggccatcggcgtcggtccacagcagcccggaacataaagacctgccccgagaacgtgttgtcacgcagcgtattttgaacccgcgaggccaagccgttaaagcctttacgcatgtcggtgatgccggccacgatccagatgcgactgcctgccggcagcgacatcatcggcacgttcctttcaactcgtggatcaacatgttcagcaacgcaggactgagggcgccccggagccgtaatgtgccaccaggcaacaccagttcacactccgcgacgtcggagggtggtgctttatctgcttcagttattggcggtggtgatggcacatcttccagttcaaccggcagcaggcagggctcagcagggatggtcgcgccgagacgcccctgtttgtag

SEQ ID NO: 170476 - DNA, 342 bp, Enterobacter cloacae
atgccggcggcggcatggttcgcgtactcaccggaccgcaagggcctccatccgcagcagcaccgggcaggataccgcggtgtcctgcaggcagatgcctatggacgctacagcgcgctgtatgaaaacgggcgcatcaaggaggccgcctacatggcacatgcgcggcggaaaatccacgaggttcatgctcgcacaccgaccgaaatcaccacggaagtgctgaagcgcatcggtgatctgtacaccatcgaagcagaaatactcggcagcccggcggagaaacggctgtcggtcagaaaagtgaagacgatgccgcagatgcaatcgctgtacgactga

SEQ ID NO: 170477 - DNA, 276 bp, Enterobacter cloacae
ttgaacctctactgcgagaacggctgggtggaaatcgacaataatatcgcggagaacgccctgcgcagtgtcgcgctggggcgaaagaactggttgttagccgcgtcagatgcaggcggagagcgcgcagcgatactgtgctcgctgatcggcacgtgcaaactgaacggcgtggagccggaagcgtggctgcgcttcgtcatcggacatatccagggctggccggtaaaccgagtccgcgatctgccgccatggaaggtcgatatcatttcatga

SEQ ID NO: 170478 - DNA, 939 bp, Enterobacter cloacae
atgtcatatccacaaacgaaactaactggtctgactggttttgctaaagcggccagcgttacagggggttggtcaggttcagtggtgagtataaccacgctagatcaacttaaaaaaaatatcgctgacaacacaccgcgagtcttggtgatcgacagaaacatttccgccccaactctcacaaaagttccgctaggcgccaacaaaaccctagttggctcctttcaaaaccgcacgctgaataacattcatctgcgtgccacggagagttcgcaaaatatcatatttcagaacttggtatttcagcattcacaaagcatcaaggataatgacgatattcaattatacctgaactacggtagtaagtattgggtcgatcattgttcttttgtgggtcatagttggtcatcaaatgatggaagtctggataagcttctgtatattggtgataaagcggattatgcaaccattagcaactgtttgttttcaaaccacaaatacggtctaattctcggccacccggcggacgacaataacaccgactataacggcttccctcacctgacactatgccacaaccatttcgaaaacatggaggtccgtgcacctggcctgatgcgttacggttatttccacgtttataacaactatattaaccatttccaccttggttttacgctggcgcaaaacgccaatatcctttccgagaacaactattttggtgcgggtagcgagaacaaaggcatgttggatgacaaagccaacggtacttttaatgatacaggcagcgttcccgccatcacaaatcagaaatcgccaaaaacgaattggacagcgtcgtccaattacagctacacccttaaaaccgccgtgcaggcgaaagcctttgccaccactaacgccggagcacagtctgcttcgttggtatttggaggataa

SEQ ID NO: 170479 - DNA, 648 bp, Enterobacter cloacae
atggctgactggtttattgcgaccgaaggcgtgaaggtggtgaaggacagttccagtctgtggccacagattttcactgccgctgcagcattcggtggtgtgtggtacgggcagtggcgaataacccaacgagagaaggaagcagcggaagcgaagcaggcccgcgagcgactctttatcggcacagagctgatctgcctgctggagcactttgctgaccagtgcagtgatgtggcctgcgatactgagcccgataaagaaaactggtcggttaaagatctgcctcttctgagtcttgaaggaatcgaaggtgactggcgttcgcttccatccgaactgcttttccgtatccgtaacctgccggcgctgaacagggaagcccggtacgttattgaaagcgtattccggtacgaatcaccacctgacgccgcggaatccgcccggtaccagtatgcccgtctggggctgaaagtgctgctgatagcctggcgtcttcgccggatctgcgatcttcctcccccgcgcgaaggggaactgtgcaggcggatcgggtccattctgtggcgcaaccgccgcgcactgtggcgccggcatgtggaacgccagcggcagatacagaatgacctgtcccctgatgagaaaggataa

SEQ ID NO: 170480 - DNA, 348 bp, Enterobacter cloacae
gtgattgatgacgataaatcaggccagcggttttttcaggtaggcgctcttctctttgtgggtctgctgggtaccgcgctgtatcacaattatcacgcaaagagccagcgcgcgggcagcattgccagctgctccctgccgacgggtaactttgagatcgtcccccgcgacggtcgcctgaatgcggtgaacacggaaaccggtatgacgctgggcgtgcccgaacgccgtcctgatggcagtgtcctgctggtcacgaacggtggcagggtccgggacgtgacggagtgtctcggtgagaagaaagggtggtttgcgccgcgctggccggatgctactgacaggtag

SEQ ID NO: 170481 - DNA, 492 bp, Enterobacter cloacae
atgcggaagctgagagacattgacgagtttgatgatgggcatccactgtatttgtggttaaacattaagtttctgactgacgatgaggttattgagcatatcaaaagaatgcttcctcaatggcgaaaggagtataccgttggcgagccagcaattggttcgtttcggtttggactaagcactgtcaaaaaggtgatcaacctcagggttatcccaatgcttgatctgctgctttgggcgaagcggaatgatgccaagatctcttatgagcagttttcccgtctcctctaccctaacgactctgaagtcatcagaggcggctctcaaatcaaggataccgacaagccgtttgctgaaaaagtgctcacgcgcgaatttgatcgactgtttaacctctggctgagtaaaaacgattacatgatggatactaaggtagccgaagcgatgaagatgaacgaaaaagaagaggaggacgagaaaaaagggaagtaa

SEQ ID NO: 170482 - DNA, 603 bp, Enterobacter cloacae
atgaataataaacttttactgttgggttttgttagtgccattaattttttttcattgggtgcgtctgcgaacgatgtcgatgtatcatcggcagttaaaagctatacctacaaggatggagaaccttacggtctatcaaaagtatatcaaattgatgcaccagataacggttttcctccttattatattttccagaagctaggcaaagggaacgcatatccatttatttttaatcgcgaaggactaccaggtaaagacgagccatacagtcgatgtaacgtagtgctcaaagttaatgatcactatcttatacctaacaggaattataaaactggatatgccgaagattctgaatcatgccttggcgtcgatagaatgcaaatcattaaaggtagcaaagatattaaatggtatgtaaccgaggttttatatcagtcggagagtgatacaccaaataaaactgaagaagtatatttttattctggcggttttttttgcttctcaaaaaaaataagctcaaaactagctgcgagtaaagttaatataatagatctcggaaatttatctgcggatgagaaatacttcgaggaatgtgacaaataa

SEQ ID NO: 170483 - DNA, 2268 bp, Enterobacter cloacae
atgattatcagcccgccgtttctgagaaacagaactgcatcccagtctgacgccgactgggttgaagcgatgatgcccgtcaattctcgccgggaatatcctctcaatgcaccagagtcctggcatgggggtatccatatatcgcatacggatgcaggcacaacgccggagaaggtgagggcaatcgctgacgggaccgttgtgtcgttccgcaagccgtccccgccagaaaaaagagaccagttcccactgaagtatgcttctctcaggggaacggatgatggctatgttttactgaaacatgagacagaaattggttccggagaagacggtaaggtcgttttttactctttgtatatgcatctgaagtttctggaagccgcgataaaaactgacgccagaatataccggaaagacccgcttggctcttccggaatgacagacggccaaaatgaatttcacttccaggttttctgcgatgatgacaacatcagcaaactgacgggacgaaaaacgaaggagctggatatttcgaaagatgggcgcactgatgcggtgtacggtgatattcatttttatctgccagcaggaacaacgttttacgacaaggcgccggcagataacagtacttctctgaccgggctttctgagttgtataccagcagtgcacctctgtatgtcagcatgaccctggcacagggcaactgtacgatggtgacccggcaaaaaaatatgcagactgacgggaagtatgatcagctgggcgagccactggttaatgccgatggtgaaaattatgaatacaatctttataaaaccgctatgcggaattatagggagagccccagtgccggatatgagttgcttcgttttggtcgggttatcaatactgagcatgaaacgctggtgccagcagatgcgccattatggatgacgatcagttatccggggggcaaaggggtggtgaatcttgctgctcccagtattaaaaagtttagcgatgcagatttcccccactggacgggatggctccttgttgacgatgacaacgatacccacagccagtgtaattcggcaatcatcagaaagttgcaggaagagggcaggttcgaggctcaaagcaacaggcttatctgctgtttaccattcgagtgggaaaaaagcacaatagatgccaggtataaatggctgatgaccggtctgccatgggagcagtgtacaccagaaaaaacggccatatggcagattcccgggacgcaagaatcatatgaacgaactctgatgaatgaggaagactatggcaaatttaagcaacacgcagaagcgctgtgttttgattcaggatcgctcggtagcggaaaaatatggcacttcaatcccatccaatttataaatcatttgagaagatgcggatggcttagtcatgaagaactttcctcaatgattccaaggaaatattatgaaggctaccccagcaagccagttaatgtaacagtaccatgggctacttcgtttggtcggtgggaaaagtatgcgaaagattttaacaaaacatgtaataagtacaacataatatccccacttagacgctctgcatttttagggcaaatttatattgagaccgggatgctcaggactatgactgaaggtggaaagggacaaaaaaatagcaaaggtaagtttgtatcccctgcggctgaatattatcaaccattttatggaaggggattcatgcaactaacctggccgcaaaatttcgatgactatagaaagtttagaacgaaagagaagttgcctgatgaaccatctggatatgtttacgatgatagtcgaataacaaatgtaagtgaacattattgggcagatcccagaaagacagtcgtagataagcatactcatgaaaagcgcactgttattgatgatgatcttttaaaaaaatggtatccccgttatgatcctaaaattatcgcagaggattcattctgctcaactgatagcgctggtttttactgggtttcaaaacatcacagccatgagataaatattaacagagtacctgataatggaattacttcagaatcaatcggtagatgttcagttttagttaatggcggtggatatggttattttgaacgacaggcctatacacgatatgcgttctactatttaaatgataccgtaacaacagataccaaagaaacagttgaagtgcaaaaagggcgtagtactgtaaaaatcactgttgattacaccagacagtgcaagtga

SEQ ID NO: 170484 - DNA, 315 bp, Enterobacter cloacae
atgaatactgaagaactaaataacattaaggactcatcaactaaagtttttactgctatggcgaagaatctttatatcacaggaatacgtatatataaagagcaggaagagtatgaggtattggaagccataatgttagatagtaatagaactgaatcatatcttttgcatgttaaagaatatctggaaaagcgctttgataaacatatggaagaggcaggtaaaagagaaagactgatttatgttgatatggataaagttatgcatgaaatgagatatgtacatactcaagcattactttttagtatgagctaa

SEQ ID NO: 170485 - DNA, 297 bp, Enterobacter cloacae
atgtttaaagagaagataggtattaataaatcaactgaactgttctatgaccttgcatgtagatcatttgccacaagctggaatatgttcatggaagttaatggcgatggggatgctaatgattatctagatgacccggattttatgagtccatttattatccatgcgattgaccacattcagaacaactttgaaatattcactgcccaagagggtaataacggtgatattaatcaggttaactttgaaatggttgctgctatgttggttagatattcagacagcttcagaaaataa

SEQ ID NO: 170486 - DNA, 237 bp, Enterobacter cloacae
atgacaaataaaatatctgtagtagtaagtatgctgtgcgaaggaactcctaacgtaatgaatactattcaagaaagctttgatgtatttgttgctctaagagggtattcagtagaagaaatgataggggataagaacttgattgatgctttaaatagacatgtcaataacgatttagttgatgagttagatttggaatatggctccgttatcatcaatatcggttataacaactaa

SEQ ID NO: 170487 - DNA, 351 bp, Enterobacter cloacae
atgaaagagattatattgaatagttatgaggaaacaaaaaacgaacttgttgctaacatcttacaaggatactgtgatgagatatatggtatttatgaaaaacatcctgaaacagcaatagatattttgaatgatggtttcctttcaggcatcacatatgacgttttgattgctcgtgagatgaagaaatactctgtcaaaaatgatgtatctgatatcaatagaagagatttaaaagccacaatcttgtattggcatcaagaacacatcattgaacttgtttcaaaaaatataaatcaggatgaaaatgaagatccgatttactggaagctaaaaatgacagttatttga

SEQ ID NO: 170488 - DNA, 267 bp, Enterobacter cloacae
atgaatgataaaactaagaggtttaatatgattgatgaattccacgttatgtatatgtatagaaaaatccaagctgaagcggctaccactgatataaagacattgaacaaactcttgaagaagttccgcaaggtagtagcggaacggcgggaagaatactatcaggagattggtgagaaaaaggcacgtaagttaaaaatgaaaaagatcctcaaattgatggagaaggataggatatcaccagaggatctcattgactggcagtag

SEQ ID NO: 170489 - DNA, 1131 bp, Enterobacter cloacae
atggctggctgcggtaacccgctgcgggaaacgttcatcctcatagcgcagggtgacgtctatcgcccgcggctcgtcgtgaagaccgatcagcctgccgtgctcgtcccacgccgtcagcagcgcgttgccgtattcgtcgctgagggaggccagacgcaggatagaaggattcgcgcgggtcggtttgtacagacgccacaccgcgccgtcgtcgtcggcaatcgccacgtcgccgttctcattgcggcggataatgatgccttcgctgatgctgtaaaacgcgcggtcgaccggcggcagctcgaagctcagctcgcgcccggtttcatcgaaccaggtcgcattgttatcttccagcgtcagatagctgtcaaaagttgtagcccagcccagaccgaacagcccttcgcgggtggtcaggctgttatagctgcgctgccagcgcagcgggaagcgccccggcagcgagaaatcgagctcgtcgtcgtcattcagcaccttcacgccggtggcagcatgaaccgggtgcgaggagccaaacacggcattcaccgccatatccgccagcatcccaccgcctgccgccgccagcgcacagggcatgtttttcaggatcttgcccggacgcccgcgcagcagggagagcgcaatcatccccagcgccagacccggcgttttaccgcttttgatatcgcggaccgtgagcgtgtccccgccgatgatcacgttaggagagacatcgtcggaaacggtgccttcgcaggtggtgcgatctttcgcgcgcaccgcaggctggccgttgatgaagacgcttttggagccttccgccagatactgcggcccggagtgtttttcacacgccaccttgtcttcttccagcggcgaagttcccgcagcggcagaggccacgctcggctgccacatttcgctgccaaactgtccggcggcggaaagcagcatgcccgcgtaatcggcaaagctgcccggcgactgcggctcagggggcggggtatcggcgggcgtgagcgtgcctgccgcgcgcgcggcagggattgcgttggtcagaacgttgttcgaaccggtggtgattttgcccgcaggcgacggcgggaaaagcgtattacctaa

SEQ ID NO: 170490 - DNA, 258 bp, Enterobacter cloacae
gtgctccagccaggtggtggtgcgggtattgccgtcggcatcggtttcctgcacccggttgcccatctcgtcgtaaacgaaggtgacggcattgccgagcggatcgatgcgacgcgtcagaagctcgttatcgtcccactcgtagcgccagttttcaccgcgctcgtcgacgtagcgcacaatcagattctgtgcgttccagtagtggcgtcgcgtctggccgtcgtagtgctcgacggtcgtcagccccgcgtctaa

SEQ ID NO: 170491 - DNA, 483 bp, Enterobacter cloacae
atgattgaattaaattttaaaccgatcacaggtgaactaaatattgatggtctgcctttgaaaattgatactgaagaaggcttttgtaggtgtgatttataccacgaattagtaaagcagagagctataaagaaaatcataccaaatcactaccttgttgactcactagcgttttttgaaagagaatttcaagttactatacgccctgtgtgctatggttttccttttatgcttcatcttgttgataaaaacagtcaatactataaatcatttaatgattggaatgcccgaactaatattaacatgctaaatgaatcagtgaaaagcttgtctgattggctgaaagaatcactaaacctggacactcctgataccacgaaaacagacattattaggtggaactttgagtgggggcgggtttcagtctcatatgagacaaagtcatttaatcatggggcatatatagtttggaatttaacgtag

SEQ ID NO: 170492 - DNA, 420 bp, Enterobacter cloacae; identical to SEQ ID NO: 18576

SEQ ID NO: 170493 - DNA, 498 bp, Enterobacter cloacae
atgaagttatggaacaaaacgattttggctgcagcaataacccttctcatcgctggttgtgatgacgcggataagaaagtggatagcaaccttaatcaagctaaggaagccgccagccagattaaagatgctgctgctgacaaagcttcatccattaaagacgaagcggataagcatattgatgctgttaagcaggaagccaataagcaagcagatcaactcactgaaaaggcaaaatccatcaaagcagaagctgacgctgaagcacaatctttagctgatcaggctaaagcgaaaggagatgaagttaaagccgatgctaaacaaaaaagcgatcaagtagtagagaaggctgaacagattaaggcacaagccatctccggtgctaacgagctggcaactgatgctgcggctaagacccaagaaatcaaagacagcatgaaaaaggataataccccagcacaagctgattctaccccaactgaaaacaaacagtaa

SEQ ID NO: 170494 - DNA, 249 bp, Enterobacter cloacae
atgggtattttatcttggattatcttcggccttatcgcgggtatcatcgcaaaatggattatgccgggtaaagaaaacgtagggattatcgtcaccattattctggggatcgtcggtgctgttgtaggaggctacattagcacgttcttcggattcggtaaggttgatgggttcaactttggtagcttcgtcgtggcagttattggcgctatcgttgttctatacatctacaacaaagttaaaagctaa

SEQ ID NO: 170495 - DNA, 660 bp, Enterobacter cloacae
atggaatattacgggattgttctgcttaagtttgttatcgggtttgttgttgtcatatctcatctgaacttttctggcaaaacccagctttcacaaatgactccagttgacttcatcgggaactttgttcttggcgggattataggtggcgttatatacagtgatgctatacctatgcatcaatacatcattacattgtttattggtgttgctcttatttctttactcaattgggtaagtaaacacgtctggtttttcaggtcatttaccattggtgagccaatcccgatcattaaaaacggaaagtttttgatggaaaatatactcaggcgtcgcaataaaatagatatcatcaatgtcgcgtctcaactccactctcagggcgtacattcatttcaggaaatacgctacgcacaaatagagccaagtggatctctgtctgtggtttgcgaaggcggtaaaatgccgtcaataatccttatgaaagatggaagagcacgcctttcagaactcaacggcattgagaaagacgaagagtggctcgataacctactcaaagaatctggaatagaaagagaacaggtattcatcgcagagttctgggatggagaaattacatttatcctcaaagatgggaaagtgaagcgaaatcaacattga

SEQ ID NO: 170496 - DNA, 1284 bp, Enterobacter cloacae
atgtgccgagtgaaagatcgcaatttcacactcaactactatgttgattttacggaaaaagattttgttgattctcttgtcaaagaggttaacgatagctccttcaaagaaactgttccaagtaagtttactcaagagcttaaggataaaatcttatctcagtatcctgaactttcatccagaacactaatgaatgaaatttttgatgctgaaatcatcgatgagaatgaaaactttaaagactctggtgcctatactcgcttaaaagataaatatccagcagcattccctaccggagttaaaccaaacaaaatcaaaaaatccactgatggtaaaaaacgtactaaaatgcgtgttggcaagttcagtgaactgaaagaattgtgggatttgatcaatcaaaaagctgtgattgaatataaaataaatagcgagagtgaattcttatcaatattcaagtcgttcatgctcgaagaaaaagatagatttactaaatcaggcgttcatactcgcattgataggatttatatccataatgatacggcaatgtcgaaaagcataattagtgatgatgataactttgctaaactcaacacaatgagttatcgagaatttcttgataacttatcacaaacaatgtttgctaaacacgataccttgcataaggttttttgtgatataaaagacactatcaatatcactgactacctgaacattcaaactatcagaaagattaaatctagctttagcaagtatttgttgaacaattcgtttaacaagttcagtcttggctacaatgtgatatcaaactctattcatcctacaaagttgactaatgcagatggtaatcctttaaatgaggtattatcaagtgatcttggtgtattgcaggataatacaaaatcaccattggattcttatctttttgaagaagtattttatgactcagagcttgaacggctcaacataacagatggagagatccagtctgtatctgttttcacaaagataccgaagaattccattaagatcccggttgcgggtggttatacatattctcctgactttgcttacgttgttaaaaccaccaaaggtgattatctaaactttatcattgaaacaaaaaacgtagacggaaaagatagcctgcggcttgaagagaagcgtaagattgaacatgctcaggcactgttcaatcaaataagtacaacggtcaatgtggagtttaaaacgcagtttgctgatgatagcattgctaatttaattaagagtagcattcattaa

SEQ ID NO: 170497 - DNA, 966 bp, Enterobacter cloacae
gtgactattcaaaaaacgcttgacttttcatcaaaagagaaaaattcaactacaaagttagtcaacgggtttgaaccgttttacgaatctaacttgggttcgatcttccacgccgattcgttagacgtgatgaagtcaatacctgataactcggttaacttagtcttcacatctccaccatatgcacttcattttaagaaagaatatggtaatgtctgtcagaaggactacgttgagtggtttgttgattttgcgaaagaaatcaaaaggatactgacagaagatggcagtttcgttttgaacatcgggggctcttggaatcccggtgagccaactagatctatctatcattttaagttagttattgctttagttgaggaagtaggattcagactagcgcaagagactttctggtacaaccctgcaaagatgcctgtacctgctcaatgggttacagtcaaacgagtccgagtgaaggattctgtagagtatgttttctggtttagtaaagggccacacccaaaagcaagtaataaaaaagtgcttcgtccttatagcaaggacatgcttcggcttgcagcaaaaggtgttaaaactactgttcgaccatcaggacataatattaatgaatcttttgataaaacccataatggagggtctatcccacctaattttattgatgatgaaacaccgtctgatgtattgaaaatgggtaataatgcagctaatgacgtttatacaaaaaaatgtaaagctaatggtatcaaaattcatcctgcgcgtttccctatgcagcttcctgaattcttcattaaaatgcttacagatgaaggggatttagttcttgatccatttggtgggtcgatgactgccggtgctgtagctgagagtttgaaccgaagatggatcggtatagatactgttgaagaatatcttgatggcgcgttatatagatttgaggaatga

SEQ ID NO: 170498 - DNA, 378 bp, Enterobacter cloacae
atgaaaaaactgtttatcgctgctctggtgagcctgcctcttaccgcttgcacaacctacggcaacaaatctctgaaagacgaatcccaacaaaccgtaaaagccaaaatcgttaaagggaaaactactcagcaagatgttattaatgcattcggggaaccacaaacgcgagctaccaatgacggtcaggaaatgtggtcctactccagcatgtcaggcgagagtcagatctcgaactacatccccggtctggccctgcttaaaaacagcaacacagctcacatgaactcccttgagatctggttcaaggggaatgttgttgagcgatataatttcagtcagacggcgagtaaggtctcgcatggcttattggactaa

SEQ ID NO: 170499 - DNA, 552 bp, Enterobacter cloacae
atgaagaagattttactcgttacttgcacagctcttgctttgacgggatgcggtgaaaaaggcgattttgagaaagcgatcaacgcgaaaatatcgcaatcgaagctgtgctactccctgcaggacaacgacattgtattcaacaaaggttttccgattaaggttaaccgtggctaccgttctgctggatacagtgccagtgatgaaatcctgaaaggacttgttgaacaggggctgctcactgtttcacagcaggcaaatggctttagcagtgtcgatgttctggaagtcacggacaagggccaagaggttgagttttgggaccgtgagaaaggtgcctgtgttggtcatcgggaagtttctgagataaaggaatggaccgaaccgggaaacggtgatcagaaagttgttcgcgtgtcatatacatggaagttggcggatgttccttcatgggtggacaagaaagcgttctccagcgtcaggggtatgaatgaacctgaagacggcaaaattaatcttgttaaaaccagcaatggctggaaagccaattaa

SEQ ID NO: 170500 - DNA, 468 bp, Enterobacter cloacae; identical to SEQ ID NO: 14110

SEQ ID NO: 170501 - DNA, 264 bp, Enterobacter cloacae
atgattgagatcgaaatgaagaaccccacttttttcagacattataatggttgttcccttcttgagggcatgtcgtacgccaagttcatagagtgcatttgcattgttggtagatatgtcggcaattacaacatctgcaagaagcaatttcctgtacatctccctgtcaatagaaccagaatgacaaacctcatcggctcttatgcactctataccacactcttctgcagctggcttaataatttcataataagttgcgtctaa

SEQ ID NO: 170502 - DNA, 333 bp, Enterobacter cloacae
atggggaaagaagaaaatgtattcatgaaaaataaagaaggaagaaagcttcgagccgaaaaaactttagatcaaaaaattgcatctgcacagatgcgtttgaatcgtttaaagaccaaagagaaatctttatccaagagcgctgagacacgcttgaagatcatccttggtgctgaggtagctaaagcttttggctgtaaagtagaagaggtagataaggagttaatattaggactgatattacaattatcgaatattagcattgaagataaagcaagattaaaattacgaggaaaaaggtttcttgaggatatggttgggaggcagaagtga

SEQ ID NO: 170503 - DNA, 645 bp, Enterobacter cloacae
atgcacacgctccggcggcggctgtctcacccagcccggcggcaccacgtaccgcccaggtgccgtaggtcagtgccctgccgcttatcagctccagcaggcttgcgcctgccgtggccgtctgtgcacgtgaagctgcagctgcggcagcaacggcggcctgataatccatctcctcatggttgccgttccaccagcgataaagggcgctgcgcttcttcggtttggggatatcctctggctttttcttttttgcggtctgtgcgtgctgcggcgtgtctgaatcggttgccgggtcgctggcgggcatggcctgaaaaaaagccatatcagcaaaattggtatgtggctcgcgctggtcaccggtatcattacacccctcaccgcgcaggcaggattttgcgaatacccggttacgttccctttcctccgccctgcgtttttcttcggcttccttttctgctgccagcctggcagcgtgttcctctctggcaatctcaaccgggtcccgtccccgtcccagccactgacctgccggagcaatcacccggttcgaacccggagggcaatcacagtgtacttttgaaccgtgaacggctgcgggcaccccgtgaaatgtcacgcgttcttcgcctgatacaatga

SEQ ID NO: 170504 - DNA, 651 bp, Enterobacter cloacae
atgaactctatctattgggtgcttatcatcggtctgctgatgaacataccatcactgactccgatgctgtttctccgtaagacgcaaaagaacgtgaaggtatggatggcggtcagactttttctgctcaacgccttcttggtgctgtccttggtgacggtatcgcagaacattacacaaaaatatggactgtttcctatatggctggtatgtgttgctatcgctctttttatggtcactctactaccaacagtgaaatttgtgcgtaaacatttaactgttggtaaaagcagaaccgttatcctttcatcgttcctgattgtctatgcggtcaggtttaatggcgtgttttcagatgtgaatggaagtggatatacgattaacggctataatacagtatggacattctttttcctgtttgcctgcctgttggcttacatcggttgttctatgaatgggaaacactatgggacatatatccgcacagccacttcacagcctaatggttataaggcctatgctccccaatcagagattgatgccgatattgctgtgaaaggatcaagtgtgttatttgatccaaatctggatgttgtggaacaacagcgttatcgtgatgcaattgaaaagcgaaataatgatagctggtaa

SEQ ID NO: 170505 - DNA, 489 bp, Enterobacter cloacae
atgggcaatttatttacgcgtatcttatttggagcaagatggataatggctccggtatatctgggactatctgccagtctgatagttttagcctataaattctttgtagagttgtatgagatagtgttgaatgtagcccattacaacaatgaagaaataatacttagcctcctatcacttatcgacttcgttctgatcgggggattgcttgttatggtgattttttccggctatgaaaactttgtctcacggttgaatgtaaaaggggcagataatgagttgtcatggataggcaagatggatgtggaatctctaaaaaataaggttttcttttcagtagtttcaatatctactatccatttattgggtgtttttatggagtcaaagaatattcctaatgataaaataatcatgtatatggggcttcaactttgcttcgttatcactgccctgttaatgcaggtattagagaaactgtctaaaaagtga

SEQ ID NO: 170506 - DNA, 249 bp, Enterobacter cloacae
atgaacggctatacccgatttgattcggtgaaagagtcagtgcaggcgtatgcgagaaacctgaatacgcacccggcttactcctcattccgtaaatcacgcgcacagctgcgtaaaacggatcaggaagtcaccgcaacggcgatgattcataagctgaaaggctattcgaccaaaggctccagctacaacgattacctgtttgcgatgtatcaggataatcagcgtctgattgctgcacatatgtaa

SEQ ID NO: 170507 - DNA, 921 bp, Enterobacter cloacae
gtggaatattttagcgataaagagaaaggttctgtatcaagaaccaacaatgatgtctctatgatcgtatggaccgggcttgtatcgtacataaatgttctcgtaaataaaggctactttgggaaagactttccagaagaatgccctgacggacgagggtgtattggtacaaatgaagatactttcaaagctgcgctacagtcggaaataccaaatttaggatggccattgggtgtcgatcctgaagatgaaggccgatatggctacaggtcaagaaccaaaaatacattcattccagactatctggacgttatggatttacttcagttttgctataagcatgttgctcttcctattgaaggaaatgattaccactcttactacggtcacactcatattgacgagtttgatgttgatgctggaagaaatgaatttcacgaaagagttaatgttatttttgcacgtaatggtatggcgtacgaacttcagaaaaccggagatattacccgtcttcttagccctgaattaattaaaatgatgtccatagtgaatgtacctgctgaagttgagttaaagctaatactagctcgcgcaaattctaagattgttaattttgatgttcaggttcgctatgacgcagtgaaagagctctgggacttttgggagcgactaaaaagtgtatacaacccgtcaaataagaaaagatcagttacacagttattagataatgctaccaacacacctgagtttcgtaatattttggaagatgaagctaagtatttgactgatattggaaaccaatattttatacgtcacgctgaaatgaatcaggtgaaaattcaagagagcgatcatattgagtacctatatcatcgcatgtttagtttaatccatcttctcatgaaaacttttaacaattaa

SEQ ID NO: 170508 - DNA, 558 bp, Enterobacter cloacae
atgctgttccttataggaaatggtaaacgtccgacagggcgccgtgaggatttttttacttttatagcatataaggatgtgaatatgttcagaacgaaattgggatttttcagtgcgcttgttttagtatttcttgcgacaccatacacccttgcgatgtcttctatctccaccgtttataatgctaagaggacctttgatttggctcaagttctggtcaaagacccctctcgtattgttgtattgaaaacagatatagacgctttgtatacaccgattggccctcttttcaccggactaaataataaagttgttgaaaatatgcagaacggcccactggaactacaaaataccatcgtaaaaccagtaccaataaatggtgtggtcgatggtggctatagtatcaccactgaaaaagctggacttaaagcatgtttagcctccaaagaacaatacggcaatgggaaattagcagtgctaaaaataattattaatggagtagagaatggccgttgtgaaatctttcataaaaataaaatatctcttatttttgattga

SEQ ID NO: 170509 - DNA, 240 bp, Enterobacter cloacae
atgtcgccgtgcagctgcttggctttgcggggtgatggaatgaagtattcctggttccaccacaccgattgcagcaccgaacaggccgacgaactggttaagcgttacaaagcgcgcggcgttcgggttgagcgcagccttaacccggattacgtgacctggacagtcaacgcgcagctgccggaaggtgagaaagcgccgcgcccgagccgtgtctggcaaagcaaggcgtggggatga

SEQ ID NO: 170510 - DNA, 138 bp, Enterobacter cloacae
atgaaattcgaatcctattttgccgatcacctccgcgttcgctggcagcggctgcgcttataccactttcccggatccattctgacggactaccggatactgaaaaattacgtgaagaccatgggcggtgcagtatga

SEQ ID NO: 170511 - DNA, 690 bp, Enterobacter cloacae
atgaacaatcaatatctcgaatacgtgcggcagcagctgatggtggcgactgccgatttcagcggggctacgaaagggcagttaatggcctggctggagaatgcgcaattcgacacgaaaacctttaagcgtaaaaagccgcgagtatgggatcctgaaaatgagaaatggcaggttctggacaacccgccaatccccggcaagcagtcacatgctaaaggctcccacattcctttggttcagccggtagagtttgcgaccgcatcgtggcggcgtgcactactgtctctcgatgagcatcagaaggcgtggctgctatggaactacagcgagaacacaggctgggagcatcaggtggcgataacccggtgggcatgggagcaattcagccaacagttggaatgtaagcgagtggcgaggaagaccatagaccggttacgccagcttatctggctggcggcgcaggatgtaaaggcgctgctgggcggtaaagatgtgtatcagtatggcgatctggctgctctggtgggtgttaataaaacaaactggtctcagaattatgttgaacattacgatgcaatgatcatcctgtataaggagctggactcaaaggcgctgcatcatgtttcgcgatcgcgttcacaacaaaaggcggcaaactatcagcaatgtattgcaaaaatgaactaa

SEQ ID NO: 170512 - DNA, 525 bp, Enterobacter cloacae
atgatggatgttcaaatagttcgaggattcaaagagatggaatctgagtttggatacatttacattggtgtttacgcgagtgacctttcaaaatgcaaaattggcaagagcactattggtcccttcacacgattcattcaaaaaacaaacgctcctgattatatgcccttcagggcttataaaattcccttaagcgaccttcacaaacttgagcagtatttgcataaaaaactagcctttcattcacaaaggattttgcacacatatacagggtcagaatccgaatggttctcatgtcatccgttagaggcggccgacattattgagtatctgatacctaattgcttggatatagagacgaacgagtatggttttgaactgcgaggcatcgtgatttatccaccttaccatgaaaatatttttagctactggcgagaggaacacgtaccgtttttaaagctgtttgtagatgattttggccgcgtgctgccacaaccaacatttcgtccttggaaagaaatataa

SEQ ID NO: 170513 - DNA, 285 bp, Enterobacter cloacae
atggcaattcttaagcgtttttcatctgacttagagaacaaacttaaccagctttattacatgaattttgtgatgttagagcgttgggaaatcctgtgctggtttggctcagaacgtatctcaaaaagtaactgggcagatattgttgaaatgtgggatagctggtttgaagaaggcgaacaagtccctctaaaactaatccgctgcgattctacatctgcgccacagcgttatgtattgattcgtggggatgcaattcaagatatcactgaatttgctgagtaa

SEQ ID NO: 170514 - DNA, 462 bp, Enterobacter cloacae
atgagtcgaataacagccatcatctgcgttgtcgttttctgtctgcttgtttgcatggcattggcgattaaacactatcgtgacaacgccatcacctacaaagagcagcgcgataaggcgactgataaactcagcttggcgaacgccaccatcaaagatatgcagacccggcagcgagatgtcgctgcactggatgctaaatacacgaaggaattagctgatgcgaaatcgcagcttgaagatctgcagcgttgtgttagctctggcaagtgtgggctgcacgtcaacgccagatgtcccgcgaacggaacggccggcaccggcggcatgggcaatgcttccggccccagacttactgactccgctgaacgggattatttcaccctcagaaagcgaatcgttactgtgacgaagcaggttggctatctgcaggattacattagtgagcaatgtctcaaatag

SEQ ID NO: 170515 - DNA, 294 bp, Enterobacter cloacae
atgatttatgatgtgaccacctactacatcaacagcaagactgatgcaaacttaatgcgttacgacgtaattagtattgactccgacacttaccacgtgaaggtgttcgacaatcagcagcacgggatttcagcaccagatttaatttctcaagttgccgagttccaaataactcgtgctgaatacaatgcaagatatcaggtgggtgatcgatcgattgtgaaaatgaacgcggatccaggttttgaaaacaccattacagatcgacttcaggaacatcgagacagactgtag

SEQ ID NO: 170516 - DNA, 348 bp, Enterobacter cloacae
atgatcgatgcactactttctaccattgtgagaatggcgtcattgagcgttcttgggctcgaagaaccggcaattaaaaaaccgggtattcaaggtacctctggtgctctagatagagacgagataaccactgagtctcttcatgcttatgcaaagattgagcaagaattatcaatcgccagaagaaccctgatttccgaaactgtagaaattgaagagtattacggaaactccctcaagggcggagtgggtgcaaaggttagtaccgctgatttcggtttagatgcaagtgccgaaaaaggaaaagtaacaaaacgcgtgattaaattcactgggttcaacgcttaa

SEQ ID NO: 170517 - DNA, 315 bp, Enterobacter cloacae
atggctcagtacggagttgaaacctgggacacctcaggcagggcgaacaactatgggattaagccagtcagtgtaagtggatatcttcagctggctcagaaccagaaaacaggcttttactcagtcgtgcttccaccggggtgtaagcttacttattttcagatcatgaacggtgatcggtggggaacgagccggaggaagatcactatttcaggtggcaccgcaacggtatcggcagtaggcgataccgactactccgcagggactgagcctgcggttgcggcgtatctcattttccagatagagagggcataa

SEQ ID NO: 170518 - DNA, 234 bp, Enterobacter cloacae
atgaaatacatgattctttgcctggcggtggctgcattgctctctggttgcgctggcgttcttcagaagcagcatcccatatgtaccggaacggccctgatcggcggacaggagaacatcgtccagatttacggagtgcggaagcaaagtaatcagacccagtaccgcgccggttacccatttaactggtcatgggttagcgcaaacacgttcagtagtaccacctgccaatag

SEQ ID NO: 170519 - DNA, 183 bp, Enterobacter cloacae
atgattgttcatgccatgagcagggcggttatggacttgtcgctctcgggtcatccattgacgcaggagtccttcattgagaagctggagcagtaccgtagagaaacaggcaatgtgaacggcaagggtattaacaggtatgctgttgagatagtcaggaaagacagtaatcctctgaaatag

SEQ ID NO: 170520 - DNA, 609 bp, Enterobacter cloacae
gtgaactatacctcattatcaagaccatcttctggtgctgtagaatttgatgcttttgcaatgcctgcttatcatgagagtatcagttctacacccattcccccaaacgctccaattggggctaaattgcgatttgctagaactcaacaggcaagtaatcatctaaccagtaagcgagcagaaactccggaggaaagtcccgtggaaatatcaagggaagaactggaagccaaattaggccgcaacaaagcagaggtagacgttattgctgctgaaatgcggaaagaaatggcggagtttcgtgcttttcaggcccagcagttctcggcattgaacacttccttatctgaaattaaatcacaaatttctagtgtaaatggtgaggttaccggcttaaaagggcaaattgatggtttgaaaactacgtctgctactcttcagtggatggttggtgccattttagcgttactggcagtgatattagcactacctcagatgcagtcttacttaaaaccagctgattccattccttcatcaacgaagcaattagaagcaccagcaccagcaccagcaccagcaccagcaccagcccagcctactaacaaatag

SEQ ID NO: 170521 - DNA, 294 bp, Enterobacter cloacae
atgcctgagattaagaaaggtaaagatttcacttctagtttcgctgatgtctttgttactactgggactactatcggtgagaatacctattgtaacataacgttctgtagacatattgttgagaatcaaagtcttcctgatgagttaaaccctcagtctgggaccaacatttacctggaagcagttcaatccattactatgcccatgtctatggctagaaacatggcaaccgccatactgaatgctcctgtcaacgagccaggcttggttgaaccaaaaaattacaaagaatga

SEQ ID NO: 170522 - DNA, 774 bp, Enterobacter cloacae
atgagatacttcgagcttgaaaccaagggtatgcacatcgtaggtgaagacgagaactacacttgggaaacatcaaatctacttcatcaattaatcgattcattttatgaagcaaatgctgctctaaatttatacacaaagcagaacgatgcgttatttgatcgattaggttctgtattaccacatccacctacgtatgaagagtgggctaaggggatcaaagaacgtgaaaggctgtcctcagaagttatagaagaacttggaatatcaccagatgactggcatgaaatttactatcaagttgagataaggtcgaagagaaaaaaatggttacagggtagtgtgccacgtcaaattgtgtcagctgaacatcaaatatttgcaaaagcattcgtatattcttttgatacgattgtggaagtcattaaaaatctaaaggaacggaaaggtgtctctgaggttgtgcctaaaaaaattgaagaaataaaagaagcatttcctgatcttaaagatgtaagagacacttctcatcatttaggtgatagggttgtggggctgaaagtagtgcgcgggaagaaagttccgattaatactcaaggacaaaatatagtccttagcaaccacgtcgatggaatgttttacacaatgaagcaagatggcattcaaggagccatttctataacttatgagtctttagaaaaaatgggtgaaattattcaagatattttggactcttttcagtgggaaggacataaagagcacttaccacgttaa

SEQ ID NO: 170523 - DNA, 654 bp, Enterobacter cloacae
atgtatataaatggaaagaaagtaggaaaggttaactctccttgtaataagataaagtttgacatgcagacctggtcattactaatcacctgcattctattcgtggtaaacattgcatttggtcgctatcagtcatatgtagatcaagaacaacaacgtaacaatgttagagtattgattgcatatgacataatgaaaaatgaaagtgttttaaagtatttatatggaattagaagtgatacgaaagaacgggatgaagataacgaaagcacagagttgtctccaattcattttgacatgcgagccaacgcaagaataaattatttatcacaattacaagatgatttttactcaaagaactatagcaatgttaaaatattaccgccggatgaagtggccttgattttacagtactcaaaaaccctttatgaaattaaaaaaataaccagtattgtcagtgctgaagtaaccaaaaatgacacgtctgatactgaaatgaaagcaatggagatggagattagttttcatttcattcgcttatttgaaatatccggtgagttgagtaaaaaatactcacaaataacttcggtgatgaaaagatacaacgatgagtgcgagtacccggggtgtttcgacctgcctgatgcagaatga

SEQ ID NO: 170524 - DNA, 2277 bp, Enterobacter cloacae
atgttaagcattcaagaaatcattaatgacaaagacccaaataaatccattggtcagatattagatgatttgcatagcaaaggacctgttgataacaagttgatcgagaaattaacatattataaagaatttcatgctggaaaatttgcagaacatgaggaaaatataatatctaccttgggattattctataaaaacaaatctccctcaaatctctattcattcattttagggacaataggaaaccagtacaaaaagacgtacggtgaatatcttactcctgtacaagcaagtattcgtgatgctgttgaagaaaaacagttcatttctatatcagcgcctacaagtgcgggaaaatccttttcaataaaggaatacatcagcacacaagatggtgatgctgttattatcgtgccatcgagggcattaatagcagagtacgttgaaaacttaaaaggatactttgaaaatgacaaagatgtgatgattagtacctttgtagattatgtttatactaataggaatttaagaagaatatttgttctcacgcctgagcggacaaaagatctaacaacttttagtataaaactaaatgttaatttattcttttttgatgaagctcaagtttctgaagaacaagagcgaggtgttatattcgatgtcaccgttaggcgcgtacagaaactttttccaacagcaaaactaatctttgcgcatcctttcgttgataatcccgaagctcaattccaaaaacacaatatcaatacccccgaaaaatattctcggagttatgctcataacgctgtaggaaaaattttcatttatgcgcataagaatggtaatgactattatttttcaccatacatgaataaagggcatttgttaaagaaatcagcgccttttcagggtagctttgaacaatttgcattttcaggtgataaatcagtccttatttatgtatcaaaagcatctgtctatgatggtagattcatcaacaaattcaagaaacataccgctaaattcaaaaaaatagaagatagagaagcgctggaaataattaacagcgtcggagatatattaggcgctaataaccaaggccatagatctgtattggtagagctattgagtatcggtgtggtaattcaccatggttctgtacctttagaggtaagatacttagttgagaaatttattaaagccgggtttgctagaatttgctttgctaccagtacgttagctcaaggcatcaatatgccatttgatatagtctggctcgcaaatatgaaaatgtatggcgagtctgaacagaaaagatgtctggcatttaaaaatttaataggtcgcagtgggcgcttatcaaagaacaaagaatttgattatggatatgtatatactcataatgcagaattgttatcacgccgagtcaaaacaccattcaaattggaagagaagtcagtattagagagtccagttgactcaaacaatgataaccacgaactcataaaatctatcgttgatggaacattcaatgaggatataaaccttccggaatccaagattgaaagattacaaaatgataacatctataaaaacattacatttattttagataccgttttcaacgaacaatttggtagtaaactaattggccctgagaatagagagggaagggacaaagtcaagtcttgtttcttatcattgtatgaagcatctttaggccgagaactatatgacggcgaaaaaaatgtattcaagtcagcaattgacattatgtttcttgtaatggctggtcgaagttttaaagaaattgttgggataagatacagctatatttcagatagagatggtaataataatggtgtttcaaaattttcccaaccagcgaataaattacccgatagtaatctgattaggccctattctctatttcattctgtaaaatcaagggatgttagctacgacaccgttgtgtttgacacttacgactaccttgatactgtaatctcattctctcttagtgacgttttcgtgggggcattcaaattatatttaaatgatacctacgatcaaagagctgctgttttcattgatttcctaaaatacggtacaatcaataaaactcacataatgttgatgcgatatggaattcagcctgaagatgttcctttagttgctccatacttaaaattcatctcggaagaaaagatcgaaattgatccagcattagaacttagagataacgagctttggaaaaaaattagctggtatcttccataa

SEQ ID NO: 170525 - DNA, 732 bp, Enterobacter cloacae
atgcctgaagatccaaaagccatagtcatagacgatactgagtggggatgtattcactcgcagtatcactgccaagataaagatcctgcgataataacatgtatcgtaaacgtaaataatactgacttaatagctacagagcttgtgaactcggtgttaaatacatcttggatttcttctctcgatgctggcacacagagatcatataaagttaccgcgaaagaaacagccgatgcattggttgaaatattcaataaagttcttgatggtgatcccttaggagctgagtttggtgaagttatggtttccattggttcttcgcgagcattaagtcagatattacaccacatttccctacctattgccgagttatggaaaccccaattaaaacaaaacgagggttttgattttcatacaacatgtactggaaatcttataaacttcggagaagccaaattctccgcctccattaacccacatggaaacgcgatccgccaagcgcatgactttatcacacaagataaacatttccgagatcgcgttcatttagtaaacctttgtaataaggacgctatcaaaaatctcgatgaagaaaaatatggcatcatcgcagctttctctatcaactcagataaccctgaaataataatggagaacgcgattaaaaccgttctggaaatagaattattaaatcgcgttaagtttatatatttggtaggtgtaaaatgttaa

SEQ ID NO: 170526 - DNA, 234 bp, Enterobacter cloacae
atgcctgcgtcaggtgcaaccggtagcgcgtttggctggctgaccggtgtggtgaaggatgatgcgatagacgtgtttatccggcgcatcgcacttgtggactggcacaggctggaagaatacataccggaacttcacatcaattggagtgattcgttaacctacggcacggcatccgggtcctgcctgcatgacgaacgtctcctccacaaggctgagattgcccgtctttaa

SEQ ID NO: 170527 - DNA, 240 bp, Enterobacter cloacae
atgacgcaagtacaacctcaaagaaccacatccgatttggtgaaagccgccgtttccggctggctgggcactgccctggaatttatggatttcaagttttataggattcaacgcattgaaaaagaagggaattacacggctcttaaagttgcatggggcactgatggggcaaactcactcaattttgagttcagaagcgctacctgcgcatcgttattttctgacatccatttcccgtaa

SEQ ID NO: 170528 - DNA, 357 bp, Enterobacter cloacae
atgagattcaccaaagaggcacttaaacgactcaacgaatcgccaattagcatcaggctgatgaatggatgctttaaccgtgctgaagctgttgctgagttctcgcgccaccgttatgagcttatcgttgatgttacgcatcccatgcttcactggcagtgcggcgatcgtagcggggtgaaactttacctcatgaaaggtaactgcgggcaccgaattgatatgccggattcgcttgagaaaaaggtggctgaaatgcaaaaggcggcaaccatgagcgattctgaggcaagagaaatcagcacgagaaatgccgagcatttcttgaatagcctctcagaaatgggattcaactag

SEQ ID NO: 170529 - DNA, 564 bp, Enterobacter cloacae
gtgaaactgattgatattctggtgcaggaattgccgaagcttggaggttggcccattggagcagatagcatatatcaaaacgcgaagggtcatcttgttggggttcaggggtgcattgttagtcctgtggatatggaattgggtgtcgttgctgaggatacgcacagatctgtcacccgcgagcaatacgaagccgcacttgcagccagcaagccagaatgggatggcgagggattgcctccggttggctgtgagtgtgagtacgaaacgaatggatatggaattaagaaggttcgagtagagtgcataactatggatggaatcgcatttacatggcttggagaagacccgggatttcgtgggattgactgcataaatacctcccaagcacatcgattccgccctttccgctcagaagcagataagaagaaatacgataccatcgaaaaaatgctttcggtattttttggaaccccgcctgcagaagatccaaacgaaaatgatcgggttgcaatggctgagctatacgacgctatcaagtcaggaaaaatcgtaatcgactag

SEQ ID NO: 170530 - DNA, 195 bp, Enterobacter cloacae
atgagcaataaaacaaaaattactggtgagcgttacgcatcagatcacggtcagtatctgaaaagcggaggtgagtggtacgcgctcatgactgatctgaaatggcataagaaagtcatgtacccacgcgttctggccaccctaaaactagtcgaaagcaatgcgtcaatcaacgtgtgggaggccgcccaatga

SEQ ID NO: 170531 - DNA, 396 bp, Enterobacter cloacae
atgagcgtgacacgttacgaatttgagctgtatcactgcaatggcggagagatgcttgacagtgatactggtgattatgtttcctacgacgactacgccgcacttgaagccagatgcgcggcgctggctgcggaagtgtacgacctgaagcatccaggcacttatctgccatcaaaatgtgaaacgcctgctttagacgctttcctggctgaagtgcgggccagcgcaatcacagatgctcttaaatcgctcgatgtggtgtttgacactgactgtgttatggagtcgaacggcatcagctatgaagacgcagagcagcgcacagcaggagcttacgcagtttcaaaggctctcgaagagttcgccgcccagcttcgcaaaggagtgcagtcatga

SEQ ID NO: 170532 - DNA, 726 bp, Enterobacter cloacae
atggatttggaaaaattagacgcaccatttgcaagcaatgatatcgagtggcgtattcagcaggccggaaaaaacaatagcggtatctgggctaaggttctggcttatgtcaccaaccgggcaatcatgaagcgccttgatgaggtttgcggaaagtctggatggcgtaacgagtatcgcgacatccctaatggcggcggtgtcgagtgcggaatttccatcaaggttgatggtgaatggatcaccaaatgggatgcagctgaaaacacgcaggttgaggcggtaaaaggcggtcgctctggagcaatgaagcgcgcagctgttcaatggggaattggaagatacctgtatgacctcactgaaggatttgcaacagtatcagcggaacggcaaagaggtttcaattacgccaaaacaaaagagcttggcgtcttttactggtctcctcctcaacttcctgcgtgggctctgccggcaggaaataaagaacagcatttacccgctgatataagcagcgaaaacgttgagggaaccagcgctgccgccattgatgtcgacaaggtgttggctgacttttgcgcatatgcactgacggaaacggtgaagaaaaatctgattgagcgctatcaatcagactggcagctaatgaatggacatcctgagcatcaggagaagtgcgtgcaggcaatgaacactcgtatcagtgaacttaaaaaggcggcataa

SEQ ID NO: 170533 - DNA, 135 bp, Enterobacter cloacae
atgatgcatttatcgctatcgggtggcggcatcatgtccgcctattacccatccgaatccgaattatcgaaacgtgttcgccgtcttattcgtgctgcccgtaagcacctggagggtttatgtcaccagttataa

SEQ ID NO: 170534 - DNA, 180 bp, Enterobacter cloacae
atgggtaaatctaacgaagtattaattcatatcaagacgaataaagttggctcagagatggttaagtcaaccgggttcagcaaggaagagtggagcgagttagatgaagatgagaagcaggaaattattaatgaacgagtatgggaaagcattgattgctgggtaacaggcgacgaataa

SEQ ID NO: 170535 - DNA, 342 bp, Enterobacter cloacae
atgaaagagtttatgggtacgcctggaaaatggagcttttcccacggaagcgcaagtgacgataacgtggcttgcatagaaattaattcatcggagtctctgcatgaagttgcgtatctccaaagcacaccatcaagcattggaaaatacgagcagacctctttcgataaaactatagccaatgcacacttgatagcagcagctcctgatttgctgaaagagctgcaaaaacttcgggagtacgtcattaacgtctgcggtgtggatgatgaagattgtgatagtgagcatccattaatgtcgtcaaaggcagccatcagcaaggctctgggggaggagtaa

SEQ ID NO: 170536 - DNA, 297 bp, Enterobacter cloacae
atgggaaagcgtggagagttaacggaagaaataaagcagcgcggggttgagttgatgggaaaggagattactcagcgtgagctaaggctaatcccatatgttcaatattgcttgctcaacgtcggcaaactcgacccaacaaaaataaacaaagaagagagagatatcctttctgattggcgaaagagaggatttatttcaggcggcgcatcagggatttcatgtagcgaaagattctgggaagtgatgcacgaattgctatggatggcatacgtagattatgacgaggccgcatag

SEQ ID NO: 170537 - DNA, 210 bp, Enterobacter cloacae
atggattacgaagaaatggcgcagatgcgctatcaggaaatgtgcagaattgtgggtgatgtcgtttttgctatggtggctgaaggtcatgagactaagcgagtggctatagctgacgtgatacgaatggagctatcaaagggtctggataagtgggatgaagaccaactacagtgcatggaacttgccgttaagctgctggaggagtag

SEQ ID NO: 170538 - DNA, 402 bp, Enterobacter cloacae
atgccaaaggaaatcattgaaggtcataagtatatccaacattctctgcctcttatcgctttgggatggacggttatttccttcctgcttggtcattttatggggcacagaagcgccataaaacgtgataagagaaaggagttcaatgaaatcgccgagccactgctggagttttatgaagagcttttgatccagctacagcatgaaggctatttcagcactactaaatttccgattgagttacttggtaagatagaacgaagactttcaccgagaaatcaaaaggaattcaatcgcttagtgaaagacataattgccatgcaacacacaaaaaatggcactgatagagaagtgctaatcaaaaaaattaagcgcatgtgcaaaatcattcacctccgttaa

SEQ ID NO: 170539 - DNA, 300 bp, Enterobacter cloacae
atggaagaatcaatgtatcgcaagaaagcaatgcaaatcgaatcaacattgcttaacaagattgccgcgtttggtcagtcgaaactttcaaagcttatcggcgtagacgaagcgcagatttgccgcatgaaggtggcaaagggaagggagaagaacagcttcttcaagaccatgagcatgatgctggcggttctggaatacggaatcgaagacgaggaaatggctgagcttacaaagcggctggctagttatctcacaaaagaaaaacgtccagctgttggtagcagtctggacgcttaa

SEQ ID NO: 170540 - DNA, 147 bp, Enterobacter cloacae
atgacaaaaccactcagtccttaccaggacaaaatgcacaaaaacatactacgtgatcgcttcctgtccagcttcaagcagcctggtcgatttcgggctgagttggagaaagtgaagctgatgcagaaggagaaaggtcatgagtaa

SEQ ID NO: 170541 - DNA, 807 bp, Enterobacter cloacae
atgagtaatctcgcaaccgtaacacctataaagcctcaccttgaggttgtggagcatcgcgtggcagataccgaagatggcttcatgcgtgttgctaacgagcttacagacagcttactgatggctgatttaaccgcccggcagttgaaggtaatgctcgctatcatgcgcaagacatacggattcaataagccaatggacaggctcacaaacacgcagatagcagcgatgaccggcattcaccacacgcatatctgcgtagcaaaacgccaactgattgagcgcaagtttctcatttcggacggcgtaagaattggtgtgaacaaggtggtttcagagtggattagccaagacagcttaacattagctaagacggctaataaaacattagccaagtcagctaatgggtataagccaactcagctaaacacaaaagacaatattcaaaagacaataaatacaaatacccccttaccccctaaagggggatgtgctgagggttctaaacctgaaaagcgaaaggccgttcgcatcaactacaacgagtatcttgaagcctacaacgaaatcgtgggtgacagattacctcacgctgtagaggccaacgcagagcgtcagcgcaaactcaagaagctgattaactctctcgctaccaaaaacatcgaaggctaccgggcatacgtgaaagcgttcatgaacgctgcaaggccattccatttcggtgataacgatcgcggttgggtggcgacgtttgattacctgcttcagccgaaagtattaacagcaattcgtgagggaacactatga

SEQ ID NO: 170542 - DNA, 204 bp, Enterobacter cloacae
gtgagtaattggattgaagtagacggagcggaaaaccttccggtagggaaatggcttgttactaccgctgaacgcaataacagagaggtagatattcacattgccaaagtgaggtcgaacgtaatcaccattggcaatatgttttatttcgacatgccaaaggtaattgcctacatgccagcaccagagccattcaaggcctaa

SEQ ID NO: 170543 - DNA, 222 bp, Enterobacter cloacae
atgagcaggaaaaagtattggtttctgaatgctctctggcaactggccatgtacggaatgcttctggcgttttatcagtacgaatcctatgcgttcgactatagctggcactacaaggctgagcgagcttggatggttggagcaatttcagcgctagctcattcggttatgtattacgtttttctggaaggaattaattgcttcccaagaaaacaaaggtga

SEQ ID NO: 170544 - DNA, 153 bp, Enterobacter cloacae
atgagcggaataataaccggcatagcagctggcatgtgcgctggctcagcagtcgccgcaatcctatgggatgaaccgtggaatatgaggacgtttatcaaatatcaggtagcggcgcttgggattgttgctgccatatacattctgaggtga

SEQ ID NO: 170545 - DNA, 240 bp, Enterobacter cloacae
atgagtacagtagccgatgactatcaggaaaggctagaagacctttttgatgacatggaaagcgacggagtggactcagctcagatgttgatgagcgcagtagccagttacgttgaaggcgctctggaggcttccggaggaaatacctacatacaccagttcgaagacatgaacttaatcatcattatccagccgcctgatgacgtgccggaactaacaacatcagaaaggatacattga

SEQ ID NO: 170546 - DNA, 663 bp, Enterobacter cloacae
atggttatttggtctttatttgacggctctggaattatggggcagccatgggcagaggctgggcatgatgtttactgcttcaatgctggcgagggaaaccacggggaatatcacatcaagatgcagcatgaaaatctgcattatgtgaattgctggatcagtgagaatttcccgtgcaagccagagcttacaggaatccctaagccgaagatgattttcgccttccctgattgcacagatttagctgtgtcaggggcaaagcacgatgggcatacatcactggattcagtgaggcatgcgcagatggtagagaaaatggcagaggagttcggcgcggcatggatggtggagaatccagtcgggaaaatgtctacctactggcgaaagccagaccactacttccacccatttgaatacggaggttatacaacaggaaaagaagagaggttccatccacgcatgccaccgcgagacgcttacactaagaaaacctgcatttggtctggaaatggatttgtgatgccagcacccaaaccagtagagcatattggcaaattctgggggtgggcatatttgggtggcaaatcagccaagactaagcagttacgctcattaactcctcgcggcttcgcacgagcagtatacgaggccaaccatgcttag

SEQ ID NO: 170547 - DNA, 363 bp, Enterobacter cloacae
atgaatgaataccgaatagagctgccttggccgcccgggaacaatcatctcttctctgtgttccgagggcgaaagataaaaagcaaaaagggaagggagtacacggaagtagtaacgcagcaaatcatcaaagcaaatcagcaataccaactggccggcaggctgaaagtcaaaatcctcgcgtatccacccacacgcacccggcgtgacctggacaacctctttaaagcacccctcgattctctcaccaaagcgggcgttatcgctgatgacagcctcattgatgacgttcgcatggtgcgctgcgaagtggtgaagggtggaaaattggaaatcatcatcaccgaactggaggaagcatga

SEQ ID NO: 170548 - DNA, 225 bp, Enterobacter cloacae
atgattcattatccgtgtgaaaccgcagccgtgtttaacggtgtcgtgtttgtaattaacccgcagagcaaatctcatctgggagaagaagcagatcgtgcatatgagttttatcgtggattcttcccagacgttccagccctcgaagtgctaaacaggcttagatttagctttggcgggttgtatttgaaaatcattgatgtgcagcgtgaggtgctgtcatga

SEQ ID NO: 170549 - DNA, 555 bp, Enterobacter cloacae
atgacggacaaatcaaacacccctgcagaaattaaagacctgtggcgaacgccgccagagatataccgggcgcttaggtgtgagtttccattcttcctggatgctgcagctaatcaggaaaacgcgctgtgcaaaacattcattagcgccgaagaaaacacgcttgaggctaactggagaagcaaaatgccagttggtgtcaatagagcgtatgcgtggcttaacccaccttacagcactccaatgcctttcgtgaaaaaagccgctcaggagaacacagacaatcatgtcggatgcgtgatgctgctaccggcagacacgtcagatttgtggttcagagaggccattaagacagcgcatgaggttcgctttatcacgggcggccgtctctcattcctgaatgcagaaaccggtaaaccagtaaacggcaacaacaaaggctcaatgctcatcatctggcatccatacccacgctcaggcgaatgcaggatgacagcggttgatcgcgatgtgctgatggagtacgggcgcagattcatgaggaaggcagcatga

SEQ ID NO: 170550 - DNA, 873 bp, Enterobacter cloacae
atgaaccgtactgattcaccagcgaagcaaccaaaacccttcggcattaatggaccaagggaaccaatcctttcaacaaccccagccggtgacaatacagcatcatatgaatccggatttccaccaattacaatgactttaaagtctgcgggtggcttgcctccaaaggggcaagatatgaatcagatattatatgagctctccgcactggcaagatggggaagtgcaggagccctaaacacctatgactcttcctttgcaacttccattggcggatacccgaaaggaagcattctgataagcgatgacagttctaagatttacttcagcactattgatgcaaatacaaacaacccaaactcagtttcaaccggttggcttaacctgttatcttttttaggtggagcaccaattgccagcccaaccttcacaggaattccggcagcgccaactgcatcagcgggaactaacaccacgcagattgctacaacggccttcatacaagcagcgattacagccttgtctcttggaacggcatctcagagaaacgttggtacaggcaccaaccaaatcccagacatgaactcatttacttcaggtcctggttggatgaaatttccatctggtataattattcaatatggctatcagccatccagtagtagcggttcagttattattaactttcccatccctttcccgacacaatgtttcggagtaacaggagctggtacagatgccggtgcagcaaatattgcaggttgtcaggtaatcgataaggcggggttttttctttcagcgtggctcgtggctgccggttctgtatttaacagaacagcgacaaatatttcgtggatagcggtggggatttaa

SEQ ID NO: 170551 - DNA, 357 bp, Enterobacter cloacae
atgacgatggaagaacaacagcggtggttcagtgactaccgggaagaatttaactacgaaagaccgcatgaagccctggcgggtgcaacgcccggaacggtgtggcacccctcgaagcgacagtgggatggccgtgttcctgactatgcctatccgtcaggaggaacggtctacagggtgaaatcgagggggacactctatatggggaaaaaggggacggtgttcctgagtgaagcgctgactgatgagtacatcatgctggaagaacaagatgatggcctggaggccatcatcttcaacggaataacgcttgcgtactacgaccgaaaaacccagagtgtggtgcggatagactaa

SEQ ID NO: 170552 - DNA, 1305 bp, Enterobacter cloacae
atgaaaaattttagattctatgttgaccgaacgcccataacttatattccatctgcgattgttgattattttaaagataatggcttactaatgccagggcaagagaaaatacatttcgttggaattgtctatttaaatgataatatcaatatattttttcctcgtaacagccacatccaaaatttaaactctaaagaagctattaatcagggttctatttcaaggtctttacttctttctttaaataaatatttcaattcatcaaccagaatgataactgatgctctagatgaagaaggaactataggtgaatcatctctcgctttaatcttagcattacttgatgatttcattctcaatggtttatttaagaaatatagaacagaaaataccagaaatagatccaaaataaattggaaaaaaacaataaatagctgctctgcttatctagataaagatgttccatattatttagaatggataggggcacagaaaatagttgatactaataatagcataacaaaaattcatgctgaaataataaaagaattatttgaatcatttggttggttaatatcatttgacagacataatattgagcaaacattactcaatacaccactatcacaacataacatagaggaaaaaatattaattattgatgaggcgttacgaaagacttattttgatagagatatttatttattaaacttgctaaagcaatatttaatggatcaagcaaacaatagaaaaggcaacatggctattggggttaaagaatttcataatatttgggaagaaatgctaagtgcatgcttagattttaaaaaaagcattaatcataaacttttagcccccgtttataatatatctggaaattacataatggcctcatctaaaggacaacgcacagatattgttttggaaaaaaatggagatttcattattattgatgcaaaatactatgcagcaacaaatatcaataactctccgagcttacaggatattataaaacaattttattatgcaaaagctttatcgataattgagaaagaagcgaaatccataaaaaacatatttatttttcctggccaaagtggccctattaagagaattcatatgtcttctaaacaaaaaaacctcaatataagcattaaggaatttttagatgaggagtttccacccatactatgcttatatcaagatcctctggaacttatagaatattattcttcaggaaggaaaatacacagttatcaagagtatttttttggtaatgaacaaaatcatgaaaagactttctag

SEQ ID NO: 170553 - DNA, 1395 bp, Enterobacter cloacae
atgccaaatacaactatcaaacaattagtcattgattgttcaaatctatcaagtgaaatgagtatatcttacggacaagttgcccctagttttattttttcaaataccggtagacgaaatggagcaaaatatttcgccatcactttacctcagattatatctgttttagaaaatatcaaagataacttatctgagttttcaaagtatccaaattacaatgaaagtcactggagagatcttttcccagaatatattacagataaggttatcaatgcattatctacagtacagaccttaccgttgtttgcactcctaaataaaataatcaccgtggttaataatgatatttatcacgaaaagactatcgatttaacaccgcaaaaactacagacgactattgattaccttaaaaatcaaatgccttctgatgaagaaattacagttacttcaaataatagctcgttattatctattaataaaatatactatggagctcccggtacaggaaaaagccataaaattaatgaaataaccaaagacaaaatatgcataaggacagtttttcatcctgatatgcaatatacagattttgttggttctttgaaacctaaaacctacattgatgatgataaaattaaacgaattacttatgaattccgcgctggcccatttactaaagcattaattcaagcactgaacaatcaattggaaaatgtattcttaattattgaggaaataaatagagctcaagcacctgctgtatttggtgaaattttccaattacttgatagagatgaatcaggaagaagtaaatacaacgttgacatatcagatcctgatatgcttgattacattaatggacgaataaataataaaatagatagtatttatatcccgtctaatttaagcatattagctactatgaatagcagtgatcaggcagtaatgcctatggatactgcctttaagcgtcgctggcagtttgaatacctcttaatagatttaaatgctgctgcagatggtataattcctttagaagtgaatagcggtaatgatttagtctctatcgttagcatatcatggaaggatatggcttcaattattaacaatacactaaaatctttgaatattcctgaggaccgtcttcttggacaatatttcctcaatagtgttgagataaattctatcgactcggcaagagaatcttttgctagtaaagttttagtttatatttgggatgatgtattgcgtcatggaaaaaggaattttattttcaataccgcaagtttcaatacttttggtgaaatatataatgcatttaaaaatggcattccaatctttaatgcaagtatagaagaacaaatattgatcaactcgagtaatagcggattttaa

SEQ ID NO: 170554 - DNA, 1146 bp, Enterobacter cloacae
atgaattctaagcttacaaatgctccctttaaacaaaaaccacttaatgaatgcgacttttcttttatcgacttgtttgcaggaattggtggtatacgtttaccttttcagctgaacggtggacattgtgtttttacctctgaatgggataagtttgcgcaaaaaacatatgctgcgaattttggtgaaatgcccagtggagatatcactaaaatttcagctcaggaaatccccgatcatgatattttattaggtggatttccttgccaagctttttctcaggcggggctaaaacaggggtttaacgatacgcgcggcaccatgttttttgaaattcagagaattcttgctgaaaaaagacctaaggcatttcttttagaaaatgttaaacagttacaggggcatgataaaggaaacacgctacgtactatcttgtcaattttacgaggtgaatatacccaagagatacccgatcatattcctatgagtcccgattctcggcgtgctttgtctcacaggctcaattattgggtagattatagaatccttcgcgccgcagattttggtattcctcaaaatagagaaagagtttttattgtcggttttgaccgtgattatttcaaaggcattgattttaatagtcattttaaatggcctgatgctccaaaaaccaaaacatctttaggtaatattctccattctgatgatgagttaaatattttagcccaaaagaatggaaaagatgcctatactatttctgataggttgtgggaaggccatcaaaaaagaaaagaggagcataaaaataaagggaatggttttgggtattccctatttaataaaaaaagcgaatatgctaacacaattagtgcccgttattataaagatggttctgaaatattaatagaccaagcgcatattggtaaaaatcctagaaaattgactccaagagaatgtgctagacttcagggatttcctgaaagttatattgttgatgaagtgtcgcacgggcaaatttataaacaattcggcaattctgtttgcgtaaaagtggttgatgctgtggcagaagagctcatttcaacattaaaaaatgcagaaaaaatacgcatagataaaaatgtaatggtttcgaactttgattaa

SEQ ID NO: 170555 - DNA, 879 bp, Enterobacter cloacae
atgccattaatgacacaggaacagctagatctactcggcgctgaagccggagcatactcatttgttacagctagagaagcgactggtgataaaagcattacactagacagcaatgaaaaaaaaatacttgctacccattataatttactcaacttttcacgtcgtggaacttttcaagccagccatagtgaagatagacgattattttatattttaaataaaaaaattaattcttttacagaaggctatttattggctgtttatccaaaatcgcacggtttggaactaagactatatatgaacaaggctttggacttttacggaaacactggagatatctttataatatatactcgtgaaaactttaattatcctgttgtaggttttatccctcaaaatacatggcgtgacttccaaaatgagatcgaaaataatttcatcataagaaaaactgatattaatgacgaaaaatatcaaacagcaatactcttttcagacgcatctccaagagctgaaaggagaatactcactccaggaagagatgtcagtaaagcaaaacaagccttaattcgtgaaaattatcattgcgaacttgacttaagccataaaacttttatttcacctataagcgggaatccatttatggaagctcaccatctcattccattacattcgcaagattattttaaaaaaagtttagacaatccattgaatatagtgtctctttgccctaactgccataaaatgattcacttcggtccaagagaaaataagatagaagcattaaatattttgtacttaaggcatcaaaatgcaatgaacaaatatggagtggattttaatttactttgctcattatatggccttaaacagaggtaa

SEQ ID NO: 170556 - DNA, 1206 bp, Enterobacter cloacae
atgaatccgtattgcaatccgttgtatgcgagtaagacggtttcagcattgctggaagcgtttctggtctacaaaaatacgggtgatatcaagttggccagtgaggggaaagttcgctccagaattgaacacttcacgcagatcatgggcgatatgtccttgagtgggctggatcgtgatgtcgtgaaggactacgccaacagaatgcagaatatgcccggcaatctgtatttaatgcggcgaaaatacaagatttcagatacacataagctgattgaaatggctttggctgatggtcagtcggtcatgagccgagatgcgattggcaggcatattgaatcactgggatcaatgctcaaatgggctaagagcgaacgttatctttttgataaccctgctgagaatgtgctggctcagcgccgcatgatggtgcgtgagcaggatcgccgcgacctcttcaccgatgatgaattagtgcaaattttctcggctgactggtttaagaaaggctcgggaacgcccaatcaatatggacgttatacgacttttcgcccgtttcactactggttgcccctgctggcattatatgtaggcgggcgcattaatgaactttgccagctttatctgacggatattcgtgaagataaaaatggggttgcctacattgattttaaccttgatgcgccggataaggtgatggacgaagagccgctggctggcagcgataaatcattaaagacggtgaatgcaatccgtcaggttccaattcatctgcgacttatcgaactagggctgctggagtatgtggatgcgctgaaagcagccggatatgatcgtcttttccctgagttaaagcacaacaaaatcaaaggatatcgcgccgccgcctcaaaatggtttaacgaaaactactttggcaaagttcttggctttccccgcgatggtaaaaaaacgttccattcgctgcggcatacttttatcaatgccgtagacgagtttgagatcaacgagcgcacgattgcgcagcttgtaggacatgttcgcggcagcaccactgcgatgacaacctatcgtaaggatgctgatgtgggcgagcaatttggcgtgatttcgcagcttcactacagtttgcctgatattgcgcagtttgattcgcaagcgggtatcaaggcggtcatcgacgcgcggcgcagacataaatcgtaa

SEQ ID NO: 170557 - DNA, 234 bp, Enterobacter cloacae; identical to SEQ ID NO: 93910

SEQ ID NO: 170558 - DNA, 471 bp, Enterobacter cloacae; identical to SEQ ID NO: 93913

SEQ ID NO: 170559 - DNA, 351 bp, Enterobacter cloacae; identical to SEQ ID NO: 93916

SEQ ID NO: 170560 - DNA, 357 bp, Enterobacter cloacae
atgacgatggaagaacaacagcggtggttcagtgactaccgggaagaatttaactacgaaagaccgcatgaagccccggcgggtgcaacgcccggaacggtgtggcacccctcgaagcgccagtgggatggccgtgttcctgactatgcctatccgtcaggaggaacggtctacagggtgaaatcgagggggacactctatatggggaaaaaggggacggtgttcctgagtgaagcgctgactgatgagtacatcatgctggaagaacaagatgatggcctggaggccatcatcttcaacggaataacgcttgcgtactacgaccgaaaaacccagagtgtggtgcggatagactaa

SEQ ID NO: 170561 - DNA, 1191 bp, Enterobacter cloacae
atgtaccgtacgatcgatgttcatgttgataaatccagttggccagggatcggcaagattcccagttttccggctgctttcaccgcaggcagcagttccttcaatttgaacatcaactcgatgttattaatcatcggttacctgacaacaccgacgtctgtcacaggtgtttcgcttgcagaattctgggcgtgggtgagatatttggcagcgatcacgccccgagaccaggatctccgcttgacaagaagctatgcagatcttgatgcgcatcagaaaactattctaagtgatgacttcggaatgggagtgccaatggtctggctcatgaagaatttaccattggttgatattgtcgatggccgctattttttgcagcgctacggcgcaagccatggcgcataccagcatcgcaccgcaaagcgagggccaaataagacgcctgacttcgtggttcatgggcacgatggaaaatggcacattatagaatgtaagggaactcaatctggtgaggctttcagggatagccaaatcgattcgggcatatcccagaaactttcaataaagttcccaccagggcatacagggcagaggttggtatcaggtcttagtattggcattgaggacggtaatccaagtcacctgaagatcattgatccagaacctgaagatcctgtaattattaccgaaagtgaaatggagtttgtaaaggacgccgcaacccgtggcgtaatggccaaactgcttcggtcgacaggctttgaaacagcggcagaggcggtagccgcgcctttcgggaaaccgcaagccatgcctccatcgacaaaaaaaacagataaaaagcgtatagagtttcttgcagatcgcgaccgacgcgcacgcgaagagttgctggaaagcacctcaagagctcatcttttcggcggtcgctatcgaggtcgagaagttactttccagttgccgagaccgatctatatttatgacgatatgatttcaaaagttaccgtaaggcaaggaatgaatgtggatgccatcgatttgctcagagagcagccaaccattgagacgctaatcgacccatctcgtaaccattggatcgatatgatgggggctaacattattcaggatgacgagcaaaccgcgacgttgcaattcggaagtattttcaggtccgagttgattcttaattaa

SEQ ID NO: 170562 - DNA, 1638 bp, Enterobacter cloacae
atgcaaagcacagccttagataaaagtcaagaatttcaacttgttgggaatgatgatgttgccgagcagtcaacaattaatgcaacccaagaaataaaagacagtgttactccagagattataatcgcactttgtgggccaattggttcaccgctacatgagactgctgagcagatatcattctcgctgaaaaaatatggctataaaacatatgacatacgtttgagtgatctaatccggattaattcaaaatatacaaatattaatattgatgaaagcactaagctaaagaaattcaagtcgctgataactgtgggtgataaacttcgtgaaatttacggtagtgatattcttgcaaaattagctattgctaaaattagcgccgagcgtaaaaaaaactttggtgagtttgatgatattgtcaatgaatccagcaaaggggaagcgagtaagattaaaaatcaaaaaatttgtcatattattgactcagttaaaaactcctctgagcttgagttgttgaaatcaatctatggaaaaatgattttctctataggtgtgttctcccctttagaggcaaggcgtgaaaatctttcaaaaattaatagcctaagcgttgaagatatcgctgaactaatcaataccgattctggtgaagagttcgaccatgggcaatcagttagagacactttcccgaaatgtgattactttttgcgggttgatagtgggttggcagagccaggaaatgccgaggctaaaggccaaattctatctaaactggaacgtttctttaagctaatttttaggagttcagttatatcaccgactgaagaggaaaatgcaatgtatgcagccacctcagcggctcgtaattctgcatgtctatcaagacaagttggtgctgcagtaacatcttcatctggagaacttctttctaccggttggaatgatgtgcctcgtaatggtggtggcctctatggtaaacaatctatccgcttaaaagttattgatcctgatcatcgttgttatgctttacaaaatagaaattgctcgaatgatgcagaaaagagaatattggctgaagttgtcattgatagccttgtacaggaaaaaatcatccctgtaaaaaaaagagaagctgcgattcaaaccattataaaaaactcacgattaaaagatttaatagagttttcaagagcggttcatgcagaaatgcacgcgattcttggcgcatctcgtgtggcaggagaaagaattttaggcgggaaaatatttgtaacaacttatccatgccattcctgcgcaaggcatattatcgcttctggtatctctgaagtatatttcattgaaccgtatagaaaaagcttagctcttaagcttcattcggatgcgatgaccgaatcagtaatcgagacggatgaaaaagtgaagttgatacaatttgatggagtagctccaactaggtttcttgagctttttgaatctggatctcgaaaatctaaagctggggtgctagagttagcgacagagggtgcggctatgcctgtggatagcgttagtctcaaagcgattcctaaattagaacaggtagttattgctgaagttgatagtaataaacttaacttgttgaggcttgagtga

SEQ ID NO: 170563 - DNA, 729 bp, Enterobacter cloacae
atgagcgaatcacgtaagcaatttatattatctaaaggtgcgacttgcaataactggaattggagttggtcatttaccaatcacgatgaaaaaatggttatctttggggcgtgggatttcaatactgacaatgaaaaatcactgataatgcataaggattggcaaaagaaaaataatcgtcaacaaccgggatactctcaagcaatcgaacatttaaaattattagaccaaggatataatctatatattttttatcaagaaaatattagtgatgacgaaggtgaaccaaagataggtaaaattagtgacaatcttttaaaagcttacatgaaatatgatggagaagcttggtatgcatacaaaaacgcattcgactacttacctgatgaaagagatgccgaagaggcatattttgaagggactcgaaaattagtggctgtgaatgcttatgaacgtaataaagatgctagagaagaatgtattaggattcatggttataaatgtaaagcttgtgattttgattttgaaaaaaaatatggcgagcacggaaaaggtttcatccacgtacatcatatcatacccttgaacatgataggcaagcgctataaagtcaatccagaacatgatctgatacctttatgtcctaattgccatgctatggtacatcgttttaaaaacaatgaattaggtttagataaattaaaagaacttatatcatcgggcaaatag

SEQ ID NO: 170564 - DNA, 708 bp, Enterobacter cloacae
atgataagaataactttcgacacaaacgtcataggaaccgctttccaaaagacttctaaggtataccagaaatttattgatggcacatacgttccttttgtagctgaacccacgcttacattggatgggttgagcaaacaagggaaaattgatcttctagcgatgaaaaaagtaaatttttcatttaatcaaactcgctgggataattttatatccatgggtgtaaaatttttaatttgcccccgcattggcttacctcgtccattaggaacattacctgatggtaataaagaagcgtattctctcatccataaggccccagaacatacttttactacagaagttcgccaagctcgttactttgaaatgttgaattttatcgagcaggaactgatgtctggtcaacagtggcttaaggatctcgaaaatgagatcgataccctaggtggcagctatgatgctaaaaaaaactggtttactaatcttgcagataatgaacctgttataggcgagaaggttatccgtaaaaggtttggtgactgggccgatgctgattctatcgccggacattacgcttataaaaatgattggttctgtactaatgatggtgcatctggagctggtgctcattcggtgatgtcgaaaaccaatagagaaaaaatagcttccacttttagcattaaatttgtcacctacgatgatatttga

SEQ ID NO: 170565 - DNA, 813 bp, Enterobacter cloacae
atggatgaaaacaacaacccccttgaattaaaaaaatgttctatgtgcatgaagtcggtgcaatctttagagttaagtcactttataccaaaactcgtttatcgccgcatgcgaaagatgctagcgcctaaacatgatctgaatatggccgacaataataagaatacgttcaagattttccgtgaaataaaaacagagcttttttgtcagggctgtgaagataaattaaataaaaacggcgagcgttattttgctaacacctgccttcctgtaccaggaggtgacggagttggtcattttacaaaaatttcacacgccaaaattatacatctcttgaacagcactgggggatataacattactcttggctctggcttcctgccggggattgacatgaataagatttattattttgcgataagtattttttggcgtggatcttttaatgtatggaacaattatgattctctgaatatcgatgatgtcactcgagaaagaatgcgcttattcttgttaaaccctgaagaaaataaaattccttacagggtgtatatcgcaccatcattctggaaattgaaatacgggacattacttcctgtatttatcccaagaagaaaacattatctattctctattttatggcttgacttttatcttgaccttaacaataagacagaacaattatctggattgccgatatcattaatggcaaatcaaaagttatgcttggagtcattcggataccttaaaaaaaccattactgaagccactcctcgcggaaatgtaaacccgaaggtctcttggttgcaataa

SEQ ID NO: 170566 - DNA, 534 bp, Enterobacter cloacae
atgaagataacaatatcatgcgtattactgggtgttttcttactggccggatgcagtcagccaaaggctgaggcacaaacgcaaagtggtggtgcaggaacaatagaagcgattaaccataccaaatgggccatcaatcatttcagcgtaaacggtcagtcgggtattgatattatcgggccttttgatggcggcggcggagggtgttgctatggcgtaccggcagcctggaagccgggaatgactgttcgcatagactggcaaactggcgttggaacttctgaaggtttccccgggttcgctgatcgtgaaaagtataaagcttgggaaagagaaattacggcacaaaatcgccaacacagcaaaacagtcccactgcccgattatacaggacaggaaacctgcggtattacggtgcattttttaccctgcgatgacgtaaaggtaacgaccagttgtttcacctacggtagtccgtcctacccgatcaaactaccgctggaaatgaaggagccgaaagtatgtccgaagtaa

SEQ ID NO: 170567 - DNA, 558 bp, Enterobacter cloacae
atgttgattggctatgcgcgcgtctcgacgcaggatcagaacctggagctgcaacgcgaagccttgagcaaggccggatgtaaaaaggtcttcgaggacaaggtgagtggcacgcgggcagaccggcctggcttggccaagacgctcgaaatgctgcgcgaaggcgatactttggtcgtctggaagctcgaccggctgggccggtcggtcaagcaactggtcgatctggtcggcgatctgcacaagcacggtgtccagttcaggagcctcaccgactccatcgacaccggcacaccatccgggcggttcttcttccacgtcatggcgagccttgccgaaatggagcgcgagctgaccgtcgagcgcacccgcgccgggctggaagtcgccaagcagctcggccgcaaaggcggccgaaagccgaagatgaccgacagcaagatcgagtcggccaagaagctgctggccagcggggtgccgcccaaggacgtggccaagaacctcggcgtgtccattccgacgctgtaccgctgggtgccagcctccacgcacgcttag

SEQ ID NO: 170568 - DNA, 321 bp, Enterobacter cloacae
atgatgcacacgaccagtgagccatttgcccccttttttaaggaccctgtagagctcaacatgctttcattaaagtcaaagctgataatcatcctgacggagttgatccgtgaaaaaggatggtcgcaaagagttacagcggagaagcttggagtcagtcagccaagagttagcaacttgatgaatggccaggtgtcaaaatttgcgatagacatgcttttagagatgctctgcaaaatcgggtttgtcatggatgtgtctttcagaccgcatgacacagagagccctatcgaagtaaaagtgaaaaaagcagtggtctga

SEQ ID NO: 170569 - DNA, 324 bp, Enterobacter cloacae
atgaaagatgttgtttacgttggcggctcagaaaaagacatgaaaaagtcattttcaaaagccatgttagaagaggttttggtagagattgttcgtctacaacacggactatcgccactcaggaaaacgaaaccgatgaacggtctcggaaaaggggttcttgagtggacgaagaatggtaagccggcataccgcttggtttatgtagtaggtaaacaggcaatttacatactacacgccttctccaaaacatctgatggaacccctaaatccgaagaggacacaatcaaagaacggtacaaacagatcgtaaaattcgtgtaa

SEQ ID NO: 170570 - DNA, 255 bp, Enterobacter cloacae
atgaaaaaacttacggcggacttattaagaattgcgtgcacctggtgtcatcgcacgagcagcgtctttgtttcccgctggattctattcgtcgtgctgacggtcaatatccggcaaacagtaaggaaattgtttatccgggtatgcactctgatattggcggagggtatccgccaggcgatcaggggaaagctaatgctaacgatgatcgccttctgttatcacaaattgcacttaatgatatttttttattga

SEQ ID NO: 170571 - DNA, 363 bp, Enterobacter cloacae
atgttaaagttattcgccaagtacacatcaataggtgttatcaacacaatcattcattgggttgtgtttgctgtttgcatttatgcgtttcactcagggcaagctcttggaaacttcgccgggttcgtcgtggcggtgtcattcagcttctttgcaaacgctaggttcacgtttaagtcttccaccacaaccatgcgttacttgctctacgttggatttatgggctcgctgagcgcagctgttggttgggctgccgataagtccggtatggcgccgattgtgactctcattctcttctccgccatcagtctggtgtgcggttttatttattcaaagttcattgtctttagggatgcgaaatga

SEQ ID NO: 170572 - DNA, 684 bp, Enterobacter cloacae
atgcccgttagccggtgcgctggctggcagcgtcttctcgtcatagccgacgcagtatttatcaaggaacggctgatcgacgaggttttcagtgatcatcacatacgccagcgcattgaccagcgccgcatcggtaccagggcggatagggatccactcgtcttctcgccccgcgccggtatcggtgtagcgcggatcgacgatgatcattcgtgcgttggatttggcgcgcgcctgctcaagataataggttaccccaccgccgctcatacgcgtttcgcccgggttgttgccgaacaacaccaccagcttgctgttttctatatccgacgggctgttaccgtctgcccagccgccataggtgtagttcaggcccgcggcaatctgtgcggaagagtagtcgccataatggttgagatagccgccgcagcagttcatcaggcgcgctaccagcgttttacccggcggccaggagcgggtcatggtgccgcccagcgtcccggtgccatagttcaggtagatggattcgttgccgtattctttgatcaggcgctgcatgttggtcgcgataatatcgtaggcttcgtcccagctaatgcgctcgaacttcccttccccacgcttaccgacacgcttcatcggatatttcagacgatccgggttataaacgcgacggcgcattga

SEQ ID NO: 170573 - DNA, 1122 bp, Enterobacter cloacae
atgactgatttaataaatcaaattgataccaggcggaaggaaatatttacagactcctatcctatgtctattggtgagcttgttaatctttataaagatggtgagattgatataaacccttcttttcaaaggttctttagatggagccatcagcaaaaagtaagtctgattgagtccgtcttactgggaataccagtaccgtcaatttttgttgcacaaagagatgatggggtttgggatctggttgatggcttgcaaagaatatcaacaatattagcccttatgggggaattgaaagatgacaagggtgagttacaaccaccgttaattctgaaaggcacaaaatatcttccgggtttagatggtaagatgtggaatggtgttggaaacaatgaaattgaaaaatccattaagatggcattcaagagggaaaaaatagaaataaaaataataaaaaaggaaagtgatgttaacactaagtttgaattattccaaagattaaatactggcggaagtgagttgtctgaacaggaagtgcggaattgtctccttatcatgctcgataaaaacgcctatgaccgtttagacgagctatctaaataccaggcattcaaagattccatatcaattacggagaggctatacgatgaaagatatgatatggaattagtgctaaggttatttgttttgggtaattctaatgctcaggagcttagaggcatcgaagaagtgtccgaatacttaaccaataaagtcactgacctcacaaacgaaaaattcgattggaacatggaatctcaattattcaagaaaacctttgattttatatatgaagtcttggaggacaattcatttaaaaaatttgactcccaaaggggtgctttccgaggcggattccacctttctgcatatgaagttttagctactggagtctacaaaagtttgaaagtcggtggaataagcgatgatgaagttaaaaatactttgcaccgatcttctagagatatttttggagatgatacatttattaagcacagcggatctggtgctaaagcgaactatagatggccacgttttcaagaactaattgataaggtatttctaaatggaaatcaaccttaa

SEQ ID NO: 170574 - DNA, 669 bp, Enterobacter cloacae
atggaaatcaaccttaaggataaattacagtcattcattgagaatgacaaagcatggcgaaaaaaagagatgactttgcttaagtcgttcgttttctcttcatctggattgaacgagcatacctatatcagagctggcgttgcacttttatactctcattgggaggggcatataaaagctgcttctttgcattatattgagtatctcaattgcctacaactcaggttaagccagctatcagataacaatgtcacttcttacgtttatgataaactaatgtctcttaatggttcaaaagttattagcgcttacacaggaatttctaatgctatttgtaacaaccttgataatgaagtgtttaatataacaccactaaaaatcatcaaaactgaaagcaatcttaaaatgagacggcttgaggatattttgcatgttattggcttagataactctgtttttatggccaataaagtacatattgatgaggtgttactgaactatagaaataagatttctcatggtgaacgaactgagggattacaatctactagcctaagcaaatcctcgtataatagtcttcatgataaggtgattgagttaatagagcatttcgatgacctgcttattcagcatgttttagatgagaaataccttaaagtttcttcctga

SEQ ID NO: 170575 - DNA, 321 bp, Enterobacter cloacae
atggaggcggccaccgcacagatcggtgctaatggatggctatatattcccgttactggcggcaaaaaaatgctgctgcagtgggggcttttaaccggtgcgagtaattattcttttaaattcccaattgcatttcccgtcggtggtttatgcctggttgctatggcccatacaactgattccgctgatgtgagcatggtaactatgactaatggatttatcagggataaaaccagcgcgtttgctttgtgcgccagaacagtgaacggcgtgcagcaaccttttgaacgtagcgtttactggttcgctgttggttactga

SEQ ID NO: 170576 - DNA, 1557 bp, Enterobacter cloacae
atgtccatttggatctttgcgcttataaatacccatttttttcagcgcgtcgtaggacggcagcagcggatctttggcaaccattttggcgtaaaggtagcgcagccactgctcctgcgtacggccttcggtgaatttctgatagacatccggtccgagacgtttcgctacttcgctcatgatccagtagatgggtttgcgctcaaacttcggggcggttaccggctggaggaaaatcaggtatcccatgttgccggcgtaatcgttggggatgatatcttcctgctcaacggtcatcaggtccggcaggacaatatcggcatacttcgcggacgaggtcatgaagttgtcgataacgacgatcgtttcgcacttactctcatcctgcaaaatgtcgtgagttttgttgatatcagagtgctggttgatgatggtattacccgcatagttccagatgaacttgatcggcacatccagcttatccttaccgcgtacaccgtcgcgcagggcggtcatctccggtccacgcacgatggcatccgtccagctgaagcaggagatttgcgttttcacaggattttccggcagcggcatacgttcgatggtgatggtgtaggtcgattcgcgcgcgccgctgttgccgccgttaatgccgacgttgccggtcaggatcggcagcatggcgatggcgcgggatgtctgctcgccgttggcctgacgctgcgggccccaaccctggcaaatgtaggccggttttgccgaaccgatttcacgggccagcttaatgatgcgatcggcaggaatgcctgtaatgcgcgacgcccattccggggttttcgcggttttgtcatcaccctggccgagaatataggctttgtaatgaccgttaacaggtgcgccttccggcagggttttttcgtcataacctacgcagtatttatcgaggaagggctgatcgacgaggttttcattaatcagcacccacgcaatacctgccaccagtgcggcatcggtgcccggacgaatcgggatccactcgtcttcgcggcctgcggcggtgtcggtgtagcgcggatcgataacgatcattcgtgcgttagaccgttcacgtgcctgttcaaggtagtaagtgatcccgccgccgctcatgcgcgtttctgccggattattgccgaacatcaccaccagtttggtgttttcgatatccgatgtactgttgccgtcgttgctgccgtaggtgtagggcattgcgcaggcgatctgcgcggtgctgtaggtgccgtagtggctgaggaagccgccgtagcagttcatcaggcgtgccaccagcgaggcgtaaggggaggagcgggtgatattgccgccgacaattccggaggagtagttaatgtagaccgcttcgttgccgtatttttcgaccacgcttttcaggctcgcggcgatggtgtccagcgcttcttcccaggtgatacgttcaaacttgccttctccgcgtttgcccacgcgtttcatcggatagttcagacggtctggatgattaatgcgacggcgaattga

SEQ ID NO: 170577 - DNA, 279 bp, Enterobacter cloacae
gtgactttccttaattggattggttggattcatgacgtaaagcaccagatgggcttcactaacgtactttttggtgatgtctttatacttttcgatggcatgagtatcatcattttcctgttctttgaaaccgaacagcccaggtgtatcgatcaggacgaaatcctgaccaacctcgtacacctttacttcattagaggattcttggtggctgatcttcatgctggtcttatcaagcttctccatccaagccgccgcgatagaggttttaccctctga

SEQ ID NO: 170578 - DNA, 1086 bp, Enterobacter cloacae
atggattttaatcttcgtcactgtgtcattcatgaactagtgaaagagagcggtaagcagaaagtggaggcaattctgaaaccagtgcttccgagtgatgatgaacatgtttgccaattagtagaatctttaactgatttgataggtaaaaaggataatcaggccgcccgaggcaccttcgactccgaggatgttaccttcaaagttcccagcgcattcaaaacttactacgatggtgcagctacatcagatgactttcatcagttctcattaatctgcatgaatgagttgtcccgccaagctaaagatcccacaagaattgctgcttctggcggtgcaatagtatttgcccactactctcgtagttcatctaattacctattgattactatggttaaacagaaggatgcactgcgtctggatgagaacctgaagccagtaggaacagttcaaattgacctagcaaaaattaatcaggctgcacgtgttaactttgataggttttaccagttcgaagtacttcccgatgatgaaaaaccgacttacttggcatttgtaagccctaaagtaaatcaggatgcttctgggtatttcgtcgctgccctaggttgctcagacagtgttccctcggccaaagccacagattccgctctgaatggtgtgagaagctactttgatgcaaatgcagatatcaaggcgtacaaaaatgccgcttatgatgccgtattgtaccatctaaaagagaaaaaaccgggagaaacagcttcactagcagaacttgagcatattgtaagacaagcagtacctgctgagaaacattcgcatatcgataatttagttgagtatcttaatggtgaagaaatcggggttccattagaatttgccataaatagagccgtagtaaataaaagaactaaagtaagaactaaatccaatggatgggaactaagctttgaaaaaagattttttggtgaacaagcaggatcagtaattcaatatttgcgaaaagatagaaaaataatcatatctcaattggatgatattaccatccaaaaattagaagacgcactcaagaacgaagggtaa

SEQ ID NO: 170579 - DNA, 1287 bp, Enterobacter cloacae
atgtctcctatatattttgaaaaactagttacattttacaggggcttaggcaaaccctctgttgttaactgtgcattcgaatatagaggacaacttgataaccagttcgatattttcaaagaattatggaataaatcagatcaaagaattgcagattttgaattatcttttgattctggttcctatggcacatgttatgaggactctctgcctgaagagttaaccgcaactactgatattcatctcacagtatcattgcctgcaggaaattttagatttatagaatcactggaaaacttcctgttgatagataacaatttaaatactggaaagcaagttgagaatgtttatcttattaaagaggacttcttatttggcgaagtagcgccagtgaatgaaccggttcagaaagcattacaactttcacaatttattactgaactttatgaccttgccaattataatgatcgcgttgagcacagcggcttgctaaaattagtattcattgataccggatctacaaagaaaaccgatccaattgttattgagcctaaaataaacatagaaagcatcttacttcctatggttgacttgactatattcaagaccttaaaagaaaatggttctgataatgcccatattcaagagaaacaagctatgtttagggtttctattattgaaatccttaaagatgtagatgatagcaaagataaatttaatttcttggttgagcaatgggagttattgaaagaaacttattatggtaattttgaatgttatcttactaacttctcatttttaaaacagaagaaagaggcagcagaaaattacatgacggtttcctctaaaatatcaggaaccctttcatcgatatcgggtaaattgtttggcctaccaatttcttttgccgccgtcgtggctattgtcaaagtggaaaaattcgaaagcatcttagctttactaggcgtagcaataacgtcaatattaattgcactaactatctacgaccaaaaaagagttctagaatctattagagtgtcaattgatgcactttttagtcatacaaaagcccaacgtagtggagagcttgctagtctgatatcaaagcataaagaaaacctttattctcaagttaagggactggatactgcaatggcatttttattgttagcttcatttttacccattatcctttcaatcggtacatatatatataaatttcatccatctatagtttcaaacattagttggtttgtcagtacatttatggctcagttacttaaatag

SEQ ID NO: 170580 - DNA, 498 bp, Enterobacter cloacae
atggatttttcatggaagcaagaatacagtcaacttgcgtcacaattccttaagaagcatttcggttcggctcagggagtaactcatacgtttccctgtatgagagaagactatccgtggaataggcctttaggaaatgtggcggattcgagggttccggcaaaaaacaatactgagtaccatgggctggagagttacgctatgcagtaccatgctacagctcaatatgaggatgcctatcaactttggattcttgcgggaatgtggcgtcgtgaagacatgcgggcaaatggttttgatgactctggtcatattgtagcgatagagttttgtgtcaaacaggctctctataatcaggctctgaatctgtggcagaaaaacacaaatggatcatcagttcctcttcctgaaatgtttggactcgactcaataaaagtaaaggctaaggaaagtaaagcattaacgataatagatgatcacattaataataagaggtag

SEQ ID NO: 170581 - DNA, 141 bp, Enterobacter cloacae
atgtttaacgctcgtccttttcctattgattcgtttcctcagattatcagaaatgcggtttatgaagtggaacagcacacgcaggctcctcaggctttgattgccgcatcggtactgggagttatttcgcttgcatgctga

SEQ ID NO: 170582 - DNA, 1935 bp, Enterobacter cloacae
atgtttcaggacaacccgctgctagcgcagcttaaacagcaactgcattcccagacgccgcgtgcagaaggggtcgtaaaagccacggaaaagggctttggcttccttgaagttgacgcgcagaaaagctacttcattccgccaccgcagatgaagaaagtgatgcatggcgaccgcgtcatggccgtcattcataccgaaaaggaacgtgagtccgccgagccggaagaactgatcgaaccgttcctgacccgttttgtgggtaaggtgcagcgaaaagacgatcgtctttctatcgtgccggatcaccctctgctgaaagatgccattccctgccgcgccgcccgtggcgttgagcatgattttaaagaaggtgactgggccgtagcagaaatgcgccgtcatcctctgaagggcgatcgcggtttttatgcggaactgacccagttcattacctttggcgccgatcatttcgtgccatggtgggttacgctggcacgccacaatcttgaaaaagaagcgccgaacggcgtggcaaccgagatgcaggacgaaggtctgacgcgtcgcgatctcaccgcgctggagtttgtcaccatcgacagcgccagcaccgaagatatggacgatgcgctgtacgctgaagagagtgccgacggcaaactgcacctgaccgttgccattgccgatcccaccgcctggattgttgaaggcagcaagcttgacgaaacggcgaaaatccgtgcgttcacgaactacctgccgggcttcaacatcccaatgctgccgcgtgaactgtcagacgatctctgctcgctgcgtccgaatgaagtgcgtccggtccttgcctgccgcatgaccattgccgcggatggcgcgattgaagacgatatcgagttctttgctgccaccatcgagtcgaaagccaagctggcctacgataacgtctccgactggctggaaaataccggtagctggaaaccggaatcagacgccattgccgcgcagatccgtctgctgcatcgcatctgcctgaaccgcggcgagtggcgtcaaacccatgcgctggtgttcaaagatcgcccggattatcgctttgttctgggtgagaaaggcgaagtgctggatatcgtggccgagccgcgacgcattgcgaaccgcatcgttgaagaagcgatgatttccgccaacatctgtgccgcacgcgtgctgcgcgacaagctgggctttggcatttacaacgttcataccggcttcgacccggcgaataccgaagcgctggcagccctgctgaagaatcacgacgtgcacgtcgatccggaagaagtgctgaccctgccgggcttctgcaagcttcgccgcgaactggacgcgcagccatcgggcttcctggacagccgcattcgtcgcttccagtccttcgctgaaatcagcaccgagcctggcccgcactttggtctcggcctcgaagcctatgcgacctggacgtcaccgatccgtaagtatggcgatatggttaaccaccgtctgctgaaagcaattatcaaaggcgaaaccgttgcccgccctcaggaggagaccacgctgcagatggccgatcgtcgccgtctgaaccgcatggcagaacgtgacgttggcgactggctgtacgcgcgcttcctgcaggataaagccggtacggatacccgtttcgccgccgagatcattgatatcagccgcggggggatgcgcgtccgtctggtcgataacggtgctgtcgcgtttattccggcgccattcctgcatgctgttcgtgatgaaatggtctgtagtcaggaaaacggtacggtgcaaattaaaggtgaaacagtttacaaagtcaccgacgtgattgacgtcactatcgctgaagtccgtatggaaacccgcagtattatcgcgcgtcctgtcgcctga

SEQ ID NO: 170583 - DNA, 414 bp, Enterobacter cloacae
atgaaatatttttacagcatcagcacgcagggattttacctcgataacggtatgctggatgcgtataaagcggctggctcactacctgcggacttgcaagagatgagcgaggctgactatctggcgttttttaatcctcccgatggattcgcgggcatatttgacgagaaaggaccgcgtattgaacaacagccagaactggacccgctggcgatagcagaaaatcaacggcggctgttgctgtcagaaatcgccccgaccatttctgtatggcagacaaaaatcctggtgggcatgaaactgagtgattcagaaaccgcaaccctgcatgcctggttgagttacagtgatgcgctgaacgcgctggatatcaccgtgccagatattcagtggcctgaaaaacccgcagcgtga

SEQ ID NO: 170584 - DNA, 930 bp, Enterobacter cloacae
atgtctgaacatttaaacattcatcaggtaactacagagccaaagccttttggtgtaaccgtcaaatggaaatggcctgacggcagtcactggttttcttggctggaactgcaatgcttgtttgaagatgggcggcttgagagagagggaattcgctggccggttactgggaagctcatctccggtctaaaggcatctgagcgcgtgcaggtgcgcctgcgtccaattgcagaggatggctcagcacgagattggcgagccagtgactgggtcgaaggggtttcttctgtcgatgtcggagaaattgtagaggcgctggacgaagagatccgtaacagctgcgcacttcatggccttaaaggtggctggtttgtcgataaaaccggcaaggcttacatccacgaagcgctgattggcgatggcgtagtgtctgccaactatatcgtaaagatgaacgtgaaccacggcggcaaactgcacgttgctggcatggccggctgcattgaaggtgaccagcgcaaggtcgtgtttgaggctgaccgctttaaggtgaatgaagccgctcaatcagccagcaataatgaagagacggccttcaatggtggtctggcttttggtggtttccctggggcaattagtcatgatggagctaatcccgctgatggcaataatgccaccgctgaaccaatcagttcaattgcttcagcgacaggcacagccaccaagacgcgactaaccgacgagatgcaagaactggttctcaaggctgtacgcgaaagcgatttgttcgcagccctccaggcaaagattgatgcgcaaacagcttcagtagttggcttgcaacaggcgatgcacgaagcggtgaaagatgctcttcgcaatgcgctcaagccaggcggcatcctctgggcggctatctcacatcgatga

SEQ ID NO: 170585 - DNA, 198 bp, Enterobacter cloacae
atgacagtagcccttacagcaaaacagattcaagatctggctgtcttcgcaaaagaagacggcgcgcctcaatacaccataaccacggggacaatcccggagttcgaagcagacgatggcgaaattattcctgaacactctggtctgatcgcgtattcagattcagaagagcacggcgtactgcaactggaagactag

SEQ ID NO: 170586 - DNA, 318 bp, Enterobacter cloacae
atgagcaacatcgacaaacgcgcattacgtgaagcggcggagagagcagaatccgatagttggggttatgatcgcgatgaattcaatgaggctctaacaccggctgccgttctggcgctgctggatgagctggaagccgcagagaagctgattgctgagctggaggcgcgggaggttgtactgccgagcgtgcaagatgttcacccattaggtccgcagtcggcgaaagttttttgtgagtttcaccggagtatcgtgaacagatgcgccgatgagattcgcaaggttggcgtcaaagtcagcatcaagggggcgtag

SEQ ID NO: 170587 - DNA, 228 bp, Enterobacter cloacae
gtgagcaaattagaattacttaaaaagttagcctctcttgctacagagtgtcacacactggcctgtggattggatcttggcgatgaacgcactgagatgttcgagatgtacaacgtgctgagaaatcttggacgcaaaggatatgcaagccagataagcaaagctactaacccgcttttgttagcagttgacgataacgacgatgattgggatgaggatgatgagtga

SEQ ID NO: 170588 - DNA, 465 bp, Enterobacter cloacae
atgctaaacagcatcacttttagagtgctgcattggagcgccaccctaattatggccgttgtgatcgcggggtactgttatttaaagcatatgcggtgcttaacggtaagtgacaagctttatgaggttcgccagctcacaacaaggacgtggttatacatcaccgaatatgctgagacggacatgacaacgggcaatgtttaccgttattttttagccagcaaggttgacggcgatccgctggtggctctcgaaaaacagaatatcgcccccacgcttacggcgaatactccgcgggcaaaggtggatgggatcggcaataacatctctttcactgttcacgggaccatctatgactttaacagctctgcatttttttatgatgcagagggaatagcggtcgtgccgtcaatcgacttaaccgctcgaggtgaaggttgggataaaggaaaattcagcagataa

SEQ ID NO: 170589 - DNA, 279 bp, Enterobacter cloacae
atgaagtgcaggacatggccgctccgcttacatatatctggttttatcagcaagtcagaaatggcgggccgtgggattacaaacaaaaaaatcgactgtgggctgattttggtaacttccattttggcgcagtgggttatgcagcatgcattccagcaaaaattttacacatggctgctggcgcagcgcagtggagagcgggcacatcaagtgaagaatgggggaatgtcatgcagggtcccccgtttggcgatgacccggttgatcagttctggataa

SEQ ID NO: 170590 - DNA, 900 bp, Enterobacter cloacae
atgattgatgaaaagaagattttaaagagatttaattcattaacaaagagtgaaagggatgaattaaccttaaagtcgcaagaggaagggttgcggcaatttgatgaattcaaaaagtcttatttggttggtgaatgctacttatgtggtaaatctttcaagaccattagtaaggataatccatgtcttcattggctactgagacgatgtaaattcaagaccaagtatttccccctgctgtataataaatacgggtatattaatatcgctgcttttttaaggtggtgtgccaatatggaaaaaccactggtcaatattaatgatttaccgctagaaatgcctaaaggtaaggtattatcgagcaccatcaaatggaataatattgaatggacgtttgattgctctgaatcagattttaagggacattctggaacggcgatagagtacccacattatcattttcaaatgagaattgatggtatgcagtttataaattttaattcattccacttaccttttagcaacgatgacttgttcgcattgtcaatgagccgtaaccatcctgacaagtttacgcatgattttggaacgtttggtatggggatggatgctgcaatggaaattgtctcagaaaatcctgaaatggccttagatattatgactagatccgatgatgaagctgatgcaacttatagtatatctaccctggcaatagctggtgatggagagaaaatttccggggatttaatagcagaattgatcgcagaatcacgagaaactaaggtcccgttgagtaaattgatgcaggagcgtttatcaaaacaaacgactatcagaactatgatttctccaggtgaagccgttccggagatagcgagtcgaacagagcataaaaaataa

SEQ ID NO: 170591 - DNA, 1356 bp, Enterobacter cloacae
gtgaacagacagcaaaaagatcaagttatggcattgttagaggtgtttgattccgaagtctttaaaaggaatgtagctgaaaaatataaggatagtggtgattactcaggggttttaataggtgagttaagtttggattcttatattttacttgtttgtaagatatatgcgcatttcaaacaagaaataacggaagagaactttgcaactttgcctctgaactataatttatctgatgttggaagcggtaatcttatcaatgatatcggatatttaaataattataatggcagcggggattttcctaatgcattgggttatgctttgagattggctgcataccaacgagtttatggtttttgggagtataattcaagaagggttttaagcgcgtcaacgaaaaaaatacaaagcgataatgaattaatggaggcgaagaaaatactcattgattcacgtatttctgatctggatgagttgattcgcagcatatctaatgaacatgagcggctagaaagtttcaatgaggaaagcattgctaaaattagaactttagaggcttcactgcaaaatataatgcagcaaagcgaaacgataaataatctttataacaatgcaacaaattctgtggaaaaagttaacacacaacttacgttagcggaaagcaaaaagaatgatttagataaattgtttgacaaggcctcaagcgaaatagataaaattaattttgatatctctgattataaaagtgagtatgcgaaattctcaaagaaactcgaattattaacagaggattttgacaagaaactaacttttgttgaagaaaagcaaagttattttattgaaaggaattcatatttagatgatctgataggtcgtgaggttggagcatcattgtttgaaacttttaaacaacgcaaaaatgaattatcaccttcggttaaattttggcgctggactgttccctgtctagcagtggctacagttgtatggatatggttattattccattggtcttccgatgaagcaatgagctatcaattgcttataatcaattcaattaaggcactacctgccataggtttacttttatttggaattgcacagtacagcaaagagcgaaattttcaggaggaatatgcttttaaatctgctgtagcattaacattaaacgcttatgctgaacagttattaagtgatgagaataaagatgcattaatcttatcttctgtatcttcaatatataaatcccccatacatcattcaaaattaaaagtggaggatggaaaaggagctattgattcagtttctgaattgctaggaaagttcaaggaaataaacttcacaaagaaatga

SEQ ID NO: 170592 - DNA, 942 bp, Enterobacter cloacae
atggcaataattgaactgtattcctcaaggaagaaaaagaataatggtgagaacactgatgtttatcagtatgatgaattatcagataaacttaagtcacagatactacaaatattattcgaaatttttgaccagtattccgaccagcgccgacattataatgatgataatgagtatgattttttgcgtaatactttatgcagagaatatgggcgattctcgttaaataatgacaagaatgctcgctcggatcttattggctggtttctcaataaagcagatattgacgagcaacttgactttgttgaactaagttttagatatttagaacttgttgttcaaaaagattcatataattttatcgatgatagaggtcgccgactacctgcccatgcagttaccgatgcaattcaagagcttaatcacagaattaaagaagatgccactggttatcaatatgccgagtccattattgttcgcgtagactctcaattcattcatagtgatgtggttaaaccagcactttctttactaagagaatcagatggttatgatggctcgctcgatgagtttctttccgctcacgaacactacaggcatgggagttataaagagtgcttggtcgattgcctgaagtcatttgaaagtttaatgaaagcaattcatatcaaaagaggctggcattatgaccccaaaaaagccaccgcaaaagatttgataaatggctgtctcaaaaatgggttgattccacaatatctacagactcaaatgagctctattaataacatgcttgaatcaggcattccaacaataagaaataaggaagctggtcatgggcaaggcactgaagttagccaagtagaagaacatctttgcagctatatgctccatataactgccagcaatttattatttttggcggagtgtgagcgaagtatgtaa

SEQ ID NO: 170593 - DNA, 804 bp, Enterobacter cloacae
gtggctcccggagccacgggcaagagcttctgggcgctggaagcggcaatgtccgttgcctgtgctgcaaccgttgaaagcagagcggccggtggtgacttggtagggcttgcacctgcgaaagcgggtcgcgtcgtctattacgcgggagaagaccccgagccagcgctgattgggcgaattcactctgttggcaaacaccttggtcaagaagctcgcgaagccatcatagaaaacctcatggtcatgccgatcatgggaaaactaatggacgtcacgaagaaaagtaagcgggcccagataatcgagcaatgcgaaggcgctcggctaatcgttctggacacattgagccgtattcatacccttgatgagaatagcaacggggatatggcccggcttgtcgctatgcttgaggaaattgcgtccattactaaagcgtcagtgctttatctgcaccatgtcagcaaaggcagcgcccgcgacgggcaggccgatcagcaacaggcagtacgtggtgcgtcggctcttgtcgataatccccgatggtgcggtttcgtcgcgaagatgactgacaaagaagcgcagaaccatactgaccgcgtctacgaccgacagcctatcggggaaaaccgccggaagttctttgtctgtttcggcgttagcaaacagaactacgccgagattgacgatgatcgttggtatcagcgtcatgacggcggcgtgttgctgccagtggaattggcggcggtcacgaaggaacgcactctgcacgtcgtaagtgggagtgacgatgagcggtggtaa

SEQ ID NO: 170594 - DNA, 243 bp, Enterobacter cloacae
atgaccgaccatcaaaatgcaaatactgaacgacgccctcaacgccgtggccgcgcatcgttcgtggcggtactggatgaggtgcggaaggagcacgaacgcggggtaccgctggtatggatttatgaggcattcgcggaccggctcgaaatgggatacacccagttcaccaaatacgtcgcacgatacatcaagcaaggtcagccaatcctcgctccctacaagcacgacgggaagcgatga

SEQ ID NO: 170595 - DNA, 1521 bp, Enterobacter cloacae
atgtttttaatttcaattattcaaatgttctcggttatgattataatgcttaatataaaaataaaagatgcatttagagcaattattctgcttttacttctattactatccatggttatttctattgaaataagcagcattatatcaataggggagtacatacccacacttgcactagcaaatatatcagagacaaatagtgttggctggaaaataaaactactaccttttcttgtattcttatcatttatgattgtatcattgattttgaaaagattgataaaaggaaaaaaaataagaaatataatgattgttgtttttttattatcattgttaataccaacatctccaacaaatgcttttttttcttcattacatgaagtttatttggaagcaaaagaatacaatatgtcaccacttgaaataagtgatataaagtcaaaatacacaaaggaaatagtaacaaacgacagttactcacatgaaataataaatggaaacggaaaaaatattttagtaatatttattgaaggtatgtcttcattggtaatttctaaggagctaaccccgaatttatatgaatttagaaaaaaatcaatatcatttaacaactattacaaccataccgcagctacatttagaggtttaagaggacagttaacctcatcatatcaaatgaccggtgggtacaataaagataattctggccttggccaagcatctaaagtagagatcgaacataaactaaatacttacaattacataacaaaattaccaatcatacttgagaaaaatggttaccatacatattttcaagcatctaattcaatagatgccccattgagtttaatgctatcaactttaaagtttaatcatatatacggaagggaggactataacaaaaaatcaggtgaactcacagacaaagagtctttcgatttattatttaaaaaattaaatgaggctaaacaacctttcttctatggtgtttatactgtaggtacacaccttggcttagatagccctgatgtaaagttttatgatgggggaaatgaatatttaaatcactttcatcaattagaccattggtttggtgattttatatctcattttaataagacaagcttatcgaaagatacaattgtcataatcacaagtgaccatgcaagttacccatcagaagattacaaaaaaacattcaaaactgataatactttttttgttgatcagattccattaataatatggagtaatggtgttgagttcaaagacattaatgcacacggtttaaattcactatctttaacgccaacaatactagatattcttgggatcaaggagtcacacaacatgttcataggtgagtctctatttgaaaaagaaaaaaataaaaatgaactcaactgtacatctgcaataggtgacctgtatgtgaaaacgtgtaatggaaaaatggaaatcgagaaaagaaaagaaaaaacagaattaataaaacaattgcaactttttggtgatagataa

SEQ ID NO: 170596 - DNA, 243 bp, Enterobacter cloacae
gtgcctgacgaaggcgtggccgcacgctttaagcagcctgaggccattaaccggcagctgcataacttcaccgtcgttgtgggagagcgcgattcggtgaccggcaaagatatcgccggtctgaaagcggagctggaaaagcagggcatcaaattcgactataaaatgtaccccggtctgaaccacgaaatggacgtctggcgtccggcgtatgctgagtttgttcaaaagctcttcagataa

SEQ ID NO: 170597 - DNA, 561 bp, Enterobacter cloacae
atgatttatggctatgcccgagtatcaacaaaccaccaggacaccgaattgcaacgtctggctctcgagtccgctggctgcgagctaatttttgaggaacacgccagcgggcgtaaagctaatcgcccggtgttgaaaaagctgatcggcaccatggaggccggtgatgaattggtggtctggaagttggacaggattggtcgcaatgtcctgcatgcgttgttgatgttccagcagctacaggaaaacggtgtgaattttcgtagcattacggatggagtggacctgcgcaccgccagtggtcgctacaatttccgcaatatcctttcggctgcgcagtacgaatccgaccttaacagcgagagaacgcttgccgggctggctgtcgcgcgagcaaaagggcgggtaggcggtcgcaggcccaaattaacggatgagcaatgggcgcaggcagggagattgatcgcagcaggggaatctcgtcagcgtgtggcaataatttacgacgtaggggtttcaacactctaccgaaaatttccggtaggtagtggtaagaaataa

SEQ ID NO: 170598 - DNA, 993 bp, Enterobacter cloacae
atggctgttatcaatactaacaccctgtctctgatgactcagaacaacctgaacaaatctcagtcttctctcggaacagcaatcgagcgtctgtcttccggcctgcgtatcaacagcgcaaaagatgatgctgctggtcaggcgattgccaaccgtttcacttctaacattaacggtttgacagttgcttcacgtaacgctaacgatggtatctctctggcgcagactgcagaaggggcactgagcgaaatcaacaacaacctgcagcgtattcgtgatctgaccgttcaggcgcagaacagctccaactcagcttctgatatcgattccatccagtctgaagtcaatcagcgtatggaagaaatcaaccgtgtgactacacaaactgatttcaacggcattaaagtgctgaatactggtgcgaaaactaaagatttttctttccaagttggttctaaagatacagaaataatcaaaatttccttggataagagtgacggttggaacttggcctctgctggcaagacagataattctcttaataaatatgtagccactgcggctcctaaggattcagctgccccgacagctgatgaaatcacagcaggtgaaaaagcaaacgaagctataaatggtcagttccgtgcagtaactgctgttggttttgatgttctaaacggtacagtcgattctgaaggtcatactgcaaagaaagacgatgttaagccacttgcggatatcgacaaggcaatcaaagccgtcgatacccagcgcagttctctcggtgcttcgcagaaccgtttcgaatcgaccattaccaatctgaacaataccgtgaacaacctgtccgctgctcgcagccgtattcaggattccgactacgcgaccgaagtgtccaacatgtcccgcgcgcagatcctgcagcaggctggctcttctgttctggctcaggccaaccaggttccgcaaaccatgctgtccctgctgcgttaa

SEQ ID NO: 170599 - DNA, 1929 bp, Enterobacter cloacae
atggacgcacagcaaaagcaacaaatcaataatgctttcaactcaatacttcgagcagactatattaccttagaaaaaatatctgagcttgatcaattagagggctacttcattgattcatttggaatattgaacaaccttcttcataaacaagatagttttatatctggcaggcgaggcacggggaaaacaacaaatttacttcgtggttactatgaatgccttaaaacaataatacctaaacctaaatctgaatccttactcggaaacgtaaaaaccctacctatatatatagatcttagtacttgcaatgatatattcgactctgagaacgaactttccttactcgaaattcattttattagacaaattatttccgctcttaaaaaccagctttctttaatgtttgacgacaactttctaagtagcttcagaaaacagcatcaaactttaaatgaacttgactacatagagaaagtacttgttcagggaataacattaagtaaatcaaaagttattgacagctccttagcaattaaaaaaaccggctcacatgaactttccggcgaactaagcccaaccagcgcaaaaatatcagcaaaagtaggtggcgctactgaaaacaatgaaagcattaaattcacaacagtaaaaggattaaatgcccaagacttcctcaataaaataaatgaaattaagacaaaagctggcattgatgctatctatgtatttatagatgaatattctgacctaagcctagactcacaattgaaattcagtgcgcttttgaaattatttcttggttcaaaagtaggtatgttctttaaacttggtgtaattacagaccgttttaactttggagaaaaagttatcattgggagggatattttccctatacctcttgattttaacgaatattctgagcgatttaatggtgctatagcagccatgaataaaatgcaaatcttcgttactgaactgatacaaaagagaattgaaaaattctgttcttcaatgacaatagattcaatattcaaaggtgacacaaccgaaataatgactcgtttaacacgagaaaccatcggcgtatcaaggacacttggaataattttacaaaacgctttttcccaagctcaaaccaattcaactgattatcgaattggtctcgcagaaataaactatggaatcacctgtgcaagaaaaacatatcaaaaacaattcattggtggtgtaaagcaaaaactcatacctggattctacatggatctatggaataaaatattagaaaaagcaattacagaaaaaaacaaatttcctaacagagccgccagccacttaatgatagaccccactagaaaagagtacttaaatattttatgcgagaactttttactacatttcatttccgaaaacatcgcttcaaaacatggtggtagttataacctctactctcttgactatgatatctgcactgagtacaacattaagtacgcaattaaaaaagatgattacacaccaataagatttatttacgacccggtcttatctggctttgatgcctattttctaaaaaccaagcaaaaaagttacagatgttctatctgtaataaaatttatgatgagaatgatgttataagatcaaaagtcaaacgctgctttgatgatgacacagttctaatcgagattattcatcaagatgcaccgatgaccgaaggaaatttcgctgaagtagagattaaaatcttaggattaatatctcaattaagtgagcatgaagctatgacagcaagagatattgcagactctgtaggctgtacggtgcagaaggttgcaatttgggggagccgagtccttgaaaaatcgggaaaaataaatattaacaaagcccacaaacctcacaaatactattcaagtgatcttgagcagtaa

SEQ ID NO: 170600 - DNA, 246 bp, Enterobacter cloacae
atgcaaagtgcagttatagaaaatggttttgccgtcgtggctggtgaaattgttgtgtttaattatgacagcctgacgcgggcttatttgtcacaaacaacggagtttattccagtgggcgtcagcattccggcgaatgcctgtacggacaagccactggcagcaaaaaaaggttatgttgtctgccggaacagtcagctgaccggatgggaatatctggcggatcatcgtggcgaaaccgtctag

SEQ ID NO: 170601 - DNA, 579 bp, Enterobacter cloacae
atgcggattatcagcattgacatgctttttcatcaggtcatcagaataggctttcacctcgataaccttatcgtcgacatacttacgagttgccagcacaaccgacgggtcgattttcagggtgattgccgatgtgctcgacacaatcagaatcatgcgaatggtttgcgtgcggccgcttccctcctgcagttgcggcttgtaggtctccgggcagttcgccacggcaatcaggatgccgtcgtcatcgtagagaccaatctcgcggatccagaaaccgccctcattctcgggaataatctgttccgcgataatctgactggtattggccgggtcaacggtcagcaggttcagcggcgcgatgcgtttctggttaatgagcttcgtctgcaacgggtcaggggtcggcaacgtaccattcgcatcaccgacggccatctgcgtcaggttgagtttggtaccgagtgccgccgcgttcgccagccgcgccgcgccctgattggtcagaatggcaaaatattttgcggtcatgcgttcactctcaggttatcaatcaaatggatggccgaggccgggtaa

SEQ ID NO: 170602 - DNA, 306 bp, Enterobacter cloacae
atggaaaaggaattattaacagaaatgcgcatacgtgagattgcatattccccgtatgaccctaacaactgctcttccaaagaagcatctttaattgcaaaagaggtgttgtctctcagagattcacttcgttggatttccattgatgaggtaatgccaaaagatgaaaccacagtcattgtgcgcaatgccggtggtgtgccttggattgctgatgtcgaccatggccaattttatcctgacgaattccctgtagaccgtatgtcaccgggtgaggttactcattggatgaggtttcctgagtga

SEQ ID NO: 170603 - DNA, 270 bp, Enterobacter cloacae
atgagtattcgtatcgaagttagcgacaaatgggttattaccagcgaccaatatcaattcatcctgaatgaaaagaaagtcgttaagtcaggtaaaaaagctggtgaggaatggctcgataccatcggttattacccgaaaattaaccagcttatttccgggctgattcatcaccatattcaaacagcgacaattaattctcttgtggaaatggctgcggaaatagagcgcgtcggtaatttatgtaccgctgcggttagggtggcttaa

SEQ ID NO: 170604 - DNA, 261 bp, Enterobacter cloacae
atgacgttctttgatagtgttctgctctatttttctgcggggaccagtgcgtttctgctcatcgccggcggctgggtaaaaatccgtgactggttcaaagcccacgccctggcgaaagcggaagaggcagctgctgcagcaaaagcagaagccgataaagtggaagagctggttcaggtccgacttaagcaaatccagacagatgcagcagctgcaccggcctcaacagcaacgagtacatccgggccggtggtgggttaa

SEQ ID NO: 170605 - DNA, 531 bp, Enterobacter cloacae
gtgactgccgaaacgcgcgccaccatcatcatattcctgatcctgctggtggcagggcttggattattttttggatcccgctacgcgagtaacagcagtcgtgctgatactgctgatgcgaatgtcctgatgcaggcaaaagtcattcagcagcaggcagccgaaagccaggcattcagtgcgatggccaccggcaccgtggatgataacgccgcggtagacgccaaagcggaaaccaccgtcattgaatatcgcgagatactccgccgtgaaaaaacatgtgattaccctgtgcctgctcatatcgctaacgggctgctcaactacacgaacagtctacgtgccagcgcaatgcacaccgctaccgccggagctgacaaaggcggtaatagcgccacttcccccggccaactgacgtactgtcagaccgttctctggatagaaccgctgttggctggaatcgagaaagctaacaatcaactggccgccatacggcaggccgaacaactcaggcaaggaaaaacaaaatga

SEQ ID NO: 170606 - DNA, 1047 bp, Enterobacter cloacae
atgataatgttaaatttttatagaatggcaaagatgcgtaaatatgtttatttcattttaggctttctaacttttcagctatcactattagcacacgctgaaagcacatttaaaattataaagcaagaattgatcttcccactggggttgataaaagaatctcacgcaagcactattgcagagatgagtaatggaaccatccttgtctcatggtttggtgggacaaaagagggtgatgatgacgtaaagatttggcaatcctccatgactgaatccggatggtcaaaaccgcgcgttgttgcctatggcagtgaggatggcaagccgcttcctacatggaatccagttttattcaatatacataataaaacataccttttctataaagtaggaaaaacacctagcacatgggaaggtaaatatattacttcgaccaacaatgggttaagttggagtaaaaaacaagcattgccaaacggaatttacgggccaataaaaaacaagccaattctttctggaaagaacgttttgttcccttccagtgaggagaatgataagggatggtttgttcacatagaaacaaccagtaacatgaagaattttaataagatagaagtatcgaaacctacaggcacctcagctatacaaccaacgctattaaaattccgtgataatgagataaaaatgtatactcgcagcgatcaaggagtattaatggaatctcagtcatcagatagtggtcactcatggactacgctaagaaaaagcacgataccctcaactaatagtggtgttgacggcatcgtattacgagatggtacagggttaattgtgcataacccagggaaagacagaagcatcttgtctatttccagatctaatgataacgggaaaacatggggtaatgtgttaacgctggaatcacaagagggaaaagagttctcctatcctgcgattatacaaagctcaaatgggaaaatacatataacttatacttacaacagagaatcaatcaaacatataacgttagaagaaaataacaaataa

SEQ ID NO: 170607 - DNA, 189 bp, Enterobacter cloacae
atgaaatacgctattattgaaaataacatcgtaaagaatttggttttatggaacggtaaaggagatttacttggtgtgtcacagcgttataaagtcgatgatgacataactgtaaatatcggagatgaagttagagtcaataatggagtgttagaaattgtaagcaaatatccatttttcccattgtaa

SEQ ID NO: 170608 - DNA, 747 bp, Enterobacter cloacae
atggcggctgctgcggggcagtttatcgcagataagaccaatgaggatgtgaaagatgatggtgatattgcggggctctctgcgcaattagcgagtgcgatagagcaggcagcaacaggacggcttattggtgttcgcacaataacgacatccgggacttatacgccaaccccaggaacgaaaagcatcattgttgaggttcagggggctggtggagggggaggtggggttggtactactaattctaccagtgttgcagttgggtgtggagggggaagtggcgcctacgctaaatcccgtatcgccaatttagactcagcatacaccgtaattattggtgctggtggtgctggtggagtaaatggtaatggagggaatggaggtggcacttcttttggaacgattaccgcaggtggcggatatggtggtggttcaggtaactccgctcctccaattatccagaatgcttctggaattcctacagccactggtgggaatatcataaacttatctggaaataaccctagcataggcatggcattttctgccaacgtcattatttcgggaggaggtgctagtagtatattaggggctggtggtagcccacacggtacagcaggcattggtagagaagctaccggctatggtgctggaggtggtggcgcaaatgcatatcaaaatagcagcgcacaatacaatggtgcatctggtagcagtggggttgttattgtctgggagtatgcataa

SEQ ID NO: 170609 - DNA, 546 bp, Enterobacter cloacae
gtgacaggtaagggactgtcaactattggccctttggatctggcatctctaaatgatgataactttgttattaccattgtttttcctcattcgacggcaaaaaattatccaatggctgtagccattgctgagctttcagatgtaaataaaattggtgagatagcagggaaaaaattccatttagcgtcctttagtaaaacgcctgatcaactttcaagagctgcaaacctatgttatctggtgtatggaattactggcgttcaagcctttattaacggtgagttggttgtaaatgttcaggagttatcatcttctcttgggtgttatgctcgatcactaaaagccaacaatcagcagtcttattgcgaatgcgtttctaactacccgggtaactaccttttaccttgccgtttacttagggggtgggaaggcggagtgtccgataaattgccatttagtttggctgaccaaatacaagcattggcagtaagtaaagggtgtagttggtgccccaatttccacccagaaaagatgaagcgaatttaa

SEQ ID NO: 170610 - DNA, 1491 bp, Enterobacter cloacae
atgcctaacggcttatctgtccagcgcgtcgtaaacgtgcaggtctcgctcgccgttcgtgcggcggccgggcgtaactttggggcgctgctggtgcttggcacgtccagcgtgatcaccgcaccagaggtaatgcgcctctatcagagcattgaaagcgtcgctacggactttggcaccagtgctgaagagtacaaagcagctaacctctacttccagcagtcgccgcagcctcgcgatctgtacatcggcaaactggcccgcacctctgtctctgcctcatcaggcaagctgaccggcgctgtcctctccacggctgaaaaggcgctgtcgaacttcacagcggtgacaactggcgcgctgaagctttcgattaacggaaccgttgtcacgctcaccgcgattaacctctcggcggttaccgaccttgctggcgtcgcgacggcgattaccgcgaagatgacaggtgcaacagtgtcctgggtggctgggtccagccagttcgttatcacctcgaccaccaccggggcggcgtctgcaatcgggatcccgacggctgcgggaaccggcaccgacctggctccgctgctgggcatcgattcggcacataagccaactgtggtaaatggccaggccgcatcgacatccgtcgtgccatcggtgaataccgcgctcagctactccgcagactggtacggtctggtgattgctgatacggcaatgacggatcaggaccacctggacgtttctgcgctgattggcgccgcgagcgactcccgcgtgtatggcgttactaccgcagccgcagcagttctggaatcaaccagcactacggatatcgcctacaagctgaaagccgcaggttacgggcgcaccttctgccagtacagtcaggtgccttacgccgcggcgtcagcgtttggccgggcatttactgtgaacttcctgggcaataacaccactatcaccctgaagttcaagcaggagcccggtatcgctgctgagactattaccgcgcagcaggccgacacgctgaaggccaaaaactgcaacgtgttcgtgcgctacgccaacgacaccgccatcatccaggaaggcgtgatgtgcaacggtgatttcttcgatgagcgccatggcctcgactggctgcagaactacgtccagaacaacctctggaatctgctgtacacctccaccaccaaaatcccacaaaccgaagccggtgtgacccgtctgctttccaacgttgaacagtccatggatcagtccgtcacgaacggtctggtagcggctggcgtgtggaatggtggacctatcggacagctgaattccggcgatacgctgaccaaaggttattacgtgtatgcgcaacctctgtccgaacaggcgcaggccgaccgagaagctcgcaaagcaccgttaatccaggtggcctgtaagctggctggcgcagttcattatgccgatgtgcagatcaacgtggttcgctaa

SEQ ID NO: 170611 - DNA, 543 bp, Enterobacter cloacae
ttgaatgacaccacgcaaccgggttacctgacgccgaccagcccggtgccgcagtacgaccaggcgctagagcgtgaaatcagccggtggattcgtggtgtttctggtctgcctgacggtatggccatgtcgcgcttcaccgatcctcaaccggccatccccgcgctgggaactaactggtgcgggttcaacatttccgactttcaggacgcggccaacccggcatccgtaaccaaagacgacgacaccgattatcaatggcaatacgaaacgctggtggtgctctgctgcttttacggccccgacggtcaggcttacgccaaaacgttccgtagcggcctgtttgtgtcgcagaacaacgccgaactcaaccgggtcggccttaccgtcggcgaggtggggagaatcatcccagcgccagaactcatcaataaccagtggcagcgccgctacgacctgtccgtgaccctccgccgcaaggtggagcgcgagtacggcatcaaatcgatcctctctgctccagttcaatttttcggagaataa

SEQ ID NO: 170612 - DNA, 405 bp, Enterobacter cloacae
atgccaaaaaacagtcttctgccaacaagtgatcagttccgcaccgacttccctgaattttccgacagcaccaaataccccgaaacatccgtaaatttctacctgaatcaggctgattgcctgctcaatcaggatgtgttcggctgccagtttgtttacctcgctgagttgttcacggctcactatgcagaattgcgtgggcgggcaacagctggcgctgctggtggtgtgaatactgctgggagtggcgtcgcatcatccaagtctgtcgataaggtcagcgtcagctatgacaactcgggcaccatcaaccccgatgccggattctggaacaaaaccggatacggccaggagttctactggtggtggtcgatgtcaggcgctggcgggcggcagctgttatga

SEQ ID NO: 170613 - DNA, 183 bp, Enterobacter cloacae
atgaaatgcattgttcatcgcagcgcggtgctgcaatttcctgatggccgccgggttgagttggcgcccggcgtacaggatgtggaagacgaagttacgaagcactgggccttcactgcttacgctgagccaatcgaaatggagactgctaatgccaaaaaacagtcttctgccaacaagtga

SEQ ID NO: 170614 - DNA, 519 bp, Enterobacter cloacae
atggctggtaaagcttatttgacccgcatggcccttggctttgtgggcgcggtaactcgtccgcacgatctgacggcggaagccgcaattctcgatgtcgccaaaccattcccgtcttatgggctggtgggcaagtacgttggcgacaaatttgtccccctgactgatggtgacgcggcggctgatgtcgttggcattttcatgcgtccttatccaaccaccaacccgaccgatgcgcgcgcgctcggcgtgagcgctggttataccggcgatgtgctgaagcgtggctatatctgcgtgagcgtcccggcagcgcaggctaccgccgctaaaaagggcggcaaggtctatgtgcgtgtttccggcgcgacggatgccagcccgcttggttcactcctgctggccccggattctaccgccgccaataccccggaattgaccacagcgaaagttatggggccgggcgataacgatgccacctcgactcatggcaccgctgaaatcgcgttcaatatttaa

SEQ ID NO: 170615 - DNA, 1269 bp, Enterobacter cloacae
atgaaatacttcttcactacccgcctgggcgagacgcgctaccaactggcggacggctccctgctgtgcaaagacgtcccgattgcccgcaccggaacgcagcaatatctttccgaagagcttaatcaggacgatctaatccccgatgccaatgggctaattaccgcatatcgcactgaggacgaggttttctccccggaaacgatggcaagttttgaaggcatggcggtaacgctggatcaccctgaagacggcgaaggcaatatcgttttcgttaacccggcgaacttcgcggaattggcccacggccatatccagaatgtccggcgcggtaccggcgataaagccgacctgctgatcgccgatgtgctggtgaagcgccaggagggcatcgacgcaatcaacgccggaaagaaccaggtcagctgcggatacgacgccaaatacattccagcaggggtgggcaaggcaaaacaaacagaaatcacaggaaaccatctggccatcgttgataaaggtcgggcgggttcccgctgtgcaatcggggattcggccccatcaaaaccaaaggagaagcctgcaatgtcatggctaaagaaagtggctcaggccattaaaacgaaagatgaggatgcatttaacaaactcatcgatgaagcgccggacatgccgtctgatggcatgggttctatccccggagtgaccatcaacatgaacgtgccgtcccaagctaccgcactgccgacagaccagaagactacggtcgatgaagattccgacccggatgacgacaagaaaaccggcgacgaagaggtaccagcctgggcgcaggcgatcattgcccgcctcgataagctggaaggtaaaactggcgactccgacctggatgacgataagcccacctgtgatgaagacgcagaagaagatgcgaaggtgaccggcgatgcggcgtataaacgcaacattatcggcgatgccgaaattatctgcccgggcttccagcctaccagcgacaaaggcctgaagcgtcaggtgctggctcatgccgcgcgcactggtgacagcctgaaggccttcggcattagcgatttcgacaaagctccgaaagccaccatcgatgcggtgtttaaggctgctgtcgagatcagcaaggccaaaaaccacatcaccccgccatctggcaaaccaacaggtgaccgcgcccgcggcccaatgtccccggctgagttgaacaaaatcaacgccgaattctggaaacgcaaccaataa

SEQ ID NO: 170616 - DNA, 1095 bp, Enterobacter cloacae
gtgttctatggcctgtggcgaaatatcgaagagataaagtcgctggagggtgtgagcgttctctggctggaagaggcccatgcgctgacggaataccagtggaagatactggagccaaccatccgtaaggaagggtccgagtgctggtttatcttcaaccccaatctggtgaccgatttcatctggcgaaattttgttgtcgacccgccggaagacacgctgatccgaaaaatcaattacgacgaaaacccattcctgtcagacaccatgatgaaggtgatcgatgcggcccggcgtcgtgaccctgacggtttcaagcacgtctatgaaggtgtgcctgagtcggatgatgatgcagccattatcaaactgtcctggatagaggcagccgtcgatgctcataaaaagctgggcttcgaaccgggagggcggaagcgcgtgggcttcgatgtcgcggacggcggcacggataagtgcgccaacgtgtaccgtcatggctccgtcgtctactgggcggacgagtggaaggctaaagaagatgagctactgaaaagttgccagcggacgtatcaggcggcctttgagcgcgaagccgacatcgtttacgactcaattggtgtcggggcatcagctggagccaagtttggtgaaattaacgaagaccggttgcgcgagagcgcttcatcccgtcggatcagttatcagcggtttaatgccggagcgggtgtccatgaacctgaggacgagtacaacggcatcccgaacaaagactttttcgccaacctgaaagcgcaggcctggtggctggtggccgaccgcttccgaaacacctacaacgccattaacaacggtgaacagtatccggtagatgagctgataagcatcgattcgtcttgcccgttactggagaaactaaagctggaactgactacgccgcaccgcgacttcgaccgcaatggccgggtgatgacggagagtaaaaaggatctggcaaagcgtgacgttccgtctccgaacgttgccgatgcattcatcatggcattcgctccaaccgaatccgcactggatatctgggatgcgctgggccgcgagtag

SEQ ID NO: 170617 - DNA, 807 bp, Enterobacter cloacae
atggcaaaaccggactggggagcgctgcaagaccagttcctcgccgagcatgccaaaacgggtatatcgccgaaagagtggtgcgaagcgcagggactgaattactcaacagctaagcgctatatcaagattgcgaatggtaatgcgaattcgcaaaaaaaaagtgcgaataaaactgcgaattcgcaggcgaaaaaaggtagcaaggccaagggggataagccatcaaagagtgattgcgaatcagcgaaatctgatagccccccggatacgaaaccgattcgtggttcgcgtaccgcgccgccagtaaaccctttcatgccaggtaaccagaccgcgcttaagcacggtgggtatgctcgccggctcttactgaaagatgaagtgatcgaggatgccaaagcgctgacgctggaggatgaactcttccggcttcgcgccaataacctggtggccgccgagaacatagggcgctggataactctgctcgaagacgttgatgttgaagaggtgaatgagcgaaaggcgctgatggataacatacgtgcggcagagaacgccatgatgcgaaacaccgtacgcatcgagtccattaccgggacgctcgccaccgttaacaaaatatttgccgataccgattatcgcgttgccgctactgacaaagtgtcgctggaggctgaccgcctgcgtcgtgatgctggcattgacgatggcaatggagagcgtgatctcaatgacttctacactgacatccaggccgaccctgaatccggtcctgaagaacttctggacgacgcgggcacgtaa

SEQ ID NO: 170618 - DNA, 480 bp, Enterobacter cloacae
atgagcgtgaaacgttattcggtaaatttaagcgtcaacagaagagtagaagttgctgagagcttacatggctctctggtgaaatatcacgactacgccgcacttgaagccagatgcgctgcgctggctgcggaagttcaggcggtgcgatgggctgccgggcaggtttattcagctgggtataatcatgggcaccttaatactgctgatgaactcccctatgcatctgatgaagaacttcttcagagaggaaatgaagtccttatcgagttcaccgacccagaccattcaggcaatgtcaccgacgcttgcctggctgaagtgcgggcgcagggtgtggagatgtttggtcagtggctgagggattcagcagacatatttgacaataactctcgccatgattgggctgaccagaacagagtgagcgcagataaggctggagagttcgccgcccagcttcgccaggaggcagcccaatga

SEQ ID NO: 170619 - DNA, 936 bp, Enterobacter cloacae
atgagttttcttaaaacactaatggattccttaagcgcgatctcaggttctgtagccaatgcctcggagacagagaaaaaaaaggaccgtcgcagtgatgaagaatttaccgatttcaaagacgacagcagccttattaactacctgacaaaacaatatatcgacaacgaactcgcagtcgataaaagcaaaaatcattgggaagttttcagccagcacctgaagccgctcatacactgcctgaaacgctatgaagatgccagcctcagccagcgtgaaacctcacaaaaagagcaggcggcagctatgctggaagccctacagcagggtaaagaactctcggagcacagcggcaacggcacaatcattggaagagatgactatgttaacggcctgaaaaaaatcacgcttagctattgccagaagcacgtacttactatggtcgacttcctggataacgttccggatcacctgtgcgacggaaaaaatgccagtacctcatggcaatcgtttagaaaagatgccagtaaaaagcgctggaaaaactttgatcaggcgtgccgggacaattcgctttatttttctgtgggtaaggtcttgtttgataccacgctgtggggctcagggaagcatgggattatgttagggcgcgatgatattacctgcttaggcggggagcctgacaagttccgtgttttatggagcaacgtaacaagcttgtggcatcacaaaggctacctttacgtgaatgattataaaacggggtttgtcgccaatgatgacgcctgtaaattactggaactgctcgaagagcatttcgataaaatgaaacgttccgaaggaaatttgttattagcgtatctgggttacgaccgctccagccagcaagctattaaaaacgcttacgaagcggatgtgcagcagtttattgaataa

SEQ ID NO: 170620 - DNA, 2313 bp, Enterobacter cloacae; identical to SEQ ID NO: 14381

SEQ ID NO: 170621 - DNA, 180 bp, Enterobacter cloacae
atgaaagcgtggtcactcgaagaactggcgctgctgtggcgacactcaaacgctgaggtcgcagcaatgaccgggcgcagcatcaaagaggttggagatcgtcgcctgcaggcaaatctggagcgcaacgggtgggataagcataaccccgaagcggtgacagaatgggaggcggcatga

SEQ ID NO: 170622 - DNA, 870 bp, Enterobacter cloacae
ttgattagctcggtcactgtaacatataacccagaccttgattgttttaaggcgcaacttcaatctcttcaacagcaattagatacctgtgtagttgttgataatggttcaaaaaatgtaactgacattgaaaatctctgccagcagtttaaatatgatctgattaaattagatactaatcgagggctctcttgcgcgcaaaatattggtattgaaaatgccatatctcatggtgccgagtatttattattactagatcaggacagtgtattaggcgctaattttattagtgctatgagtaaagtgtatactcaatacaacgttggcattcttggtccttctttttatgatccgcacacagacgaattttattggggaactaattatattggtccttttattaaacgtacaccaattcaagaaataactgatgtaacttatgttattgcatctggctctttcttttcttctgaagtttacaaaaacgttggcaagatggaagaagctttgttcgtcgattatattgacgtggaatgggctctgcgtgcaaaaaaacttgggtaccgtgtggcaatgactaatcaggcttctatggcacatacgattggtgattcaaggctgaacctattaggtcgaaaaatatctatccatagctccatgcgacgttactacttggtaagaaacagcttctttatgatcagaaaaccttatattcctgtaggttataaaattcgagaggtttttctgaattttgctcgtgcagcaatatctttaatattaaataaagaaaaaaagaaaacattaatgatgatattttacggtatttccgatgggattgcaggtaggtttggaccatttaaaagaaattag

SEQ ID NO: 170623 - DNA, 702 bp, Enterobacter cloacae
ttggcgggggcacaaaacatcttacttcaaaaaattgtgaattcggattcagacgcagtactcttttttgatcaggattcagaaccaacggatgagtttattgcttgtctaactcaagggcttatgaatcttaagtcgcagggccacaaagttggtgctgttggacctttgttctatgatcccagaacaggaacaactacacccttttcattgattcaggggtgtcgtatcagaagtatccatccagaatccagtgacccgcttaaagtttctttccttatcaattctggaatgctggttcctgttcaaacattaaaagatgtcggtctaatgctcgatgaattattcattgattatattgatattgagtggtgtttgagggccgcaaacgagggttattctttttatgcgataccagatgccaaaatgagtcatacaattggagactctcgaaaggtttttctgggaagagaagtgagcatacatagtccattaagacgctactatcttgcaagaaattctatctatatgatgagattatcatatatccctcttggttataaatttagagagacgattttttctacaattcgtactttaatgtttgttgcctgtgtggataaaaaatgtacatatataaaatatatattccgtggatggaaagatggtattcggaaaaaatatgggaaatatgctggttaa

SEQ ID NO: 170624 - DNA, 210 bp, Enterobacter cloacae
atgcagagcaggctaaacaggctttctatgctgcatatccagtatcatccgcagaacctgcacaggcacagccgcagcagaaagctcagccacaggagcaaggtggcttcttgtctgaccttggtaatgctgcagcggaaacgggtcgaggtctgcttcaggctggcgttaacctggcaaacattccagcgtcaatggctgatgctgtag

SEQ ID NO: 170625 - DNA, 765 bp, Enterobacter cloacae
  misc_feature (742)..(751): n is a, c, g, or t
atgaatgatatttcaataactgattatctcgggcctggggtgtatttattacaaaattacccaaaagaaactgagggcctgattgcagagaagggttataaggtgcacaactgcgctgatctggcgcagtgtaaagatattcttaaccgcaataaagttaatttccttttaaccaatgataaagataataattttaatgaatatgccaagattgtcagaaccgctgcaagacagcttgtaaataaaatcgttattaatatctttgtagaaaagggaaacggtcagagtttccaggattttattaatataactgacaatcttggttattcgatagacactgtattttatttgctcaatcctggctatgatgaacaatttcgggatgatcaaagcctaaagatagttttgagttatagacgtcagtcagtagtttcgacagacaaaaatatcttagaaacgactatttttgaaaaaaaacttgtaaatacttttccctacatacgtcctggggatcgagtacttgtaatcattaagaataaaaattcgataacaaacattaaaaatattattgcagaacaaaccaaggcatctgaagttgaaatttactcattggatgaaattaaaagtgttcagctaaatggcaatggctaccattttctcattactgataaatatgccgatgatggactaaataatgcactcaaagtcattatatcttacctagtgcccgctggcaggtacnnnnnnnnnnggcaggtacgttag

SEQ ID NO: 170626 - DNA, 1500 bp, Enterobacter cloacae
atgaatcactcgcattgctttgggttaaaattatcaagttgcgataggaaattcataattatactagcattattgatgctagtatatattctgccaattattcttgcagatagattgtatattgatgacattctcagatctcaacaggggtacaagaactggggaataaatgggcgtcctcttgcagacattctcatggcttacttcaattttactgaaggggttattgcagattcatcgccattaacattactattttcttctgttatatttctattgtgctctttcgtttattatcgaaaaaaccttagttcttatggtttcatgtttggtgcattggcaatgtttatggtttttgccaatcctttcatgttagagaatctttcttataagtttgatgttttaccaatgttgacatcaatatctgttttgcttatcccatattcagtcgataggtcaaaggtttacggtttcttagccggaattctatgcatagtatcttcactttcactttaccaagcatccattggttttttttgcactcttgccttagtagaaattataacaacatatagagataggtcttatagtgctatatggtatattaccgacatcataattcgcgttacgcaactcattataggttatgcaatatatagcaagatatcatcatattttataagcggagaatataatattgaacactctcagattgttagtttagataagggtggcatatctttattttattccaatgcatcaacctattttgataagatacatcaagctttcaacgaaaccacttccgtgacttacttaattgtagctatttctatgatgtgttgcatttatatttcactatcaagaagcgataaagtacctggaaaaatttactcaagagtattactggcattttgtttaatattatcaccagcccttgcattggcattttcatttattcatttatctatcctcaaataccctgtttttgctgatagggttttaatatcatttggtggggcgattcttttttactcgatatcaatggcaacacttgttaaatggaaaagtttgtcgtccatgcttatgattcctgtggttttcttttcgatgtattactcatatgtatacggaaacgccatgaaatatcagaggcagtatgatgataggctatctcatgagatcgcaaccgttatctctaatactgacacagctgggtcgcttccagtatatacatatggaagtcagccttcctcaatccaaagaagcaatgctataaataggttcccatctttaaatacattggttcctttatactatgttgatggatggtggggcacgttgctgataaacatgtatggtatacgaaataaagtgtctggcttatacgatgtaacacaggtttgctcaatgaacgctgtatctaaaaatcaatcatattcaatatacaaagatgcatcaaaaattataattgacttctcgaagtataattgcaaatag

SEQ ID NO: 170627 - DNA, 1821 bp, Enterobacter cloacae
atgacagatatcaccgcaaacgttgtggtaactaacccgcgcccaatcttcactgactcgcgtacatttcgcccggtagctaacgggcgtatctacattggcctgattgacacagaccctaccattccaacgaatcagatccccgtttacattgagaatgaggatggcacgcatgttcaaattgcgcagcctctggtagtcaatgccgcaggtaagattgtatatggcggccaactagtgaaggttgtgactgtacaaggtcatagcatggctatctatgatgcctatggctcgcaggttgactacattgccaacgtattaaaatacgaccctgacaggctgcgctcagacctacagtcagatacgttaacaggtcttgttaatgaccatgttgttttcgttaagcagccaggggcagggtcggtgacaagaacccagcatgataagaatgctgagtatcttagcgtaacagactttggagctattggagatggtattgcagatgattcaagtgcatttaacgctgcaattcaggctgcaaagttatctggtggaagaggaatggaattgcatgttccagccccagcagttgcatacaaagttaaaaatgtaaacatcgactgtgctatacatcttattggatcatcaaaatcatcttctttagtgaagccagttagtggaggcgatacctgttttttgattaattcagattttgtcaccatgtcaggcattacaatccaggataacggaagaactagcctctcaattgggatacagataaataaagggtatatgactctttataattgctacatagccctaataggcacatgcatatccttcgctaaaaatagtggagagcacaacatgtataatgtcaggctagctgaaagcaagtggggtttaattatgccgggagggcaagttaacacaagattgaatggctttgtgataggcaatgtggatggagctataaaggtacgagaaagtctagatgtgtcaaatcatgctccaacggaaggtcttgtgtttactgactgcttaatagctggatgcgggaactcatccgaaagcatccctgctgtagatattcttggaacgagatggacatggtttaataacacgatgattgacttatcaaagtttgttgctttaagcatagagaatgccgagtcagtcaagattacaggtggctatctttcatcaaatcaatcagctaactcaccatgcctgttaataagaggtaaaagcacactttttgatgctgttaacctaaccgttgctgacagtcgtagctggggagtgaaaattgaaaaaacggtagatggatcccctgatggagcaaggttcacaaacctaacagctcaaaataatgatataaacccagcacaacagggtgatttaataattgattctgttaaaaatgtatgcgcatacaacagtaagtttgcaagccaaaaaacaacaggcatttccgtgctggacaactccagtaccggctcctctctaaatcttgatggatgttcaatgagtgggcaggcgtatgtaggaggcgcatcttgtattataaaaaataggaatagtccaacacaccctgaggagcaggtaggagttgtaaccattcctaacggcgcaaatactgttagcactccactaaaaatagtaccttttgagtccggaaagatcgttggagtttctgcatctccagcatcaggtaatgatgtcatcacatcaggcgttcagggcgccaacattgtttttaatcgagtaaccactggcgcagcaacaactgtttcgttctatgcgttttccactaagtag

SEQ ID NO: 170628 - DNA, 957 bp, Enterobacter cloacae; identical to SEQ ID NO: 146908

SEQ ID NO: 170629 - DNA, 684 bp, Enterobacter cloacae; identical to SEQ ID NO: 140038

SEQ ID NO: 170630 - DNA, 228 bp, Enterobacter cloacae
atggacatctttcgcttcagcgggcgaaagaggggcaatatttgctttttgaaaaacagggtaaaccactcagtattgcacccgttccggggagccaaccccttcgttacgcgctgtggacgactttcgcagacaaatcacatcacctactttcacagctttccgtatgccgccaggtgtctggttctgacccgcttgatacagccgaccggatccgtaagtatctga

SEQ ID NO: 170631 - DNA, 1263 bp, Enterobacter cloacae
atgtccgaatgtcaggctgctcgcgtagatgatgagattgcacatacagcctcaaaaggctggatgattgcaggattggtgggcggggccattctgggcgcagctgccgttgtcgtcaccggagggaccgcgctggttgctgtttctgccgttgcggctggggcatgcgctgcgggtgggttggctgagctcctcggcagtatgtcatgggctccacgccatactaccggtacgctaaaagaaggttcacccaatgtttttatcaacagccgaaaggcgatccgcgctcacctgtcagccggagagtgtgatgagcacagcggtagcctgcaacgggttgcggaaggttcgataaaagtttacatcaacaactttcccgcctctcgcacaggcgataaattgacatgcagcgctgagattagtcagggatcgcgtaatgttattatcggtggaagcaaagttcagaccgatgaaataagtcctgaaatcccggaatgggtgaactggacgatgctcgccgttggtgccggagccatggcggtgctggccagtccggcaatcgcacttctgagtaccctcggtgcgatgggcggtgggacagtcggtagttatgcggggggaatgctgtttggcgaaggtagcgacggtcagaaatgggggatgctgatcggctcggttattggcggcggggctggcatgaaaggcggggcaaggtttgatgcgtggcgggctggtaagcctgttctcgaaccggttaagccaaatatttcggcccgaagagctgaacttaatgaaaaatttggacgcacgggcgatcttaatagagatattaatatccgtgcaaatcaaaaaattgttgatgattttatgcgttctcagggtgttgaagaaagtaaaataccagcttatcgcagcggtatagatcttgaacagagagtgacaattgaaacaatcaataaaggcaaaatagcttatcagaatcaatccccagggaattggcaaggaaactggtattctcttgacgaatcgacccctgccacaaaactaggcattaacccagagggacaggtcagggatacggggttaattgttcctaaagaagtaaaagcttatcaagcgcaacaaaaagttgagatgcttcgaagtagtgccacaccagccttggacacctggtctgtaccagacaaacctttccagacagaaggcggtgggatacaatggtttaccactaagcgtgatatttggactccatataatgaataa

SEQ ID NO: 170632 - DNA, 714 bp, Enterobacter cloacae
atggtggcaagcattcaagaggttgcgagcaatgcacagcatgctgcagatgcggccggaagagcagacactgagacggcatctggccagcgtctggtagcccacacaagccagtcaatcactgcccttgaaggtgaaattaggcaagccactcaggttattcatgagcttgaaggtcaaagtaacgagatatcaaaagttcttgacgttatacgagggatcgccgagcaaacgaatttgttggcactcaacgcagcaattgaggccgcgcgtgctggtgagcaggggcgtggttttgctgttgtcgccgatgaggttcgcagtcttgctgctcgcacacagcaatcgacaacggatattcaaagcatgatcagcgctctacaagagcgagcgcaatccgctgttacagtcatggagcaaagtagtcggcaagcgcacacgagtgtagctcacgcagaggaagcagctacagctcttgatggaattggccaacgcgttaacgaaattaccgacatgaacgcgcaaatagcgactgcggtcgagcagcagggagcagtaagtgaagacataaaccgcagtattatcaatatacgcgatgctgctgataccaatgtacagaccgggcagaataatttgcaaagtgcgaaatctgtcgctcagttaactagcgctctgagcgaactggcaaaacagttttgggaaaaacgaggataa

SEQ ID NO: 170633 - DNA, 177 bp, Enterobacter cloacae
atgaaaaaagaggatagatcctttattatatggggcagccttagctatcgggggggtgtgctacgctgcaatgggagtgttaggcttagggtagttgcagcggtcagtagcctggccgtcaatacacctgacaaaacaagagtttcgccctttggcagccagagccaagggcggtag

SEQ ID NO: 170634 - DNA, 972 bp, Enterobacter cloacae
atgcagcattgttccagaatccttgaacctgccatttatggacgaaaagtaatcactgtaaacaatgcagaatacgttctggatgattattaccctgcgatcatcagcaaagatgaatatgaagcgttaaagctccaagttggaaacaaaggatttgccccgaatcgcgagagtaatccagaaataccattactttccggtattggtattttgcactgtgcgcactgctcatgttacatggttaaggctaaatcaacccttaaaaaccatccacatgcttaccgttaccaatgtgcatccagagatttacatcaagattgtaataagtggggattcagggcaagcacccttgaaaggacgattttacaactaatagccgatagaatattcttacagacgaaatatcaaccatctggtttagaagggaaaatagcggacatacaatcgcaaattgagaactatgtattggctataggttcagctaaaagccctgagatcattaatagcctcacttcgcaaattgatcaactagaacaagaaaaacaaagtctgatagtggaaaaaagactatacgatgaatcaatcgtgcaaatgaacactgaaggttgggacaagttcaggaagtttgacattgatgacgcacttaaccctttacgcacaaaaataagagcaaacattaagaccgttattatgcgcgtagattgctccagaatagataagaaacacaacttgtttaccatcacataccgcgatcagcataaacagcgtatcgttatcgaaaacaactcaggctggaagaagggtaagatttatgttgaagcgcagactatcaacgatattcaaattcttgaatctgaaggtttgatactgcatgaccatattgacatattgatcaaccgagacaagttcatgacggaagcgaaaaaacgactagatcatccccgaacactgatcgatgaactgacggaataa

SEQ ID NO: 170635 - DNA, 234 bp, Enterobacter cloacae
atggggaatatctatttcagcccaacgaccgttggtttttatgtttctgaacaagagcgacctgatgatgcggttgaagtctcgccagaggtggaggcatttttgagggagtgtgttatctggggagcggatacattcaacgtagagcgagatacagcaaaagtgacatacccgccggagcttaacgagtacgtcagtcagtataatgcgcctactcattatccagaggagtaa

SEQ ID NO: 170636 - DNA, 168 bp, Enterobacter cloacae
atgtcactattccgcagaggtgaaacctggtacgccagcttcacattaccggacggcaaaagatttaagcagtctcttgggacaaaggacaaaaggcaggccacggagcttcatgacaagctaaaggccgaaacatggagggtgagtaaattaggagaaaccccctga

SEQ ID NO: 170637 - DNA, 327 bp, Enterobacter cloacae
atgacatttcccgtagagaaagtccgggcagattttccggtactgacccgtgaagtgaacggtctgccgctggcctatctcgacagtgcggccagcgcgcaaaaaccgaatcaggtggtggatgcggaagccgagttttaccgccacggttatgcggcggtacatcgtgggatccacaccctgagcgccgaggcgacccagcgcatggaaaacgtgcgcacgcaggttgcagccttcctcaacgcgcgttcgccggaagagctggtgttcgtgcgcggcaccaccgaagggatcaacctggtggctaacagctggggcaatgcgtag

SEQ ID NO: 170638 - DNA, 318 bp, Enterobacter cloacae
atgatcagctatgtttacatcgctgctaaagacgcttctactattgagattttgatcgtaggtttatgtatattttcatttatctccgttggccaatattcaattattgaatcgacattgataaatcttgtcggaaaagaaaaactatcattattattaaatgctattacgtttacaatttttatcattatgtattacgtaatgcataaatttatttcgttcccacctttaatagctattgttattttaagtggtacagtgcttatggcttactatgtaagatattttattatgaagaaagtattggcggaggtctaa

SEQ ID NO: 170639 - DNA, 837 bp, Enterobacter cloacae
atgaatagaataaacttaattttctcaatgattgttagcgataaattttggtcactgctttttacggttttgcctggtgtaaatagagtggtgttgttctttatcgtatcgcacgtagttacaacacatacttttgcgcttttctcttccgtatattctatcgctgttatcatatcaatgattggtggagttggtgttggaacagtaatattaaaaaataataccgaatttggtatgctgggcttcgttaaagctacaataattggtttcgtgactagcctatgctcagcgctaattattttatttttctttaaagatcttttatcatcaagttggctaggtttaattattttatctgttggtttgattatgaatcaaatactcagatatatgatcgtcctgaacaaaaactttaaaataggtgcattaaacgaattagtccttatgttgccatctttaatttttttgatgatgagtcgaatggacttgatttctattttaggaataatgtatatcatacaatcgttactcattgttctaatttttttcaagaattcaaataaccctaaactgagttccttcaaaggaactttttatataggtaactccaatcttatctcttcaggtattctatatttcctaccaatgattgcgttttcattgtctggagcggagataacgtcaatcatctccctaatggttacagctgctgggataattactgtctttccaagagctatgctaaatttgaaagtaaagaactttcaaaaaacagatactatatataatgatgttgggattcgttgctatgatcagctatgtttacatcgctgctaa

SEQ ID NO: 170640 - DNA, 480 bp, Enterobacter cloacae
  misc_feature (429)..(438): n is a, c, g, or t
atggatgtacttaaaaagttgaatttattatcattggatggaaatttaaagagaaatgtattctacgcacatgtttatgctaagtgccagttatttggggagggttcatcgggacttataccaacatccctaactgattatcattactgggagcctatactcaaagacaaatgttgtcagcatcccacaaagcatcttttgctttgttattgtttgttaaatacttgctggccaacgtatgcaggaagtcgtactaataaaaagaaagaaatctttaaaagtcataagaaatacagttttcatatagttgaaaataatactagtgttagcaaccttgggaaggaatttagtcgcagcagatgttacattaaaacacttatttataaaaaatacctgagggcgtttaagcgaaacacaaaaattaatatnnnnnnnnnnttaatatattcactgaattgcttatcaagtctatggctgtaa

SEQ ID NO: 170641 - DNA, 582 bp, Enterobacter cloacae
atgaaggttcctaaacttccctttctttttatttctgtcgtatgtttttgtacactggctaatgaaggagatgctccagcatttaaagagcataatgtgttgttaagccatggcccatttaagacaaagatacacttaacatatgagcagctaaaaaagtctgaaacttggaaaaacataatgcagaaacagctcaccgagaaagctaattttgcagggcactatcgcctatacataagcgagaatggtgaattacctaaagattgcggtgttaatggctgggtttgcggatgggtagttgataaaataactggagctgtagtttctgagctgccagcatttaatggcaatactaagtattactccactattgataatggcactccttctcctgccttattttctgcggaattttatcccaacagcaatttaatttggattagtggtgaaaacatccccgaaagtaaaatcggaaacatatcgctaggtgataaaaaatgctcaaacagcgcttacttattcaataacaactcattccataatgtttttgagggtgagtgtgaaatagatactggtggctaa

SEQ ID NO: 170642 - DNA, 621 bp, Enterobacter cloacae
atgggatgcaataaaaaatcaaacaaatttttgctctttgtgtcatgtatgcttttgtcgtttggagcgtactcacaagacagttctaatcctcagttttctgactacctggttcccgtaagcaacggtccatttgaaaggaatattcactttaataaagagcaggaaaattactcgtcacagtggaaaaatgcagtcgaagaggaattaaaaaagcctgttaattttgcagggcactttagaatctataccgcctttggcggtcagggtaaagaatgccttcgtgataattgggtgtgtggttgggtcattgataaaactacaggtgaagttgtttcgacattaccaacgtctcctgaaggtggtaatagctatgctgaagctgttgataatggaacatcagacggcctcaaattcaaagtaattgcctccaaagatcgcacatcattaaccattgcaggacgcgccgttaacgcgccattacgtgatgcgaacgggtttttttcagtaccagagtgcagatcgataaaatacaacttcgacgggaaggaatataccataattaaagaggatgataacggttgtaatctttcaaaagaaattgagatttatggtaaataa

SEQ ID NO: 170643 - DNA, 246 bp, Enterobacter cloacae
atgtttcttcaatcaaaccttgatacctattgcatcacatttaaatcagaaagtgtgtgtcataattcctgtaacttcgatgtaaatgcaactttcgtgaatttcgaaggaacgccacatggctgttatccgccacgtcagtattcagaattctcggtccattgggctacccccacgcccgtagataaattgtgtcttcacgacgaggcctattcgaaggcctcaggactgacgccgccgagatga

SEQ ID NO: 170644 - DNA, 561 bp, Enterobacter cloacae
atgaatagtcgagtaaccaaccctgagtcgtacatattttctgcaatcatttatattgggaaggataacttcaccagtaacgatgtagcgaaaattcttatcgagcgattttcatttcaaaaaactttttttaaggcaaaagcttttacttataaccagattcaacgtctggttagaaatggattattaagtaaagtacgaaaagtaggcgtatatcaatattcatactcaagaacatctgaatttaatgttgcaatagaaagtgtggatttaattgaggcaacatcaagttcttcttgtcaacttgtttcaaatgcaaccagcaatgaaaacagcaacgtaaacattaaaatagagtctcttattgaaaaatacagcagtgagttggcaaaagtaacaggagcaaaggagatttatgaagaattaatcattgctgtgccgagtagagaggatgaatttaggaaactttcctttgaacaagaaaaaaaacacattaagataaatgaaaaaataaacacattaattagtatcgttaatgaatctgtttcgataaagcaatga

SEQ ID NO: 170645 - DNA, 285 bp, Enterobacter cloacae
atggatgccttgttgccgttcacgtcagtctgcaaactcagcagcgaacgcgccgttgcctccttctcgttgacgatcacctcatcaatgcgatccagctgcgcgctgttaccggcgaccgatgccgacagtgttttgcgcgcggccacctgcgccagcccgttctggataatggcaatggccgagttcttcaccccgctcgtcatgccgtccatagacacgctgatgttgtcgattcgctggcccagtgcggtatcagccgtcgcaacggtctgctcaagctga

SEQ ID NO: 170646 - DNA, 1008 bp, Enterobacter cloacae
atgagcaatagtaagaattattacactgaggccgtaaaggttgttgatttgcctgtgtatttggatgaacaacatatcaattataaacttgtttttatggaccaaataggaatgcctcttacggggaagctggactcatcaaaaacgatcgcgtcaattggtattaatgataagcacgttaaagtaatgctaatcatttacattcagggcattgaacttaagaaaataaatttaagcgtttttgatgatgtaaaaacaaaagaaatatctttaaaatctactgtatcagaaacctgtgccgaacaagataatacgtgttcatttaacttaaagttaaatatatacgccataaacaagcagagcaatcaggccattttactgggcctgagtgagattgaaaaaattgcgaaagaacggaacttaacgcttgggtattatataaaaagaagatctggtggtgtatctaaaacatcgaaggaaacaataaataagataaacaactcgagtgaaattgccaataaatatattaagcatgcattagagtgtttaaaaaatgaaagtaatgcaggtaagggggattattcaagactaatatacagagatttaatgatgaaaacatttgaatatttcctaaagaactcaaaagatcctgattcggttgttgatgaaattgtcagtatatttggtacaaatatggaggatagttacatgaggtcagaactactggccttttatcatatctatgaggcgcttattcctaaaacacacacaagcccaggatacgacaaaattcaacattttacatatagtgcggggaaaagttataatacaatgcaaattataacagatacagctcaatatgcgggggaagcatatgatttaataaatggagggagctgggatgacaccaaatcagacatggaggctaataacttagggcaagcctacggaacgaggctgtatgaaaaataccatccagtgagagctgcgataagaaatatggattga

SEQ ID NO: 170647 - DNA, 495 bp, Enterobacter cloacae
atgagatttttaatttatatttcattgcttacacttcttagcattgttttgttttattcgttaaatgtaggctattatcgtggggagttatattattataaccttgttaatgagggagggctatcaagttatttgagttctttatttcgatttgatttaatagttgccattttaaacttttccttattggttttgagctgtatttttttgtcaaaaaataagcataataatttcaagtttagattttacaccctgactggttattttctttttaatttcacaaatagccttgtgttcgcaataaaaaattacatacgaaactattatgacgtttttgagttgaatgtttttgttgttttgttaaaaacatatggtggggttgtcaatctagtctatattactccattaatattatccggtgctatgatgctactttttatgttatttgcaaaaaagggagtgattaaatatatcgaacgaaatgatatcttttaa

SEQ ID NO: 170648 - DNA, 1794 bp, Enterobacter cloacae
atggacgacgtgcgcggtctggatacgtacatactggccgacagccagcttaactaccagtttgatgtgcagttgccgtaccgcgaaccatcaggcctgtttgacggcgcggcagaatcggtctgggatgtgcggacctggcacaacatcgccaccggcaccgtcgccacgcgggattacaactaccggagagcctctacgccgatgaatgcggcggtcagcgtgcgtaacgatgcggtcaccaccggggagcattaccgctacgcggcaccttatcgtgaagcgggcgatgacactgaccccgagccggaaaccgaaaccggcgcgttttatgcccggcttcatcacgagcgggaactcaataaatcagcccgcattcacctgttcagcaacgcctcacaccttgcgcccgggcaggtgctggagccgcagggggatgttatctcggccctgaaggaaggcgttatcctcaccctggtgacctaccggggagcccgtgattcccgcctgcacgtgtcggtgtggggcatgccctacaccgaacgttactgtttccgcccggcggaaatcccgcgtccggaaattcacggcacgcttccggcgcggattgagagcagagaaaagaacgatatctacgctcagcttgacgggcaggggcgctaccgggtgaagccggacttcgaccgggaggggacggagccgggttacggctatctgtggctgcggatggcgaagccttatgccggtgaaacgatgggctggcatacgccgctcaccgacgggaccgaagtggcgattgcgtacagctacggcgatattgacctgccgtacatcgcgtatgcgctgcacgactctgagcatccggaccccgtcacccgtgacaaccacacccgcaacgtgctttgcaccccggcgaacaacaagctgcggatggaagacaggcgtggtgaggagcacatcaagctcgccacggagtacggtaagacgcagctcaacagcggacatctggtggacagccagggacagcgtcgcggtcagggtgccgaactgcgcaccgatgaacacggcgttatccgtgccgggaaggggctgttggttgctacggctgtgcagtcgaaagcgcagggtgaggccctggacagggatgcggcgctgaaggaaatcgacaggcttaatcagcaactgcaacagctggaaatggcggcagagcaggcgcaggcgctgaaagcggatgttgacagccagatacggatgttcgaacagcggctgaaaccgctcaatgaggcgctgctgatgtccgccccggaagggatggcgctgaccagcggtgagcatctgcaaattgccgccagcaaaaacgtcgccattaatgctggcggagatatcagcacaggcgctatggacaatctgaccctgcttaccggagagaagctggggctctttgcccgtaccggtcagctgagcgtcaagtcaggggaagggccggtggaggtccaggcgcagaacgccagtctgcggctgtttgcggagaaaaagttgacgatgagttcggcaagtgacatctcgtttgccgggaaaaagcgtatcacgcttatcggcggcgggagctatctgcggctggaggcagggaagattgagtacggtacgacagcgatgtatttgcgcaaagtgaaaaggacgatgacggcaggggcaaacgacctaccatttgcgtcattgaagcagatggcaatgatcactcagtattacgacagaacgttaagtttctcttcaaaaattcaactatcgtgttga

SEQ ID NO: 170649 - DNA, 216 bp, Enterobacter cloacae
atgcatagctttataaaaaaaacgtgctgcttcatgttgatatcaattttcttcttttgcgttttgctaatggtgattaagatcatggcttatcaaaacgcaatcaagaatgattctatatggagtcgagataataaatgcgaactgactacttatattcctgactatcgaccatattgtggtattgggagagtattacggttgttttccaattaa

SEQ ID NO: 170650 - DNA, 501 bp, Enterobacter cloacae
atgatattcgaatatataaagcaacattcagaggtaatcatttccggcttttcagtcgccgcggccatcgcctctgcctgggctgctattgcaagcaggcagacggcagcaaaagcactaaaaatccaaagcagaatgagcctgtatgagcttctaaaatccactgccgaaaaagctaattctttctcaaagggcaagagaggtgcagagtgggatttctatgacgctgccaatatagttcgatgccttaacctggcaatggagagcataaaagatcataccgaaaatgatgacaagcttgatataagagagctaaaacaattcttcttaagccaattgaatatggagctctttgaagagctcaactatcaagtcggaccggatgctttcttccggggagaggagcccaacagcatgagcagcgatatttacgcgcaatggataaatgctatttcattctttaacttcatggttgtaacagatgaggatcttgctgattaa

SEQ ID NO: 170651 - DNA, 321 bp, Enterobacter cloacae
atgtttgctactgatatctcactgaaatacggcactcatcagccagagacgattctggaaacaatgccgattgaagaagcctccgaaatcatcaaggagaagcttcgtgatgaagtgcgccaggagctcgagtgcgagtatggcgatcgcctttatgaggctgaagaagaggcatcaaactgggaaagcagagctgacgactatgaattcgatgcaacttgcctggctaaggccataagagaggcttttgaatctgccaactttgaagatgcaaaggtgatcctccagcgagcgatgcacgaccacaaagactatttctga

SEQ ID NO: 170652 - DNA, 159 bp, Enterobacter cloacae
atgacagtcacccacaacggcaagcagtacaccgccaaaaagctcaacgataacgagtggcagatgacgtcggtatcggcaccgcgggaaaaactggtgctgaaccgctggcagatgaagctggctggcctcctggaacaggttgaggtgaaggtatga

SEQ ID NO: 170653 - DNA, 321 bp, Enterobacter cloacae; identical to SEQ ID NO: 170651

SEQ ID NO: 170654 - DNA, 321 bp, Enterobacter cloacae
atgtttgctactgacatctcactgaaatacggcactcatcagccagagacgattctggaaacaatgccgattgaagaagcctccgaaatcatcaaggagaagcttcgtgatgaagtgcgccaggaactcgagtgcgagtatggcgatcgcctttatgaggctgaagaagaggcatcaaactgggaaagcagagctgacgactacgaaagtgatgcaacttgcctggctaaagccataagagaggcttttgaatctgcgagctttgaagatgcgaagctgattctcgagcgagccatgcgtgaccacaaagactatttctga

SEQ ID NO: 170655 - DNA, 366 bp, Enterobacter cloacae; identical to SEQ ID NO: 121650

SEQ ID NO: 170656 - DNA, 177 bp, Enterobacter cloacae
atggcaaagacgaatgaaacgctcgtcgggttcgctcatatgccagacaggcgcaccgacgaatttaccgtgtggccattcagctataagcgcatcgttctcttcgctggttccaccgataacatcagggataactgcaaatgcgaaacgagggtgattcatccactccttaactaa

SEQ ID NO: 170657 - DNA, 513 bp, Enterobacter cloacae
atgaataaaaaaatttggcttatggaaggcctttcctcacagcgagatattattcatgggatcaaattattttctaagaaatataatcttggcattatagttgttgcctcccaccgttacgaaagaaatgaaattctctcagttgcggattattctttaactgaacctgaagagcctcaaaaacgccttctgtttattcaggaaactatccaaaaccacggcatccatcatattcatacgggccgtaacagccagtggtttgaagaacaccgcaaagctattgaatcgaccggagccacccttactaccggtgcaaggggcgtcgactggctaactctggctgacgaaaaagttaattttgcccgtttcatggagcaaaatgggctcgccgtcgtgccatcctggcgcgtgaataccctcgctgagttaaaggcgcatcttctggctccgcctttttctgacagcccggtatgcgtgaagccggtgacgggtatctatggcatggggttctag

SEQ ID NO: 170658 - DNA, 1764 bp, Enterobacter cloacae
atggaagatttaaccctgcgttattttgacgccgaaatgcgctatcttcgcgaggcagcaaaagagtttgcgcagactcacccagaccgggcggcaatgctcgatctgaacaaagcaggaacccctgacccatatgttgaacgcctgttagaaggctttgccttttccgtcggacgtttacgcgaaaaaatagatgatgacctgccggaactgaccgaagggctggttagcatgttgtggccgcactacatgcgcaccatcccgtccctgtccgtggtggcgtttagccctaacgtaccttcgatgaaaatgggtgaaataatacttgccgggctggaggttacgtcccgtcctgtagggccaaaaaacaccgtttgccgctaccggaccacccgcgacatagcgttaaatccattgatgttgtcagatgtgacgatgacgacagagccagacgggcgttcagccctgcgggtgcgttttgcctgtagtccgcaggcagactggtcacaagtgaacctgcggcgtctgccactgtatctcggagaggacagtgtcatgggcaccgccttgcatctctggttaacaaagcatcaggtggcactgtatctgcgtctgccaggacagacagaccgaataacgctcgacgcctttttctctcctggcggttttggtgaagaagataggctgtggccaaagggcgagggcgcctttagcggttaccagcttctgctggagtatttcacatttcgtgaaaaatttatgttcgtccatcttaacggactggagaatatcactattcccgcaggaacgacgcacttcgatatggaagttgtgttcagtaaggtctggcagagcgatttacctgtgaccagcgaggccttgcgcttgcactgcgtgccggtgataaacctcttcaccctggaagccgatccgctgaccatcagcgggctggaaagcgaatatctgctccgtccgaagcgtcttcaggacggacacactgaaatttactctgtcgacagcgtgaccggatccggacgtaccgggaatgcgcgctacgtacctttcaccagttttcgccatcaaggcggcatgatgcgccgtcacgcgccggaacactattaccatacccgtgtgaagcggggggtcaccggaatgcacgacacctggctaattctgggaggcaagcagtgggaggctgacagggcgctggagcgggaaaccgtatcgctgcgtatcaccggcacaaatggtcagttgccgcgccgggcgctacagagcacgctgctggaccgctgcgaacaggtcacggaaaatccgctcactgtgcgcaatctttgtaagccgacgctaccagcgtatccgcctgctgaagatcgctttcactggcgagtcatgagccatctaggtacccgctttatcaatatgatgagtagtgcggaagttcttcgcgggacgctgtcactttataactggcgggaagatgaactgaataatcgtcgactcgatgccatcgtggatgtcagacatcaccgaattcagcgcttcgaagaaggttttctgatccgcggtatagatattgaagtgatactcgatagcagcggtttcaccggcgagggggatatccatctctttggggagatgcttaaccgctttttcgccctgtatgccgacatgaatcagtttaatcagctcacactgattgttcagccagaagggaaatgtatccggtggaaagagaatcacaatccgcgtctgccaggatga

SEQ ID NO: 170659 - DNA, 1158 bp, Enterobacter cloacae
atgggctggaaaagagcgatatcattaacaacggagttgtccccgaaaccgtctttaatgtggtggtttctgaccggtgcgctgatggtaatcatcggggcgttattattcatgctctacgcctcgggtatggtaaaaggactgtcggcactcaatatctggcaggtatccctcacgccttcagggatttggttgcttcttttatgtctgagaggatggttgtggggtaaagaaattgataagcatcattttcaaaaaaaagaagctgagcttgctcaaaaacaatgggaagcttgggctgaaagatatctggcgattataactagttgtattttattacccgataaaatcactgcgggatgccttcataataaactcgagcagtattacggtcttaccagaagaataaactatttaagtgacagtgatcatttggccgataagtccctgcacatactacttaaaagtacgatggatgtgtttcgccagttgcctgatgattttcctgtaacagtaacgctcatctccgatctgcctacagctggactgaatgagtcctttagctccgtctggagctccctatttcctcagcgcgctgtacctgaaaacataaccataacgcctgctctctcgatggaaagggccgaaaagcgtctgaagcaaccgtctctgacggttgacctcatcctggtgatgcagttgttcggcggcgatgcgtattcagatgggctggcctcgttgctgctgaccagtgacgatgtgacacaaaaataccgactcccacataaggcccgcctgttgcggccaatgccactggaactggacaggtttgaggacgatttcacgcaattcctcgtaactcagacagttgccagccgtgccgcccgcgttctgggtgacagttgcaggtgggaagaggttgccgcaccgctgatgactatcggaaacgtacacggagctcagtgggatcctgccgagcgtatgctgctggaaaaatggtgcggtattccggggccggcggccccatggttgctgaccgctctggcggccgatctggtcacccttggtaataactctcttttgacgttgttctcctccggagaggaacgctatatcagtaccgtcacaacaggaagtgaagatgaatacaacgggtaa

SEQ ID NO: 170660 - DNA, 267 bp, Enterobacter cloacae
atgtctagaggtttcgttttactcagtgataaaacaacgcatggtgggaaagttatttctgcaacatcaaccatgattgtcaatggaaaaaaagtcgccctggttggtgatatggtcagttgcccaatcccagggcatggtaccaatcctatcgtagaaggttcgccggaatggatatctgacggtaaacctatcgtgattgacgcatgcaaatgtttgtgtggatgccaggtgatctcaagcgcaccggattgtgtaataggataa

SEQ ID NO: 170661 - DNA, 192 bp, Enterobacter cloacae
atgaccacgctttacaccgacagctatcgccccgatgagacctattaccgtgacaccatggtgattggtctggcccccggcggcaaggttagcgtctggctggataatttaggtgatccagtagtcccgcagatagatgccaaaattaccacggtatcaggtgagcagatgtgcatgtgcagggggcactga

SEQ ID NO: 170662 - DNA, 411 bp, Enterobacter cloacae
gtgaaatccagccgcagggacagcatattaacgctacaggatgtccatctgctgataatgtcagtggcggggtgtaccgcaggacacacttcgtctgctgacccggacaaaactgagtggggttataaaaaactgccctacgacgaatggaaatttctgtttatttattccaatgcactgcccgccctggctacccgggctctgatggtggacggggccggctacaagactacataccagtatgttgatactacaagacccagtcgggtcagcgtgggacgctggaatgaccatcttggggtaacgcagtcgtattataacaagggtaacgcactgccgctgatgcttcgtttttgcagggactcagtcattgataaaaaaagttatgaaacactgatattgttcaaataa

SEQ ID NO: 170663 - DNA, 681 bp, Enterobacter cloacae
atgaccagggttaaaatcatttttacaacactgctgatgatgtcaatggcggggtgtaccgcaggacactcttcgtctgctgcaccggataagactgagtggggttataaaaaactgccctacgacgaatggaaatttctgtttatttatcccaatgcactgcccgccctggctacccgggctctgatggtggacggggccggctacaagactacataccagtatgttgatactacaagacccagtcgggtcagcgtgggacgctggaatgaccatcttggggtaacgaagtcgtattataacaagggtaacgcactgccgctgatgcttcgtttttgctgggactcggtcattgataaaaaaagttatgagacactgatattgttcaaaaaagggacctgggagcagatgaccacgctttataccgacagctatcgccccgatgagacctattatcgtgacaccatggtgattggtctggcccccggcggcaaggttagcgtctggctggataatttaggtgatccagtggtccctcagacagatgccaaaattaccacggtatcaggtgagcagatgaacatgtgcaggggggtgacaaaacatcctgatgggtatgtttactatggtgatacacctgagtttattaaaggtaaaacctacccctacggcaactggtga

SEQ ID NO: 170664 - DNA, 678 bp, Enterobacter cloacae
atgaccagggttaaaatcatttttacaacactgctgatgatgtcagtgacggggtgtaccgcaggacactcttcgtctgctgcaccggataagactgagtggggttataaaaaactgccctacgacgaatggaaatttctgttcatttatcccaaagcgctgcccgccctggctacccgggctctgatggtggacggggccggctacaagacctcctaccagtacgttgatgttaccgaatcaagcgatgtcagcgtagggcactggaatgatcggttagggggagtagaggcttattacaataaaggtaaagcactgcccctgatgctgcggttctgctgggactcgattattgataaaaagagttacgaaaccttgatattgttcaagaaaggaacctgggagcagatgatgacaccttatacagatagtcgcagggacgaaacctactatcgttcaaccatgattattggtctggctcctgagggtaaggttagcgtctggctgggagaccgcggtaatccggtggtgcctcagacagatgccaaaattaacacagtatcaggtgaacagatgaaaatgtgcaggggagttactaaaagtgacttttcatatggatatgatcaagatattaaaaagtttatcgaaggtaaaacctacccctacggcaactggtga

SEQ ID NO: 170665 - DNA, 678 bp, Enterobacter cloacae
atgggtaaggttaaaatcatttttacaacactgctgataatatcactgacggggtgtaccgcaggacactcttcgtctgctgccccggataagacagagtggagttataaaaaactgccttacgacgaatggaaatttctgttcatttatcccaaagcgctgcccgccctggctacccgggctctgatggtggacggggccggctacaagacctcctaccagtacgttgatgttaccgaatcaagcgatgtcagcgtagggcactggaatgatcggttagggggagtagaggcttattacaataaaggtaaagcactgcccctgatgctgcggttctgctgggactcgattattgataaaaagagttacgaaaccttgatattgttcaagaaaggaacctgggagcagatgatgacaccttatacagatagtcgcagggacgaaacctactatcgttcaaccatgattattggtctggctcctgagggtaaggttagcgtctggctgggagaccgcggtaatccggtagtgcctcagacagatgccaaaattaccacggtatcaggtgagcagatgagcatgtgcaggggggtgacaaaacatcctgatggatatgtttactatggtgatacacctgagtttattaaaggtaaaacttacccctacggcaactggtga

SEQ ID NO: 170666 - DNA, 1683 bp, Enterobacter cloacae
atgacaaaatatcagggttatgacgtaacagacgccacccatgaaaccagtattcgtaatgagtggaaaacgattgttgcaaagaaaaagccagtacggggcgtgaccttaactattgggatatttttcgacggcacggggaataatagagagaatactgcatcacgcctggcacgatttaatgaatgcagtgctcccagtcagggggttaatcagaaagacgcacaaagctgcgaggactttcttaaagccattaacgaagacagcctcgctaatggtagctatagagggtattactccaacatttactggttgaatttactatataaaccgaaccagttgttagcagaaaaccaaactgaagcccaaataaaaacttacgtttcggggatcggtactgaggtgggcaaatcagattcgatctttggtaaggggctgggcatcagcatactggatatgtatgaaggtgtggtaactaaaactgatgaggcaatggaaggcatcactcgtgcactttcagagtttatggcattcaataaaaatcctgacttttgtatcgcaaagattcagtttgatgtttttggctttagccgcggggcggcggcggcgcggcattttgccaatcgggttatggaacaggacccagccatagccagtgcgattgcaaaaggtctaagtggggattattacgacggcaaaccttccggtgaagttcgctttctggggatattcgatactgtggcagccatcggcggaatcagcaatttctttgacattaatggacgtagcaatccgggggtgaatctggaattgcgtccttcggttgcgaagagagtgtttcatattaccgctatgaatgaataccggtataactttagcctgaatagcattcagggcatgtggcctgaacttgcgctgccgggagcgcattcagatattggtggaggatacaatccggtagggtcacctttgcaggaaaatgaaaatctttttctgtgttgccccgaatttgaaattgtcagcgacgataccagagaaatcgatacgcgagtataccgtaatgcggagaaagccagagagatgttaatatcgctgcctgccttaaaacacattttgcctcatggaaaaatcactactaaaacccgctccgtaggagtgatagataataatcaacgtcgggccggcataatacaaaaacaggtgggagcagcagtattttttgagcgaatggcggttcccaatgactgggccaatgtctgtttgcgcgtaatgctcgatgctgctcaggaggcaggagtattgtttgaaccaattcgccaaacaaatatagaattacaactaccttccgaattaactctcttggctgataaagccatcgcacagggaaaagcggtgcgtttgggccaggaacctcaggtttttactgaggaagagcggtttctgatagggaaatatacccactgctcagcccattggaatatcgagtccgatcgcaatgtatgggtggacccaaaaacgggagagatattcattcatcgttttggtcccaaagaggacaaggcgtttgtctttgcgcataaacctaatgaccactgggtacgctccgtatggtatatggacgatcagcagcgacgaaatgataacgcatcaaaaaacgacgacgctttggaggctaattattaa

SEQ ID NO: 170667 - DNA, 2526 bp, Enterobacter cloacae
atgagttttactgactccctgcataaccctcttgcgacgtcgggaaccctgaaccgttaccgccttgatattccatcttgcccatgggcactggatgttgaagagtttagcggtatggaagggatgagccggatatactgctatgacattatctttaccagcaccaacaggcagcttgacgccattgcatttttgcgtaaatcggcaaccctgacgatgggggttgggttgcttgagagcctgactgaacagaaaaaagtgcatggtgttatcactgatttcagacgcatttccggttctgctgaccagacgcagtacttaatcacggtaaaaccgttcctttccctgctggataaacagttccgcacacatcgctttttcgttaataaatcggtgcctgaggtggttgaacaggtcctgaccgaacacggcctgaaaggttgggagtatgaattcaggctcaaacaaacttacccgaagcgtgagcagattaaccagtatcaggaaagcgatctggcgtttattcagcgtctgctggccgaattgggtattttttacttcttcagcctgcaaccggatacgcagacggaaatagtccacttcggtgactcgcaggccgcgctgatatttgataaaaaactggccgttaacagcccctcaggcatgagtgacagcggatctgattccgtatgggggctgaacgtggcgaacaacgtggtggaggggaacgtcaccacaaaagactacaaccaccgcgaagcccagaacctgcttcagtctgcaccggcagacatgacccggggagagggcgattatattaactatggcgaggtatatcattacctgccccgccatcccgaacggggtgataataccgatccggcaccggaaacggccaatttctgggcacgcctcgatcacgagcgttttttggcccggcagacaattattaccggcaaaagtactgatgccaccctatccccggcgcaggtactgaccattactgacagtcttccgccgacattaccgtcgccattacaggagccggttctgctcacccgcctgatcttcaccggcagccggaaatcagcattgcatgcggacttaaccggtgtaccctacagtgaaattctctgctggcggccgcccctgattccgcgcccgaaggtgacagggacgatgacggcgcgcgtcaccagtgcaaaagctaacgatatttacgcctggcaggatgcgtccggcctgtacagggtgaaatttgacgctgaccgggactgcaaatcgcaagggcaggaaagtatgccggtgcgtcttgcaaaaccctacggtggcgatgtgtatggttttcatttcccgctgatccagggaaccgaggtggcgattgccttccatgagggtgacccggatcggccctatatcgcccatgcactgcatgactcgcggcatgtcgatcatgtgacggagaaaaacagcacccgtaatgtgatccgcaccccgaccaacaacaagttgcggatggaagacaagcgcggtgaggagcatatcaagctcagtaccgaatatgggggcaagacgcagctgaatcttgggcacatcgtcaacgcatcccggggacggcgtggagaaggggcagaattgcggacggatgactggataagtattcggggcgggaaaggggtttttatcagtgcggacatgcagcctcaggcgcaagagaaagtccttgaaatggaagtcgctattcgacaactagagcaggctttaacgttggctcgcagtatgtccaaggcagcagcctctgcaaaggcgattcaaggtgatgtaggtagtcagcaacgattgaatgcctctttaagggatcttacagcaccaggaatgctcctgcatgctccagagggtgttggcatggtcagtgccagggcacttcggatagcttcgggaagtgagagtgtggggatcatgtcgggaaacaatacagatatcagcgctggccagtccttcaccgttgcagcaggaagtgctgtcagtctattggcaaataaccagggcatgcaattactggccgcaaaaggtcaggtaaatattcaggcgcagagtgatgttttatcgatgagcgcacaaaaggatcttgatattcaaagtacggaggggaaagtaactgtttctgctcatcaagagctggttcttgcgtgtggcggagcctatatcaaactaagcaatggaaatatcgaactgggttgtccgggaaatattctgctgaaatgtacgactgcgcaaaaaatgggcccagctaatctgaaaatagcgccggtagaaatgccgatggggtttggaggcggttttattcttaccgatgaaaaaggtactccgcaaccctcaacgccttatcgcataaccacggcagagggagatattttacagggaatcactgatgaaaaaggcaaaacagcgccgatcaatacggcaactccttcatcgctgaaagctgagttcggtaaggtcaaagctaacggagaggcagaatga

SEQ ID NO: 170668 - DNA, 852 bp, Enterobacter cloacae
atgagcaacaggaaagatattactgacggggcattcgcaaccacaaaaaaaaatggccttatttacacccaagaattaggatgggtagatttaggtcatgcccaaggggatgatgcgggaaggttaaaaagcaaactagatcaagaatggcactcgacatactataaagaatttaatgattggtatttcccggtttcctataatcaggaaatgatagcacgtaaaaccattttaggcatggatctatcctttcatacaggcgtctttacaaaaattatggttcgctcatgcctttccccatttatgaaagcaagagtcgccttgacattaatgtatgggacggcaaaaagattcgaagcatggcaaaattccctcctctttcgctggtatactgacagcggttttagtgcggaagacttactttcagatttagttggtttttatcgtgtttttggttctggccccgatccactctggctagcaaaacctgtgtcatatcagacagcaattcagatatgggatgcaagtggttcacccggacagtttaagaacagaaaatttgctccttatttatttcaaaaaaaggtgccctttaaatatggcgagcctattaaaagagaactgcctaaatggatgaattatataaatccattagaccacgcaaactcaggattactctttaatgaatataagaacagccgcataaaaagctactttcgcaaagacaatcaactaaatcatgaactttacggaaccatatcaataaaaaacagtaaaacttactcaacatccccttttgaaaggccattattttttctactaaatcctcatacaccagtaagtcgttggtga

SEQ ID NO: 170669 - DNA, 423 bp, Enterobacter cloacae
atgaaaagatacatgtttattctcgcagtcttgctcctggctccttttttatttttctttagtgcttttacatttaaatctggagaccatcattacaaacgtgatgatttattctcatggtggctctatacccctaatgcgctaaaagacgcgccacaattatcaacagatatgatgtttagctatagctatgatatcgatcatcaagaaacaatagtaagcatccaatataaaaacataaaagacattactaagcaggaacaaaaaatatttaacttcattaataaattcaaagggattagcaaatataactgtgcatgggtttataaaaaccataacgattacagcaatgattatcaacgctattgtgtatataaaaaaggcaacactctggaacttgagttttttgaaatcgcaaaataa

SEQ ID NO: 170670 - DNA, 498 bp, Enterobacter cloacae
gtgaaacggtacttgcccctgctggcgcgtatatgcattgctcccatgggttttgtgctgattggtgttctggctgttaactcactggatttcggcagttacgcatggggaggatatcaactaacgtatgcccaacttcttttggctctttgcgcaaatctctttctggcatcagtcattctaatagcctgttatctgtgcattctgaagatagctggattgtgggtcagaaaggaaatttatgtaggcatcttttacatctgcgtctttcaattgttctttgtcgttttcaccattatggattgcgacgttgctttgaaatcggctgtagagcatttgctccatctttgtggcaagtgggagtgggcagaatcccttgattttgataaacaagaagcacaaagagagagccgggatgcctggattacattaatttacctcgcaggcaataccgcgctttcgcaggtgtcgacgatgatattctccagacgtatgtag

SEQ ID NO: 170671 - DNA, 1341 bp, Enterobacter cloacae
gtgaaattcgaaaatgaaatcaataccgtcttaaaagatatatttgggattgatcataacgtggattttattcacttcgaagtaatatataaagatgacgatccggaaaaatattcttcagtgaaagatggctataaagacaatcttctcaatcacgatgagcgcgaaaggctagctagggagctttatattggggaggactttattttgcacgcaactgtagtctttccattatcggaagttcaggggttagagagtaaaagtttattttattatcctatttgtacgcgtgaagagatacaaagaatagagtgtatttcgagcgctgatgattatcttttagccttacgagctaaaagcgtcgcttattgcccaaggctcaccagagtatttttacataggagaaataaaaatattcaaaattggtcactctcttcatattatcaatcaaacgactttgaggattacatcgatagactacccgatgaaatggcaaaaatcagtcaaggtatagcggctggctatgctttgtctagggagcctcatggtgtatgcattagcaacgagcatggcaaaattattgttgtgtctgaggcgctaaaacatttcctattttatatgaatgctcatttcaagggggtcgcagaagagctggatcacaaggatacagacgcgtgtctttttatcgcttgtcgaaagatgctactcaccgaaactcaagattttgacctcgaccctagaggcgatctaccagacaatgtaaagcggcactgtactaaaattgtgaacgatcagctggcttttataatcggacatgagtatgcacacgcattacttggtcactttggcgaggacgcaaatcttacctcacattccgagttactgatgattcgtgatggccttggccgagcagaaaagtattttacaccaagacagcatcaggaatttgatgccgatgcaggttcagttcttcatgctgattacgatgacgaagagtgtgctgacgtattgaatggtgcagttcttttctttctgtacattgatatattttatgcaatttcaaattatatcaacccgccatttaatgcctctagaacgcatcctgaccctatagaaaggctttgggctttgagggctgctgttttgaaggctaggactgtcgatgttgaaagactctatacagatcaagacgtcaaggactggattaagagtatgcaggggctcaaagaccattttgtaaatgagttacttccgtacggcattgagtattttgagacatatggatcggtgtatctaccttcctaccgacaatccgagttgttggatagactagacttttga

SEQ ID NO: 170672 - DNA, 3102 bp, Enterobacter cloacae
atgaaattaaaatttaaacatcaggcatatcaggcggactcagttcaggcggttatcgactgctttaaaggccagttacccgatgaggctgctcgtcgctacagaatcgaccctggtacatctgctcaaggtcgctcaggctcaacaacctatgttgaagctgggttcaaaaatgccgatattcagctaagtgagtcgcagttactgaccaatattcaggcggtacaggcacgtcaaaacctgcaactgtcaacggcgctagataattacctggatgcgaatggcaataagcagaccaaatatcatccaggagccaaactcaatcttgatattgagatggaaacgggtactggtaagacatattgctatgtgaaaaccatttttgagctcaataaacattacggctggagtaagtttattattgtggtgccgagcatcgccatccgagaaggtgtttataagtctttgcaaattacggctgagcattttcttgaggattatcaccgtcaggctcgtttcttcatatataactcgaaagagctgcatcagttagaaagcttctcttctgatggtggtattaacatcatggtcatcaacgtgcaggcctttaacgcgcgtggtgctgatgctcgtcgcatttatgaagagttagatgactttcagacccgtcgtccaatagacgtgatcaaggctaaccgcccaatcatgatcctggatgaaccgcaaaagatggaaggtgctaaaacactggattcttttgctgaattcaaccctctttttattttgcgttactcggccactcataaaaccgagcataacaaagtattccgccttgatgcgctggatgcttataaccagaagctggtcaaaaaaattgcagtacgcggaattactacgcgagggctggcggggactaatgcctacctttatctggaaaatattgaaatatctgccagtaagccgcctgtggcacgactggaatttgaaattaaactcgccagcggtgcgataaagcgtgatgtgcgtaaggtaggtaaaggctacaacctatttgaacagtcaaatggtttagagcaatatcagggctttgtcgtttctgacattaatgccaatactgatacgatcagttttactaacggagttgagttgacggcaggcgatgccagtggtgatgtcagcgaggaagcactacgccgaatgcaaatacgggaagcagtgaaagctcactttgaaaaagagcgccaactgttcccgttaggtatcaaagtattgagtctgttctttattgatgaagttgttaaatatcgcgactatagtgcacttgatgacaaaggtgagtacgctcggatcttcgaagaggaatatcttcgtgaacttgagttacaggctgatctactgacaccagattaccagcattacttgaatggaatcccggtagaaaaaacccataatggctatttctccattgataagaagtctaagcgcctgattgatcctgtattaggtaaaaaagcgacggaagccgatgatgtagacgcctacgacttgatcctgaaggctaaagagaaactacttagtttcgatgaacctacccgctttatcttctctcactccgcgctgcgtgaaggctgggataacccgaatgtatttgttatctgtacgcttaaacacagtgacaacaccatctcgcgtcgtcaggaagttggacgaggattgcgtctggcggttaatcagttgggcgatcggatggacgatccgctgacagtgcatgatattaatcgattaacggttgtggcgagcgagagctataaagactttgtcaccgcgttgcaaaaagatattagcgagtctctgtctgccagaccgcgcaaggctgatgagaaatattttattggaaaaatactgcatacagaacagggtgatatcagggttggtgatgatttggcgaagaaaatttatcgctacctggtaaagcatgattatacggacgatagggataatattactgaaacgtggcttcaggccaaaaaagcaggtgtaattgcacctttgcctgacgatcttcaaccatactttgagcagatagttggtcttattgatggggtgtatagtgatggtaatctaccgccactggacaacgatcgtaaaggtaagactaatccactcaatattaattttgaaaagaaagcatttcaggaattgtgggccaggatcaaccataaagccatttatcaggttgagttcgatacggatgaactcattagcaaggcaactaaagctcttgattcacagctacgtgtagaaaaactacactttaatattgttcgtggcgaacaggtagacgatgctacttgggaacaactgaagactggccaaggttttgttgcccgtgaaaccgcacgtgaagaatataatgcttctattcactcgcgtgtaaaatatgatttactggggaaaattggtgagcctactcgccttaaacgtagcactgtggctgcaattctcaggggaatccaacctgctgtatttgaacaattcaaacataatccagaggattttattagtaaggcagctcagcttattaatgagcaaaaggcaactatggtgatagagcatctgacttaccatcttctggaggataaatttgatgcaagtatttttactgccgggcaaattaagcaggattttacctatgctggtcagccgttgaaaaaacatatttatgattacttggttacagattctgagatcgagcgtaaatttgtctacggtgatccaaagtctgttgagcaaggtgggttggagttggctaaagaagtcacggtttatgccaaattaccaaaaggtttcttcattcccactccagttggtaactataatcctgactgggcaattgcatttgaagaagaagcagtaaagcatgtttactttgtggctgaaacaaaaggatcaatgtcatcgcttcaacttaagggaatggaagaggcaaaaattgaatgtgccagacgcttctttgaacaattaaacgcagagttggttgcaaaaaatgtaacttacaatgtggtggataattttaatagtttgatgaatatcgtgcgttag

SEQ ID NO: 170673 - DNA, 711 bp, Enterobacter cloacae
atgtcatcgccgggggccctcgttatgaatagttatattaacgtgattgccattgttgaaggtaagactgagcaggtattcattgaacagatactagccccttggctggctgaaaggatgatttttatgaccgccacgcaggtgagtaaacctggccagaaaggtggagatgtacgttttagtcgggtgagccgggatattggtcttcatcttaagcaacgtactgacacctatgtcacgacgttggtcgattattatggcgtgacggaatggccggggatggattcgttacctgctcagcgagcaccagcgcagatcgctgagcatttgaatactgcagtgatgaatgaggtcaataatctgtttgccgaacagcagtccgcgcggcgttttatcccctttatcgcgcttcatgagtttgaagctttgttgtttagcgacagttcaatcctggcggaagaactcggtatacctgtggctaatgtggaggctgttgtggctgagtgcggtgaacccgaagcgataaataatggtcgtgaaaccgcgccgtccaagcggttaaacagatggacgccagaagggaaatttggcaaaacgacgcaaggaattacgatagcaaagcggattggaattaccagtatgagagaacagtgcccgctatttaatgcatggattgcgcggtttgaggcgctgatggtggaatcagcatga

SEQ ID NO: 170674 - DNA, 1107 bp, Enterobacter cloacae
atgggtactgcattagataaattgactattcagggctttaagtcgattcgtgaacttaatgacttcaagctaaataaactgaacatcattgtcggagccaacggtgcgggaaagagtaattttatctccttcttcaaaatgttactcgcgctcattgagggcaatttaaatcgctatgtgcgtgacaatggaggcgccggtgatttgctgtttcaggggcgtaagattactcagaaaatgttttttgaaacccactttggttctcgtggttatcgctttacgctagtaccgactccggcagacggttgcgccatcgaaaatgaagggcgctactactcggggggaacaacgggatggtgggtactaggtgatagcgaggacggaaaatcccggctcgcggcagaggttctggaaaataagtcagatgcgggttattcaaaacccgtctataacgctatcacttcgtggcggatttaccattttcatgacactagttccaccgctgcgatgcgaaattacgagatcgttcaggattgcgaagtattgcgcactgatgcggccaaccttgcacctttcctgatgaatctacaaaaagatcatccacatcaatataaggctatcgttgatgcggtgcggctggtcacgcctttttttgatgattttattcttaagcccagaaagcagggggctaaagaaagcgtcaatctgagctggatgcaaaaagggtctgactacccgatgcagccttatcatctctctgacggttcaatccgctttatctgcctggcaacggctcttctacagcctaatccgccatccacaatcattattgatgaaccggaactggggcttcatccggcagccatcgttattctggctgagttgattcaacaagcggcgcagcgtactcaagtgattgttgctacacaatcgccggctcttatagaccaatttgctattgaggatattgttgtggtgaaccgccaggatggtgcttcgacgtttacccggctgaacgagtccgactatgcgcagtggctggaaagttactccgtaggagagctctggaccaagaatgtcatcgccgggggccctcgttatgaatag

SEQ ID NO: 170675 - DNA, 1896 bp, Enterobacter cloacae
atggataagctgaaaatgcacagccctaatctggtagaacagaatatcgacaagctggcgacgctgttccccaactgcgtaacagagtctaaagatgagaatggcaagctgaagcaagctatcgactttgacctgctaaagcaggagttgtcgcgccatattgtcgatgggccgcaggagcgctatcagcttaactggccgggtaagcgtgaggcgttactgacagccaatgcacctattgctaagactctgcgcccctgtcgcgaagagagcgtaaactttgatacaactcgaaacctgtttattgaaggggataatcttgatgcgctgaagcttttgcaggagacttatcttggcaaggtaaagatgatctatattgatcctccgtataatacagggcgagattttatttatgatgatgattatagcagcgatatagatacttacttacgtgaatccaatcaattggacgacaaaggccaacgtttggtaagcaatactgatgcaaatggtcgctttcattctgattggttgagcatgatcttcgccagattacgtcttgcccgaaatcttttaaaagatgatggtgtaatatttatttctattgatgataatgaggtagataatttacgcaaagtctgtaatgaggtctttggggaggataattttatagcacagattatctggcagaaagtatatgcgcctaaaaacacagcggaatggttctcagaagatcatgattatattcttgttttttcaaaaaacaaaagatattggaagcctcaaaaactagaacgtacaccagaaatggaggcaagatataaaaatctagataatgaccctagaggaccttggaaagcagagaatatgtcagccaggaatcgatatgattctggagtatattcagtcatttgcccatcaggaagggttatttctggacccccgacaggcaattattggcggattaatgaagctaagttcaaagctcttgatgcggataaacgtatatggtggggacatgacggtaataattctccagctgtaaaaaaattccttagcgaggtatctggaggaagaacgcctcaaacattatggttttataaagaagtaggccatacgcaagatgctaaaaaaactttactgaaatatgtgccttttttgcatacagagaatgttttgaattcagttaaacctgtagagttattgcagcgtattttacaactggctggcaatccaaaagacaatgatattgttcttgactttttcagtggtagtgcagtcacggctcatgcagtgattaaacaaaatgcagaagatgggggtaatcgccgatttatcggtgtccaaatttcagaacctttacctaaaccagaaccaaatatgtcatcgatttttgagatggggttaacgcgagttaaaaatgtagctaaagaaattggtgaacagtcagatatcaattcgtctgatttaggcttccgagttctgaagatcgacacctctaatatgtccgatatctactacgccccagatgccgtaacccaggacgatcttttcgatcaggtagaaaacgtcaaatccgatcgcagtgaagaagatcttctgttccaggttatgcttgactggggcgtcgatctggctttgccgatccgccgtgaaactattgccgataaaaaagtcttttttgtcgatgcccaatcggataacagccatggggctctggtagcctgtttcgataaaacgggcggaattgatgaagattttatcaagcagcttgcggcattcagcccgctgcggctggttttccgtgatgccggcttcgcgtccgatgcagcaaaaaccaatgccgaacagctgctaaaacagcttagtgctaccactgacgtgaaaactatctaa

SEQ ID NO: 170676 - DNA, 696 bp, Enterobacter cloacae
atgactcagcattatcgttttccagcttcagctgagttaaatcggcgcttgccaaaagaaacgttttaccaaaggttgaatccagattctgcccttagacaagcatttgtggtgcaactgcaggagattgtctggaaatataaactggcggatggaacactgaatctggtagcaaacagcgattatccggaactacaggttatcgacattgaacttaaatccgggtcgtctgatattgatgtggcggtactgcgtgcaattgattcattgattgtgttccccgtgtacttccgtgtcacccgcaggtgcaatgaggttctacagattcaatatcagctgggctataagccccctgttacagaggttcagcataaggtcacaccaatacgttacttcgcttccggttggttttcgctacctgatgaaaaagacctcgtcccgttacccgtggcgttgaatatctctcagttgtatcgacagttgctgcaaccattggctacactgccgcctcgtcgtgatgaacccttaactatgtggatggcgcgtttagaggatatagctaggcaggagaggcgtatcagccagcagcagaaacaacttcagcgcgaaaaacagtttaatcgccgggttgagctgaatcgtgagctggtggagctccggcatgcactagcagccttgcaggctgaaaatgactaa

SEQ ID NO: 170677 - DNA, 3294 bp, Enterobacter cloacae
atgaaacttattgataacattaatgcgttattgggagatgagctgaagcagacgttacaacctggtgtgaagcttaaaatcgcagcatcctgcttttctatttatgcatttgatgcgctgaaagaacaacttgaaaatattgatagcctggaattcatttttacttcccctatatttgtagaggaagatgcggttgataaactcagaaaagaaaaacgcgagttccatattcctggcgaaaataaagagcgaagtttttttggtagcgaatttgaaatccagctaaaaaataaactgactcagaaagcgatagcccgtgagtgtgcggaatggatccgtcgtaaagctcaatttcgttcaaacttaactccagcaccgatgcagccttttgctgttgttaaagcaaatgataaggaagttgtttatcagcctttgcaaggattcacggcagtggatcttgggtatgagaaaggcaacgctgtttccaatttagttatgggcatagatgaatcgtcatcaacggcaacatttctgacgctctttgaacaaatctggcaagataaagaaaaactgactgatgtaaccgaacgcttggtgcattacatgagtacggtctatctggagaacccacctgaacagatttatttccaactactctataatctttttagcgagtttttagaagatatcaatgacgatgtactgccaaatgataaaactggttatcaggatagtttgatttggaaaaaactcttcaacttccaacgggatgcagcgaccggtattattaacaagctggaaacctataatggttgtattcttgccgatagcgtcggtttaggtaagacgtttacggcactggcagtcgttaagtactacgagctgcgtaacaaatctgtattggttctttgtccgaaaaagctggcggataactggaccaactataatcagaatctcgttactaatccgtttgcaaaagaccgatttaactttgatgtactatgtcatactgatttgcagcgcactcgaggagaatcgttcggtattgcactgaatcggatcaactggggaaattatgatctggtagtgatcgatgaatcacataactttcgtaataatcaggcttttaaagagagagaaacacgataccagactctgatgaataaggtaattagagcaggagtcaaaacaaaggttttgatgctttcagctacaccagtaaacaacaaatttagtgatctgaagaatcaactggctctggcgtatgaaggagatcctggttctctccatcggcagattggtactcaatcaggaatagatgaaatatttcggcgtgcgcagaaaagttttaatgtatgggcggagttgtcgccggaaaatcgcaccgcttcagcgttattgaatgcactcgattttgatttcttccgtttgcttgatagtgtgactattgcacgctcacgcaaacatatccaaactttttatgagaccaaagacattggtcgttttcctacgcgtaataagcctctttcattccaaccctctctgacaacccatgagcaggtgattggttttaatactatttttgaacagttatccagcctacgtttagctgtttatgccccggtcagttatattctgccgagtcgtatggctaaatatgaagtactttatgataccagcgtaaaaggtggcagtacgttgcgtcaggttgaccgcgagaaggccttacaacgattgatgaccataaatctgcttaagcggctggaaagttcagtacaagcattcaggttaacgcttagtagtttgcaaaaaatattacgtgatgctctgcataatattgccgcgtttaaggctagcggtttagaagaggagcttacgacggttgatcctgataacggaattagcgatccggatattgagctcgaccttgaacttgatgatttggaagaagctttctcgactggtgggaaagtcaaaattaatctggcggatatggatttgccttcgtgggaataccatcttgtcaatgatctaaccattattgatgaactcttagatgagatggcgagagtaacgccggaacatgatgctaagctgttgcatctgaaaggtgtgcttgaaaataaatgggcaaatcctatcaatccaggtaataaaaaagttttgatctttactgcttttgccgatactgcggattacctctatgagcagttacatgatttatgctggcaaaaacacggattacatctagggaaagtcacgggaagtagtaccgttaaatcgacgattgggaagggttatgattttcagagcctgctgacgttgttttcaccacgatcaaagtcgaaggatcacatcttacctgatgaaccagccagtctggatattctgattggtaccgactgtatttcagaagggcagaacctgcaggactgcgattacctcattaactatgatattcactggaatccagtgcggattattcaacgctttggccgtgttgatcgtattggatcaaccaatgaatacattcagttggttaattactggcctgatatcagccttgatgagtacatcaatcttaaagagcgggtagaaaaccgcatggtaattaccgacctcacctcaacaggtgatgataacgtcctgacggcgcaggctaatgatgtggcttaccgtaaggagcagctcaaacgactgcaggaagaagtgattgacctggaagatgtgaaaggaggcgtttcgattaccgatttgggtctgaacgaatttcgtatggacttgttggggtatctgaaaactcatccagatattcgccgtttaccttacggcttgcatacagttgtatctgccgaacctactaaaggcttagttcctggtgtcatctttgcgctgcgtaatcgccatcatggggtcaacatagataggcagaatcgtctacatccctattaccttatttatattgccgatgatggatgtgtggccatcaatcatctgcaaatcaagacccttctggacagtattcgtgctgtttgtaaaggtcgcgagattaccgatgatgcagcctgtcagcgttttaatcagaaaacgctggacggaagggatatgagtcattattccgaactgctggatcgggcaattcactcgatggtagctgttaaggaacagagcgatattgacagcctgtttagtggtgggcctacttcagcgctgaacaatgaaattgctgggctggaacagtttgaattgattaactttatcaccattcaaaattctgatgagggctgtggatga

SEQ ID NO: 170678 - DNA, 1059 bp, Enterobacter cloacae
atgagcattgatgcaatgcggtgggccaagaaagttaagaccggaaaatcctccagtaaggcgatcctgacctggctggctgatatgtgcggtgctgacttatgcgcttatccatctgtcgctgcgcttgcagaggctactgagatggacagaaagactgtgcttgcaggattgcagcatctacaggaaatcggccttgttgtggacaccggggaacggcgtggcaggactaaacaaatacctgtttacaggctggtaggcgttgaagaaagcatccccgatgcagaacaagcccgaaatcgggaccgtttaaacggtaccaaaaaggggactgttcaacgaaatgatcccgataacggaactgttaatgcgaacagtaccattaacggaactgttaacgagaataaaaataccaaaatcgggattgttaatagttcgaattttaaccaaagagtaccgtttttccctttaaacagtcccaaaaacgggacacggaatctaccaaggaaccataaagatctaaaccccacacatagcgaactggtcgaacctgctattcctgattatccgaaccaacccggtatcggatttgtagcacagcaaccattcgggaaattccagatgcatcagaactggaaaccatcaatcgattttgaacgtcaggcggttttgtggggagtgccgttgaaggcgggaataaattttgaagcggaactgagtagttttatcgcttactggcaagccgaaggaaaagtttttcatcaaatccagtgggagcaaaaattggcccgccatctggatcgcgcaaaggtccagacaaaaccacaatccggaggtaccgacaatgcagcagttcgatcagaaccaacagcatcccgagctgttcagcaaattcaatcagcacacgcagagtggcgacgccggaacggacttgagggcgacggaaacggcatggcggctatggcaggtgatgggggaaatcttctcaaaccgatggacgcagaagaatggggcagagcctacggccctctggatagctcagataggttcgatgactga

SEQ ID NO: 170679 - DNA, 369 bp, Enterobacter cloacae
atggccagaaagaaaaccgacaaagaacgcgccctgatcatcaaccggattatcgaactggtgaaggagcaggggcgcatcaccaagaatgacgtcgttgcgatgtttggcctgcaccggaccacagcggagaaatatctacgcgtagcagtggataaggggggccttgtccgatacgggatctgtggcatctttagataccagcgaacggttatagaattcaaccttgagcgttacacgaaccagggggtatctacattcgaaggatatctactgaaaagcaaaggaactacatgcgcaggttccggggcatgttataaccgagctgatgaacacgagaaacttaaagacaatgaggcacaagaatga

SEQ ID NO: 170680 - DNA, 219 bp, Enterobacter cloacae
atgaaattacggattataaaagcaatcagcctcagcagattctcaccaagatggattaaggtaatttgcattcaaataattaagcatgacatcaatcgctctctcaacagtcttcttgaaggaattgatgtgtcaaatttaacccctgagcaaaagaaaatgtttcagaaatgcattgaaagaatcaactctgcaagagataagaggatggaagcatga

SEQ ID NO: 170681 - DNA, 921 bp, Enterobacter cloacae
atggaactgcaagaaatacgctcttttcgcgccacattacgtgaaatggtcagagaactgggtatgctcaaccgtaaagcaagcggaactgagctttcaccacttcagagtcatatattgattgaacttagtagacagccgtatggttgcactgaactggccataaatctttgcgttgagaaagcaagtatgagccggacacttcggagtcttactgatgagggatatcttcatagagaaaatgacagccaggacggtcgagcctcaagatttagattaagcgaatctggtaaaaaactgctttctacacttgaagaaaatgccgatagatttactgtggacgctcttgcgtcttcctcgaaagatgaaattgagggttttcaagaaactattaaacgcttttcaattagcttacgtaatgcacgtcgtcaacgtgaagcagggttaattttccgcagattggagtcttcggataactccgcaatcgcagcaattatccgtgatagttttcgagaaaataaaatcgaacatcttgaaggcgtaagccttcatgacccagaactcgattgcttaagtgaagtttataataatcacggctgcgggtactgggttgctgaggctaatggcgtagtagttggaggtgctgggcttgctccgcttgagggagaggaaggaatctgcgaaatgcagaagttgtacttcaaaagtgagtttcaagggatgggactgggcagacgaatgatcgccttcattatttctcaggcttctgaaatgggataccactcctgctatcttgaaactcttgaagaactcaggaatgcagtgggtctgtatgaagcttttggattcgagcatattcctgagaggttaggtaataccggtcataatagctgtggcatatgtatgctgaaaaaactttag

SEQ ID NO: 170682 - DNA, 168 bp, Enterobacter cloacae
atgaaagttgagttaaccattgagagttcgacagaacttccaacggatgctgtactgaccctggaaaaagagttgttaaaacgactccagaatcagttggataattgcagcgtggttgtctgtcgtgctggttcggataggtttagtgttttttgcgccgcaaagtaa

SEQ ID NO: 170683 - DNA, 948 bp, Enterobacter cloacae
atgttggattttatacgagatatttttgcttcttttcgccaaacttctttagagagggtaagaagccctttccttggggcatttgtcttttcatggattgccttcaactggcaaatgcttgcaattcttttttttagcaaaaataatatcgaggaaagattaaagtatattaatagcaattttgatgttggaagttacttattagcccccctttgtatctctgcattaattgtatttttattaccgcaaattaataaagcaatcacaaaaatccaagataagcccaactcagaaacaatcgaattaacattatcatctaagattagagtagccgaactccagcaatcaattgcagaaatcgaggcgagaaaaaaacttgccgataaaaaagaagaacggtatatcgaagaaagcatttcatcaattaaatctgaaaataaccgattgcacgaccaagtgctaaccttagaaacagaagtcaaagatttgcagattaaactaagtgatagcaaagcagaagagagtaatttgaaagcacaacttcgcacggaaaaagatttacttgaacaaagtgaaaacgctcgtaaaaaattatctgatttaaacattactttgaacgctactataaaagagctcgactatgaacgtatgcaggcaagtcacagcattcagaaacttgaagaagaaataggaaaactccaaactgacattggaaatcttaatgagttaaaacttactttaactactcagataacaaatttagcaaacaattacccgggtattttcaggaatcatttaattgatggagttcctcacatagcacttacagaacatgcaacaaggggactgccaaacattagtcggacaatgattatggataacatcaggagtgctttgaaaaataataagccaacatctgaacaagaagatataacagaagatatgtaa

SEQ ID NO: 170684 - DNA, 144 bp, Enterobacter cloacae
atggaactaacgaaggaagaagttgaacttatagccggttttattggacagcactggcaagaatttgtcgccagtgtcgaagacgtgacgaccgttactgccttgcataggcttgcggagaaacttggtcttgaatccgcttaa

SEQ ID NO: 170685 - DNA, 207 bp, Enterobacter cloacae
atgccacgcacagcagacatacatgccgcctttatcgcggcaatagaacttaaccctaaaggttaccgctatctgcgaacagttagcttcattcagcagttgataggctttaacttgaactttatccgtaacgatgcaaatttatggatagagtgcaaccagccagacttcgctgacaaagcgaccgacgcgggagggagggcatga

SEQ ID NO: 170686 - DNA, 765 bp, Enterobacter cloacae
atgtttgatgaaacgttattactgttaatctttccaataatttacatcggattaattggtaatgcagtgcgcattagccttaagagaaaaccccaaatactttatcatcgctgtaaaaaaacatcggtagcgaagattttccgagataaaaaattcaaaacaagaacagaaggaagagcttacttttcacctaatcccaataacaaactaggagttgagaatctaccagttagagatgtgtttatggcattgattaacttcattaaattgttaacaagaagaattccgttaatagggaatttaataccccccacacaaccgtctccacctaaaggaaaaatagccttggcaaatgtagttttcgaacaaaatgcattaaatcttctcaaaccaattttcaaacccttttgtatatttagtcttttcaatgtttggggtgcaataaaatcgcttagaaaagagtgggtatcaaaatcattgtatgatataacccttgtgcaatgccgccttgacaccaacggtaattgcatagttacagacgctgtcttaaaaaaaaaggaaggtaaagactactatttttccttatgcaaagtaataggaatggtttttttaaacttgaacatttctctaagtgttatttttatgacaatcacatgtttcttaccacaatattatattttcttagtagtccctgtttgtttcctcctaatctccttactcgtaatttttatttggtttatgaagaatcaaactagtaataagtaa

SEQ ID NO: 170687 - DNA, 135 bp, Enterobacter cloacae
atgatgaggaaagtgtcggctgaagttgatctcaatcagatactaatcctggatgagcttgctaaattgttggggggcaagcttaaatggcgaaccatgttggattttaaaacattaaataaaatattaacgtaa

SEQ ID NO: 170688 - DNA, 858 bp, Enterobacter cloacae
atggatcatattcgagacaatacgattaccctccgatttgatggtaaagacgctgagaatcacgaagttgaattaaatattctaggtgaatcttttcagggttttgcgaagattttatctacagcaggtaattttgccgtaactcaaaagtattacaaaagatccgatcttcaagaggttaaggtgtatgccagagatcctcgctgtaattgtttttcgatagatgctgttacaagtttcgtatctcaacaacaattgttctctgggttagccgccgctatacttcctttgctcatacagtacattttttctcgtaacgctcagaaaaaagaggaaatgaaacacttaaaagattccttggacaaggcaattgaggccttgggaaacaaagacaaagacaccattcaaggattgcttaatgtgatcgataagatggcgactgagttgcgtccatctgttcgtcaagccgttagccctatcggaaatacctgctcaacaatcagcataaaagcaggagatggaatttctcctcttgtcataaatgaagcagataaagagataattgataggcttgaggatgatgaagttattcccctcagagaataccaagttttgattaccgaatttgacggtgtaaaaaaaacagcgaaaattgttttcctgggtgacgagcaagccagaagaattactgcagaaatcagtgacccggcagtgatgaaaagagataatccatacatcatagcactacaggcatttatgcatgcacccaacgattcttcagccagtgttacagttaccgccaaggcagtagccagaaaaggtgccataagtaaactatacataatggatatcaattaa

SEQ ID NO: 170689 - DNA, 543 bp, Enterobacter cloacae
atgaaccttttctctaacatcccaccaatgactactgtcgatcctgcagaccgagcaagtgcaatcgattttgttaaccgcgtaaactggtggtttgaaacctgggatatcgaggcaatgatcaatgcttttgtgccagattcagtaacgtaccatttccatggaaaggttcagggtcatgatgaacagcgtaagttttttgaaaatgagtatccttactttattccaggtgtaagccgtcacgcgaccaaccatattgttgatgctgacggagacggagtagttgtccggtatcataatctcctggtacgttatgctactccagagtcagcggcagaactgggcgatggcaaagttgttgaaaataatgatgtgctgccatccctctgggtttttgctcccatgatggatcgactttgccgtactgaaagtggctggaaaatttttgagcgtcatttaggcggctcttccatcaatctcgcgttgaatcctgagacgactgatcctgttcgtctcgcaccatttatgcctaagcataaataa

SEQ ID NO: 170690 - DNA, 225 bp, Enterobacter cloacae
atgaaaatcgtgttagccattgatcgcatgaagaaacttccttatggagctatacctgcgcttgagtcagaacagtataaaagactcagtaagcagttcgatgattgccagctaacgatcaagcgtgccagccattatgggctgactgtttttggaggtgataagaaagaggtcgaaaatatcgtgcagaagacctgggaaagtgcggacgagtgtttttattaa

SEQ ID NO: 170691 - DNA, 153 bp, Enterobacter cloacae
atgtggaaacaaaagctgaaggtaaaatcggtttggcggaaggaaaaggcaactataatcttacacacgatcttgacgaagcaagggttggtgccgcttttgaacttggggcagaagctgctgctgcaaaagggcagctttcaggtattatag

SEQ ID NO: 170692 - DNA, 2001 bp, Enterobacter cloacae
atgtcgccacaaggactgcgttttacgctggatattgaagggctcccatcgaatatgttcccggtggtcgatttttgcttgaacgagtcgctttcttccctttttcgccttgacgtgagcgtatccagtgaatacttcacctccctgagtcatgagatggtgacggaaaaaaccgccagcctgaaaatctgggaaggagaatctcttcttcgccacgtgaaaggtattgttaccggcttcagccggggagagtcagacggtcagcggaccgattactggctggaaattcaccccccgttctggcgcagcgccctgcggcagaattttcgcagttttcagaatcaggatatcgaaaccattatcaccacgctgctgggcgagaatggcgtgaccgagtacagccctctgctgggagatgcccatccgtcgcgtgaattctgtgtccagtatggcgaaacggattatgatttcctgctccggctgatggcggaggagggtatctttttttatgaagagtatgctgacgatggtgtcagtcagtggcttatccttgctgataacgtggcatacctccctgatcctatagaaatcccgtataacccggataagtcttccgggacgactaccgaccatattgaccagttcagtcacagtttccaggttcgtccttcctctgtggtctcgcaggattacacgtttaaacgaccaaaatggcgcgggcgatttgatcatgccggagaaaatatcggctggcagcgtgaccagtacgaaatttttgactatccggggcgtttcaaggatgagcagcacggtcaggagtttgcccgcaggcaggtggccggtctgcgtaacggtgctgagacagccctgtgcaatacaggctcaccgaagttatggccggggatgcgctttacgatgacggggcatccgctggaaagcctgaataccacatggcaggtagtgagctgcgatatgcgcggcgaacagccacaggctgtgccgggttccgcgggtgaaggcaccacgctcaaaaatcaggttcatgtgataccggcagacagaacatggcattctgcgccgctgcctaaaccccgggtggatggtcctcagtccgcgacggtaacggggccggaaagcgaggaaattttctgcgatgaatacggtcgcgtgcgggtgaagttcgcctgggaccgttataacaatgcgaaccaggacagttcgtgctgggtgcgggtgtcgcaggcatgggcgggaacgggcttcggcaatctagccattccgcgagtgggtcaggaagtgattgtcgactttctcaatggcgacccggaccagcccattattatgggtcgcgcttaccacgagaataaccgctccccgggacgtctgccgggcacgaaaacacagatgaccatccgctcgaaaacctataaaggcagcgggtttaatgaactgcggtttgaggatgcgacagacaatgagcagatctatatccatgcgcagaaaaacatggacaccgaggtgcttaacaaccgcaccaccgatgtgaaggtgaatcataccgaaacgattggtaataaccagaatattacggtgggtgttggacagacggttaaggtgggtgggaaaaaagaagggggtcatgaccagacggtgacggtggcaaatgatcagataataacagtagtcaataatcaaactaccgaaattacagaaggaaataaaaaaactgatatagataaaggagatcaggagattaatcttcataacgggaagcaaacaataaaggtaaaaaaaactatcagggtttcttcggaagagaagatcgaatttgtttgtggagagtcgagcattaccttgctggaaaatggagaaatcactattagtgggaaaataattaagaatactgcgaaggatgaatatcatgttaataccaaaaaattgtcagctgacggcagcgaagagcaagttctgactggtggtatgttgaaattaaatccataa

SEQ ID NO: 170693 - DNA, 495 bp, Enterobacter cloacae
atgaatagcaaaaaaaacgatggaagcgttgccccaaaagagagaattaatatccgttacgtacccaaaacggatggtcagcaatccgaaatcgaacttccgctcaacctgttaatcacgggcgacacgggaaaatcggacaactcatctttagatgagagacatgcggtctccgttaacaaaaacaatttcaattcggttatttccgagacaggaataaatctgaattttaatgtcaaaaaccggctcagcgaaacacctgatgacgagctatgtgtcaacatggatttgaaatcgctggatgatttttctcctgacagcatcgcaaagcaagtgcccgaattgaagaagcttctggatctgcgtgaagcgctggtcgcacttaaaggtccgatgggaaatatcccgcagttccgcgcgcagcttcaggcattgctggagaacgaagaaactcgcgaacagcttctcaaagaactggatattgttaacaagtaa

SEQ ID NO: 170694 - DNA, 1488 bp, Enterobacter cloacae
atgtctttacaggaagaaactctcgttgccgaccatgcaaaacagcacagcgagtctacctcactgctggaccaaatcatggcgcagacccgtattcagccggaatcagaaagctatgatatcgccagacagggcgtaaccgcatttattgccagtattttgcagggaaaccatcaggaagaacccattaaccggtttgccatcgacagtatgattactgaaatcgatgaaaagatgagcaaccagatgaatgaaatagttcattcagataaatttcagcgcgtggaatccttctggcgttctctgaaactgctggttgaccgcaccgatttccgtgaaaacattaaaatccatgtactgcatgcaacagaagaagagctgctggacgattttgaatttgcaccagaaatcacacagtctggctactacaaacatgtctattcttctggtttcggacaatttggcggagagccagtggcggcggtgattggcgcttatgcgttcaaaaacactacgccccatcagaaactgatgcaatacgttacagcggtcggagctatggcgcatgcgccttttatttccgctgcatccccagagtttttcggtctcaactcatatacagaactgccaaatatcaaggatctttatgccatttttgaggggccagcctattcaaaatggcgttctttgcgtgaatccgatgattcacgctacctggggttgactaccgttcgaaccctgctccgccagccttactccgcgactgaaaacccaactaagttattcaattacagagaggatgtaagtcagtcccatgaacacttcctctggggaaacagtgcgtttgcgcttgcttgcaacatcacggacagctttgctaagtaccgctggtgtccgaacattatcgggccgcagagcggtggtgcggtaagagacctgccggtacatttgtttgaagctatgggacaaattcagtccaaaatcccgacagaagtactgattactgataggcgtgaatacgaacttgctgaagagggctttatcaccctcaccatgcgtaagggcagcgataacgcggcgtttttctccgcaagttcggtgcagaaagctaaaaagtttcctaatacgccggaaggcaaagctgcggagataaacttcaggctgggtacgcagttaccatacctgtttatcatctcccgcctggcgcactatatcaaggttctgcaacgtgagcagattggctcatggaaagaacgcggcgatcttgaaagggaactgaacacatggatccgtcagtacgttgccgaccaggaaaatccgccggcagaagttcgcagtcgtaagccgctccgcgctgtcaaaattgaggttcatgatgtggaaggcgaaccaggctggtatcaggtggccctctctgcacgcccccattttaaatacatgggtgccagcattgatctgtcgcttgtcggacggttggataaggaatga

SEQ ID NO: 170695 - DNA, 426 bp, Enterobacter cloacae
atgttaccgggccggggaatatttgcaggtacgctgtttgagcgtatccgtaacgctcatgctgggatggagcgcaaaaccagcgcgacaacgctcaggcagtctattttccagaatctgcaaaatatacttaatacccggcacggtaactgtcagggcacgcctggcttgggtatcgttgatttcaatgacgcggtcacccccaccaccgatttttatcaggtaatcacgaacacgatccgtgactgtattctgcagtatgaacctcggatctccgccgtcgaagtatccgcggttatggcagagagtaacaccccgctggatttgcgttttcatgttgtagctacggtgaacttcgggggtattagagatgcgatggaattcgacatgtctatgagtactcaccagcatttcaaaatggactga

SEQ ID NO: 170696 - DNA, 1878 bp, Enterobacter cloacae
atggcatttgatgaaagttatttccggcaggaactggattatcttcgacagctgggcaaaatgctggcaaaggaaaagccgcaactggccagttttctcgcggagaaagaggccgacccggacattgagcgccttctggaaggtttttcacttctgtcaggaaaactgagacaaaaaattgaggacgaattcccggaattcacctacagcctcataaatctgctgttgcccaattatctccgtccggttcccagcatgacggtgatagagtacacgccggatgtccataatctgaccacagagattctgatcccccggaatgagacggtgatgtccgcaccggataaagaccattcttttaacaatgtttttacccatgggaacgaagagcaggatctatctctttcgtgtacgtttaccctgtgccgtgacgtatggctgctgcccgtcagcatcagcaatgtggaaaatcatagcagccataaatatggcgtaattgatataacttttgcagtcaacccgaacgccgatctaagcaaaatagacctcaacaagctgcgcttttggctgggaaatgatgataactatacccgatatcagctttatctgtggctaaacgagtacctgctggatgctgaaatccttgtcaatgaacagcatatcgctttgcctgatttcatgccggtacctgtcggatttgaaaaacaggatacccttctgccgtggccgaaaaatacctatagcggttatcgtatcttgctggaatacttttgttttccggaaggttttttcttttttgacatcaaggggctccggcctcttccagctaatttgtcggcctctgcttttacgctgcggttgcgtttttcccgtcctttgccgctggatatcaagctccgtaatgattccctgcgcctgttctgtacgccggcagttaatctcttcagccatcaggcagaacccatctctcttgatgaaaccaatcgtgaatatccgctacgcgccagccgcagattccctgacgcttacgatattttttctgtttgcgatgtctacagtcagagcaaagagtcccgcagaggctcgcataagacaaagggagatttttctgtcagcacacgtcctgaactggcacaaggcgtttaccactggcccaactttgaaagttataaccaccaggcggaatatggccagcataatgaggtcgtttattaccaccacaggacaaaatcatcgctgttccggaaggggatggatcattctctttcttttgttcatgcggacggtagccagccggaaagcacattactaaaaaatgaaactgtctcagtttccctactttgcacgaatcgggaactccccacacatttgcgcgtgggagacattaataccgctacggggaaaaatgcagcggtggcatcccttcgtaacgtgacacacccgacacagcctcttccccccgtagagaatgggaagctgcactgggcgcttatatccagcgtcagtctgaactatttctcactgctggataagaacgcactggttcaggttttaagaacttatgaccgccacggagcaggaagtcctcaaaaagcccgtttatcccagctgaaactggatgcaattcaacgtctggagactcatccggcagacagtcttttcaatggcgtacctgtgcgcggactgacatcaaccctctggatcgatccacgaccttttacctgtgcaggagaagtgtatttgctgggttcggtactgtcgcatttcttttctttgtatgccagcgtcaattcattccatgaactgaccgtcgttaatactgaaaatcaggagacctgggaatggcaggaaaaaatgggccagcacccactgatctga

SEQ ID NO: 170697 - DNA, 1047 bp, Enterobacter cloacae
atggcaggaaaaaatgggccagcacccactgatctgagcgaaccagaagcgttttcttcagcaaatatccgccggtataacttctttacgctggcagaaatactgcgcaggaaaaaatcgattccggatcccaactttcctctgcggacagagccctcgcaggaagcgattctgtttcattctgacagcagcatcgcgtttcctggaagtgacgttaatcatctgactaaaaatcagaatgatcagtatgtagtgacaacagcatttctgggactcactggaagccagtcgcccctgccgggctattacctggaagatatggcttacgaagccgcacatgaaggcagccctgttgcagaacttcttgatctgttcagccatcgctggacgcagtttgtctggcagatctggcgtaaatatcgctatcacatctgttttcgacatggcggcgtagatgttttttcccaacgcatgttcgctctgctcggcctgggaagccaggaagagcgaagtaaactaactgttaatcactgcaaaatgctggcctatgccagcatactggccagtcccggacgttcgccagaagtgatctgcaatctcatcgcacactgtttcgatttgcccgacgtggcgttacagagctggcagttacgcaaaatggatattccctctggtaaacaaaatcgtctgggtatggtggtaaaaaaaggccaccgcatttccgggcagaaatccacgctgggccgcaacttcactcttggggcacgagtacctgaccggagcggaaaatttctcttatgtatcaataacctctcacgggagcgctttctttcttttcttccctccggtgaaaattttgaaccgttatccatgtttgttgcgttcatcctgcgcgaccagcttgcatgggatctccggctgggtctggcaccggatcaggccgaaggaatgcggctcggggacaagaaaaacgcgcgcctgggctggacaagttttataggcaaaccggaagcacaacccttcataacgattaaaggccggggataa

SEQ ID NO: 170698 - DNA, 1293 bp, Enterobacter cloacae
atgcaggaaggaaaacaacaacactccccgaccctgtccctacaggtcattaatggtaatgagctggagagtggacgtgcggtatcggccctgttcaccaccgatggaggtagcgtcgggcatgctgaaagctgccgctggtcggtccaggatcgtggaaacactgtcagcgaacaggcatttaccgtcatctggcacgacggcgcattctgcataaagagccactcgtcagacatcgctattaaccaggcgccggtgcctgtcaactcaggtctggtacgtctgcgccagggcgacgagatcctgttgggatctctgacgctaaaagcttttttgcatcagggagaaatcaccagttatgacaaacaaatggcaaccccggaaaccattgtgatgaatcgcgataacctggtgaataccctgcttacaactgacggccagccgcactatccaggaatgtccatacgacatgatattgcccaaaccgtcgcgcacgcattttcaaccgatcccttgcaggtgctacagaccgagtcactgactaatatgcctggagcatacaatacctccccctccagcacgccgccaatgtcggatgtaaccgaatcagggggcatcgagcatcgttttatggatctgccggcatccgatgctcaacaaaataccgatgaatcaggtaatgaattttttcatgagaatatgaaccatcgtcaccttgctctttcgccgctaatgagaggactgggctgttcgctgtccatccgcaattcacaggaggccgatgactttctggaagaaattggacgcgccctgcaaaaagccatcaaaggtcttctcaacctgcaacatcagcaaaatagcctgtcggataagcatctgcgtcctctggaagataacccgctacgcctcaaccttgattacaatacggcactcagcgtgatgtttgccgaaaataaaagtccggtacatcttgcagcgccttccgcgattgaagagagcctgcgcaatattcatcaccatgagcaggctaatcaggcagccataaccgaagcattacgcatcatgctggatgccttttctcccgccagcctgatgcgccgtttcgtccagtatcgccgcagcaatgaacagcgccaggaaatggacgacgcttgggcatggcgcatgtacagcagttattacgaagagctggcatccagccgtcagcagggattcgaaatgttgttcagcgaagtctatgcccaggtttacgatcgcgtactacgtgacaagcaacgagcatcagaagaatga

SEQ ID NO: 170699 - DNA, 534 bp, Enterobacter cloacae
atgagatggcgtaacgcagtgttttacgccgctatgtcgttactgttcggggcgataacgggttgtgaaatgacgaagaaaatcggaaaagtcatcaccgatccaggaatccaggtcggcagtctggctgcccaaccttcagagctaacaataacgctgttaactgagccggacaccaatctcaacggtagcggtgaagcgacgccgatagatctccagttgatttatatgagcgacgattcgaagttacaggctgccgattacgatctggtcgccacttcaccacttcctgatgtgttgggaaaaaactatatcgaccatcaggatttcacattgttgccagacgccattaaaacgctgcaaccaatacaactggatgaaaaaacgcagtttattggaatcgtcgcctatttttcaagcgatcagacaactgaatggaagcaactcgaagcggtagagagtaccggccaccgttaccgcatgctggtacacgtacgccagagcaatattgagataaagaaggaggattactga

SEQ ID NO: 170700 - DNA, 1344 bp, Enterobacter cloacae
atgtcgacaatgaaaaataaagtggtctggcaggaagggacgtttgtccagccccagcattttcagcagcagcaacgttataacgactatgtgctcacgcatcgactaaacgcgcaggttgaatttgcatgggggtttaccgaactgtcgattaacactgaactcctggcccagggcaagatcgccctcgacagagccgaaggctgtatggctgatggcacagtattcagtcttccggaacaggattatctgcctcagccataccagcctggcgatctgtcccgtccgggaagccatgacattttcctggcgcttcccgttatcagtgatgtgattaatgaaattgaaggccactatagttcagggcaaacacaaggacgctatcgcctgaaccgcgcagacgtacgcgatttgcataccgatggtggtgaatcgcgacagcttgagctggctcagcttgctcccagaatcatgagtggagcagaggatctgagcgcatatacactactaccgttgtgccgaatccgtgaaaggctggcgaatggtgaactggatgttgattctcattttattcctacctgtcaggctattcgcgtcagcccggtgctacagaacgtcatcggtgagttccagggacttatcagtaatcgcgccgacgatctggcaaaacgtatcggttctccagaccagagcggtatcgccgatattgccgaatttatgatgttacaactgctcaaccgcagccggatgcgtttcacccatcgttcgtatctccacactctgcatccggaaacggtttacctcgatctggcgatgttactgggcgaactgatgacatttacagattccagccgccagccttgtccgctggaggtttacaatcaccgtgatttaacgaccacattcaaaacagtgatcccagaactacgccgggcgctgaatacggtactgacgccgcgcgcacagaacctgcctctgaggttcaacgatggtatttggatggctacggtcaacgatccttcattgctacagaccgccacgtttattcttgccgttagggcccggataccacatgacaaactgcgggttcagtttattcagcagtcaaaagtttcatcatcctcccacattcgtaatgtcgttagcgtacaggttccggggattcctcttcgttcactgacagcagcccctcgccagttaccctaccatgagggttacgtttactttgaactggataaagcaacgccagcctggcaggacgttataaaagccggtgctttcgcattacatatttccggacagttcccggatttagatctccagctctgggcggtcagaggataa

SEQ ID NO: 170701 - DNA, 756 bp, Enterobacter cloacae
atgagcgatttatcccttacttcgctggaaaacgagatggacagttctggtcgtcagtatcgcctgtcgctacgtggcaatagcctaaatccgatggtcgacgccgctacaccactgctggggatggtaatgcgcctgcaaaatatgcacagccagacgatgccggaacatctgttcactcaggtcgtcgccgatatacaggcggttgagcagtcacttcaggaacaggggtacgagcccggcgttatcgtctcgtttcgttacatcctatgtacgtttattgacgaagcagcgctgggcaatggctggtcgaacaagaacgaatggatcaaacaatcgctgttagtgcatttccataatgaaacctggggcggagagaagatatttatcctgttggaacgcctgattcgtgagccaaagcgctatcaggatctgcttgagtttctttacctgtgcttttcattaggttttcgtggtcgttacaaggttgcggcctcaaatcaggacgaatttgagcaggtttaccggcgtctgcaccatgtcctgcacccaatgcgtggcgaggcaccattcccgttgctgcatcaggacaaaaaacatcaaggcggactctacagactgaaccagcgtctgaccatcaaacacgtattttttggcgggctagccgtcctggtgcttttttatctcttttatctactgcgccttgacgcccagacgcaggacatcctgcaacagttaaataagttactccgataa

SEQ ID NO: 170702 - DNA, 2703 bp, Enterobacter cloacae
atgatccagattgatttgtccacgctggtaaaaagactgaatgccttttcaaaacaggcgctggaagcggctgcgctggagtgcatgaaccagcaggcgtctgaaatcaccaccagccacgtactgctgcaaatgctgggcaccccacgtagcgacctgcgggtcataacagaacgcgccggtataaaccatgatgagcttcgcaaagcgttgacggctgaaaactggcctcagacacgtacatccgacagctacccggcgttttctcccatgttagtcgaatggctgaaggagagctggctgctggcctctgctgacatgcaagagacagagctgcggggcggtactcttctgctcgccctgcttcattctcctttgcgctacataccggcgacggctgcccgcctgttaaccaatattaatcgcgaccatttgagacagaattttacgcagtggaccagtgaatcagcagaatcgatagcgctgcgcgatgcaggtttctcacctaccagcgaagcaaatttaactgacagcgggcttgcacgctatacgaagaacatgaccgaagacgcccgtaacggcagactcgatcccgtactgtgccgtgataatgaaattgacctgatgctcgatattctttgtcgccgtcgcaagaataaccctgtagtcgtaggtgaagcaggcgttggcaaaagcgcgctgattgaaggactggcgttacgcatcgttgccggccaggtaccggaaaagctgcgccactgcgaaatcatgacgctggatctcggtgcattgcaggcaggcgcatcggtaaaaggggaattcgaaaaacgctttaaagggttaatggcagaggttctacagtccccaaaacccatcatcctgtttattgatgaagcccatacgctgataggtgcaggtaaccagcaaggcgggctggatatttccaatctgcttaaacccgctctggctcgcggcgaactgaaaaccatcgcggccaccacctggagcgaatacaaaaaatactttgaaaaagacgctgcgctgtcccggcgttttcagcttgtaaaggtcagtgagccgacggcgacagaagctaccatcattttgcgcggcctggcgacggtgtatgagcagtcgcacggtgtactcattgatgatgacgcactacaggcggtagcaaccttgagtgagcgttatctttccggacgccagttgccggataaggccatagacgtactggataccgcctgtgcccgcgtggcgattaacctctcttcaccaccgaagcaaatctcggcgctgacgacactatgccaccaatatgaagcggaaattcgccagctcgagcgggagattcgtatcggcctgcgtacggacagcgcgcgaatagatgaggtccatacgcagtacgaaacggcacaggcagaacttctggcgcttgaagacgcatggcgtcagcaacaaacgctggtacaggaaattatcgctctgcgtcaggcgctgctgacgaaagttgcagtagcggattacaacgatgtacagccggaaactcaggcaaatgccaatgagggcgaaaaaaatgacgcggtttcaacatctccagtagaacgccttatcgccctaagcgatgagctggatgctctgcaccatacacagctgctggtctcacctcatgtggacaaaaaacagattgcctccgttattgccgaatggacaggcgttcccctcaaccgtctgtcgcagaatgaaatatccgtcatcgccgatctgccttactggttgggtgacacgattaaaggacaggaactggccattaagcatttgcataaacatctgctgaccgcacgggcggacttacgtcgacccggacgaccactcggcgcgtttctgctggcaggccccagcggcgttggcaaaaccgagaccgtgttgcaactggcagagcttctctatggagggcgtcagtatctcaccaccatcaatatgtcggagtttcaggagaaacacaccgtttcgcgtctgattggctcaccgccgggctatatcggctatggcgagggtggtgtactgaccgaagctatccgtcagaaaccgtactctgtcgtgttgctggatgaggtagaaaaagcccatccagatgtactcaatctgttttatcaggcattcgacaagggggaattggccgatggtgaaggccggattattgactgcaaaaacattgtgttcttcctgacctccaaccttggctatcaggttattgtcgaacacgctaatgatccggaaagcatgcacgaagccctgtatccggtgctggcggactttttcaaaccggcgctgctggcacgaatggaggtcgttccttatcttccactgacgcgagaaacgctggccaccattatcgccggaaaacttggccgtctggagagagtactacgctcacgctttgatgcagaagttgtcattgaaccggaagtgacgaacgaaattatgagccgcatcacccgcgctgaaaacggagcccgcatgctggagtcgatcatcgatggtgaaatgttgcctccgctctctctgctgttgctacagaaaatggcggcaaacataaccattacacacatcacgctcaatgcgaaggatggcgtatttgttgcagatgtcagagatgctccggatagcaccttcatgaaggatgaagatgccgtatga

SEQ ID NO: 170703 - DNA, 672 bp, Enterobacter cloacae
atgagtattccgctgaacaggctgttatttatgctgttgttggcatcatctgcgcatgccagtgatgtaccggatgcgcaaagtacgctttcctccatgggcacctgtcgtcgtgaacccgctgcgctggaaaggcttgactgttacgaccgcattctgacgccgcaaacgtccggctttgaaggggcgctggtcaaagcccgttatgaaggtgaagcgtggaaacgcgcctttgagcaggaaaagcagcgggcggataactcaacatcgctaatgatgacccgcatggagggtgaaaatcctatggtcattattaccactccagcgctgggtaacatacctccacgcccggtgctgatgttcagttgcgtggataacatcaccaggatgcaggtcgcgctgacgcattcacttaaaaaaaacgacctacctgtgacgctcagtacggatactgctcagctccgttcacactggttcattcgtgaaaacggaatgctgttagaagccagtcggggattgcccggcatcgacgagatcaagtggcttttcggtgccagtaagctgactgtcgatatgggaaccgaaagcgtcaccggaaaactgacctttaatatcagcgggctggcgcagaccattgccccattgcgggaagcctgccactgggctggataa

SEQ ID NO: 170704 - DNA, 1407 bp, Enterobacter cloacae
atggatttgcataacccggaaacctggctggcagcacttctggctccgctgccgcaagaaaagctggcggaaggcctgtgcgatgatgacccacagtgggaatacatcgatacagagatcgccagactgggatcgttggcgcacggccaggttgatattgcggctcttcagcaacaggggctggagctactggcaacccgcagtaaagattttcgtctgatggcccatcttctcagaaccctgcaacacgcgggggagcacctgctggcaataacgctgctggtacattacgtatccagctattgggctacggcatggccacaaaatctggcgcataaaaaacgcttcgccacgcagataattaaacgttttgaacccggcatcaacagcgttgcgaaacaggctgacagtacaatgaataattcgctgtccggagagctggcgcatcttgctcaactctggcacgaaaataatctccccgagctggctacggcaacggacaacctgtcctacctgtaccagcaagcattccgtgatattaccccgccaattgctgctcccgaatccataccctctcaggattcactgatgcagggggtcagtaattccacccaatcccggacgataaacgctgcgccggttgtcaatattgacagtcacgacgataaagcatggcgtgatacgttgatgaatgttgccagcattttatgtgaccgtcagccggacagcccggcgggttaccgcctgcgccgccatgccctgtggcaaagcatcaccagcgcgccgctggctgaaagcgatggtcgcacgcctctggcggcattctccgccgatatcatggcggactaccagaaccgcgcaaacaacgcggatattgcgctattaaaacaggtggaacagagcctgattctggccccgtactggtttgaaggacatgctctttccgcacaaattgccgcacgtctcggttacagccagatagcaaacgccatcagggacgaaataaacacctttctggcgcgactacctcaactgcgttcaatgctgttcagcgaccattcacctttcatttctgagcagacgcttcgctggctaaagcagggagaaggcgttcagcccgcacgtcagttaatccagtcggacagttcgcccgacgtctggcaacgattccatgaacaagggctcgaagccgcactccagtgcctcgaagacctgccagcaggcgagccccgcgatcgtttcctccggctgtatctcggcgcgcagttaatggaaaaggcgggaatggtgcagcttgcacagcaacactaccggacgttgtttaaaacgggacttcagacaacgctgtccgagtgggaacccgcgttgctggaacaactcgaagaaaagttcacggcagaacagtaa

SEQ ID NO: 170705 - DNA, 3540 bp, Enterobacter cloacae
gtgttcagattacccacttcccggtttctcagtggaatgaagtccactctcagaccggcaatgcctcggtttaaagtctccgtcatatggcttgcagctattgcctggatagtattgctggtatggatctggtggaaaggcccggcatggactttgtatgaacaacactggctagagcctctcaccagtcgctggctggcaacggctgtatggggcctcattaccctgggctggatcatcttgcgggtaatgaaacgcctgcaacaactggagacacagcaaaagcaacagcgcaaagaagaacaggatccagtcagcgtggagatccatcagcagcagcgttatcttgaccgctggctgctgcgcctgcatcgtcatctggacacccgccgcttcctctggcacctgccgtggtatatggtcttaggccccgtcgaaagcggaaagacatcgttgttgcgtgagggcttcccttccgatgtgatttacgagccggttaatacgcgaggcacagcggaatacccggtacggatcaccccccgcgtgggcaaacaggcggttatctttgacgtggatgattcactcatagattcggataaaggcggcaatgatgtgctctgccgccgcctgcgggagcactggctgggatggctggtcaataaccgaatgcgccagccgctgaacggcctgatcctgacgctggatctgcccgatctgttgactgcgacaaaatcccgtcgcgaacaattgttacaatcgctacgtcagaatttgcaggaaattcgtctgcaactgcattgccagttgccagtgtatgtagtactgacaaaactggatctgctgcatggtttcgcctctttatttcagtcactggataaaaagagccgggacagtattctgggtgtaaccttcacccgaaatgcgcatgcagatagcagctggcgcgccgaactccgcgctttctggcaggagtgggggtcgcgacttaatttggccctccccgatttaatgctaactcaggcgggtacgccatgtagaagcgcattattcagctttagccgccagatgcagggggtcgataatccgctgggtgccttactggacggcctgctagacggcgaaaatatggatgtgatgctgcgcggtgtctatctcacatcatctttgcaacgcggtcaggtggacgatctctttactcagtccgcagcacatcagtatcggcttgaaaacagttcgcgggccacatggcctatggtggaaactgttccctatttcacacgaacgctttttccgtctgccctgctggcagagccaaatctcgccggtgaaaatagtctctggctggggaactcccggcgcaggttactggtattttcagcatgcagtgcgtcgctcatcgcgctgctcattggcggctggcatcactactacaataaaaactggcagtccggcattaaggtccttgcgcaggcagaatcctttatgagcgttcctccaccgcagggaattgacgaatacggcaatctgcaactgccattgcttaatcccgtccgcgacgccactctcgcttacggggattatcgcgaacataacgttctcaccgatctggggctgtaccagggaacttatatcggcccgtatgtggagcagacctaccttcagttactggaacagcgctatcttcccgcgctgtttaatggcctgattaaagagatgaataacgcgccgccatcatctgaagaaaagctggcggtactgcgcgtcatacgaatgctggatgataaaagcgggcgtaataatgcagtcgtgaaacagtttatggcgaagcgctggagtgagaaattccacgggcagcgcgatattcaggcgcaattaatggggcatctggattatgcactgtcgcatactgactggcacgcaaagcgtgagcagggtgacagtgatgccatcagccgatatgttccctatgaaaaacgtgttacggcagcacaacaggaactgagtaaactccctatttatcagcgagtttatcaaagtctgcgcaccagagcattcagcgtactgccctctgacttgaacctgcgggatcagatcggcccaagtttcgataaagtttttgtcgctggggatgacagtaagctgatcgtcccacagtttctcacccgctatggcctgcaaagttactttgtaaaacagcgcgatgaactggtgaaactgacggcgatggattcatgggtgctgaacctgacccgtaatgtcacatacagtgaagccgatcgtagagaaatccagcggcatatcactgaacagtatgtcagtgactatactgccacctggcgtgccggaatggataaccttaacgttcgccattatgaggcactaccagaactcaccgatgcgctggagcaagttattagcggcgaccagcctttccagagggcgttgaatacgctgcgggataacacccaacccgccaccctttccgccagactggacgataaagcacgtgaagccgctcaggcagaacttgactatcagttgctgatacgcctggggcgtgaatttgctccggaaaacagcgtgctgaccgaatacaaagataaaaccagtctgttgcagaccgtttatcagcaacttacagaactgcaccgttacctgctggcgatccagaactcacccgtaccaggtaaatcagcgctgaaagccgtacagctcaggctcgatcagaacaacagcgatcctatcttcgccacgcgacaaatggccaaaacgttaccagtaccgcttaaccgatgggttggcgtactggcagaccaggcatggcacgtcgtcatggtggaagcggtacatcacatggagctggaatggaataacaccatagttaaaccctttaacactcagcttggcgataaatatcctttcaatccgcattcacctcaggatgcatccctggacgccttcgagcggttcttccggcctgatggcctgcttgataacttttatcaagaaaaactgaagctgttcattgaaaacgaactgacgtggggtgaggacggtaatgtactgatccgtgaagatatccagcaacaactgaacactgcacagaagatccgcagcacctttttcagccagcagaacgggctgggaactcagtttgccattgaaaccgtggaactgtctgcaaacaaacgccggagcgtgctgaatcttgacgggcaactggtcgactacagtcagggtcggaattataccgctcacctggtatggccaaattccatgcgtgaaggtaatgaaagcaaattgacactggtcagtgccgccagcagcaaagcaccacgcagcgttactttcagcggtccatgggcgcaattccgattgctggaggcgggccagttaaccaatgtgaaggagaataccttcgatctgcgctttaacgttgacggtggctacatgatctacagggtacatgtggacacggaagataacccgtttactggcggattgttcagccagttcaggctccccgatacactttactaa

SEQ ID NO: 170706 - DNA, 1353 bp, Enterobacter cloacae
atgagtaataatgaactcagcgagattatcatcacaggcgaagatccccgtggtttgccggagttcagcgccatccgagaagagatcaataaggccagccatccttcccggccagtgatggactggaagcgggttgaatcgctggcgctggcaattttcaaaaaaagcggtgtggatctgcattccgccacctactacacgctggcacgcacccgtcttcacggactggcagggttctgcgagggtacagagttgctggcggcactcatcagccgtgagtgggataaattctggccgctgaatcctcaggcacgaacagaaatgctcgactggttcaatgcgcgaaccagcactgttctgcgacagcaattaacgttctccactgctgacctgccattgttataccgtgccgagcgggcattgcaggtcatctgcgacgcactccagcaaaaggctgaactgaaacgcctgccgcgtatggaaaacctgctgtggtttatgcaaaacagccgcaaacagcaggaggtaaatcggtcaggcaacgttgccgcacaatccagagtaaggacgctgttttatacgccggatacaccgcaggcgctaacatccgaagccacattatcacctctgccggaaataccggaactgtccgaaatccggattacggtacctgaaaaccggggtgtgaacgcactacccacaaagaaagccggttttcagctacgtggatttattgccggtataatgttagccgggatggtagcccttcttctctggtggtggcaggttcgcccactacagcaacagatagcgcaggtgcgtgacacagcactgggtgccgccgctatctggcttgcatcaccacaactaagcgactatgaacaacggcttaagcctttactcagcatatctcctctccatcctctggaaagcggagtcaggatgactcgtgtcgcagacagccagtggcccgaaagtctgctacagcagcagaccacaacgcagtggaatagtgcgctgaaggcccatgctgatggcagccccaaaatgaaaggatgggagcaaacaagacaggatttacggacgttcgcagaactgctagtgaaacgggaacagaacaaagaagggttcacactttcctatatcaagacggtaatttatcaagctgaaagagcgctgaatcaggacgttcccgtagaatacttgctcacgcaatatgaggcatcaaagattcaggggcaggataccagcgtacaggaaaaagaaattcgagaacgaatagatggcctattaagccgctggctgttactgcaagaaagcattaaaacagaaacaaacagcaatcaaaaataa

SEQ ID NO: 170707 - DNA, 480 bp, Enterobacter cloacae
atggctaaccttacctatttaacactgaacggacaaatgcaaggcctgatttctgccggctgctgctctcaggattcaattggcaataaagcgcaaaccgctcacaaagatcaaattattgttcaggaactgacgcacggtatttcccgccagcaaaacgttaatcaccagatgctgacaataagaaaacctgtcgataagtcttcacctttactaaataaagccatcagtgagaacgaagtcttgtcttgcgagattaacttattccgaaccagtcgcgcaggagtcaatgaattgtactacaaaataaagctgacaaatgcccgaatcatcgatattcagctggatgtagcgcatgctattaatgagaacgatgcccaacccgaggaatccgtttcgtttatttatgaaagtattagctgggatcactgtattgcaggtaccagcgcatacagcctgtggagcgagcggatgttttaa

SEQ ID NO: 170708 - DNA, 279 bp, Enterobacter cloacae
atgactactccgatcattaatttcttctgcatatcagacagcttttgtaaaaaacattcggaagcagtagctaaaatcgagcaaatccggctgatgaaaggccgggagttaccctactggccttactggtgctttttgccagtatcccactggatgaggttgtttatgagtcatcagcagcatcattttaccaaagaactatacctggaaaggcaaaaacgtctgataccgggaacctggcattacagcaaggggatttattcccgcacccggcactga

SEQ ID NO: 170709 - DNA, 732 bp, Enterobacter cloacae
atgattttcagacttgtaattgcattggctctcgcggggggattgtcagggtgtaaggtttcttcaattgatgcaaagaaaaatgaaaaaagaactattccagtagtcacaacctcacaattaacagaacaggatgtctttggtaatgaggccacgctgaatatctctgaagaagacattcaggatgcgcttggtggtgagcaaatcgtcgttcctgtgcattcatctgtcattctggtccagtcgggaaatcaggctccggaagctgtcatgcaacaggaaatgagtaaatattatactgtatcaacatttcccggtataccggctaagaagaacgtagcattttgcaacaaagaagctgttgatacagaaaatatgaattatatgcaggctcttcgttatattgcagcgaaagggaaacagagggcgattttagtttattgggggaggctggaaacaggaagattcgatcctgtaactaagggcgttttgtggtcggaatataagaatgaaaaactcacgcgaggagatactatataccgctatctgttacggtttgctgtggtggatgtcgctaccggggaatgggcaacttattccccgacaaactatgagtatagcaagcaagtatcatttacagattctaatggaattaccgaacaacagcttattcagctcaaagcaaaaacatatgagcgggtagttgcggattttgtgaatagattcaaatag

SEQ ID NO: 170710 - DNA, 216 bp, Enterobacter cloacae
atggtgtttggcctgtcacccggcggaaaggtcaaaatctggtttccggatgttgccggacgccccagcatccccgttaagcccagaacgctggtgacccgctccggcaaggatctgaccttctgcaaagatttcgagacccccgttgaaaactacgttcagtctattgaagagatcggcaaaggcaggacctacccctacggaaactgggattaa

SEQ ID NO: 170711 - DNA, 216 bp, Enterobacter cloacae
atggtgtttggcctgtcacccggcggaaaggtcaaaatctggttttcggatgttgccggacgccccagcatccccgttaagcccagaacgctggtgacccgctccggcaaggatctgactctctgcaaagtcttcgagacccccgttgaaaactacgttcagtctattgaggagattggcaaaggcagaatctacccctacggatactgggattaa

SEQ ID NO: 170712 - DNA, 357 bp, Enterobacter cloacae
atggataactggctgacgctcttcgacggacagacccgctacacgcttgaaataaacgactctcccgtcacgcccgacgtgctgcgttttgagggacgcgaggcgctcagcgagcccttccactggaccatcgacttcaccaccccgcaggcaaacatcactccggaacaggtcctgatgaagcacgccaccctgcgcatgcgcagcgggaaggcggtgcacggcatcatcacccgtctggagtggctttccaccaccgccgaccacccgccagtgccgtgtctttcagaaccagtccgtgccggaagtggtggagcaggtattacgcggccacgggctggaaggcgcggattttga

SEQ ID NO: 170713 - DNA, 981 bp, Enterobacter cloacae
atgtcccaatctttaaaggcaaaatcattatcaccagatatgaaggtttatagatctcttctaaagagaagtcttgatgcatatatactgtctttggagatttataatagacccagtttagataatcgagttgaagcattttgtatattgtcagtaaatgcatgggagcttttattaaaagccgaattaataaaatctttaggaatgcaggctgtttttaataaaaatggatattcaatctgcatctctgatgcaattaataaacgattgcaacaaaatgatccagtaaagaaaaatttagatgtattaatcgagctgagggatggtgcaatacatcttcttcttccagagttgcaaccggagttatctcggctatttcaagcaaatgttttgaattttcaacaaagatatcttaatgaaactggaatgtctcctttggcagggcaaagtgtaggaatgcttagtttggttattgatggacctaaaagcgatttagtaacaattaaagaaaattatggtgagatgaccgcgaatgtagcaaaggaatttttgaatcgcttttacaatattattgtagaacaaaattctaatgaatttagcataccgattgattataagctaactctaacaaagtcagaaaaagatagcgatctttcattaggaattggaaataatggtagtaatgccatcattatcagggaaacaagggatccggatattacacatccttactatcaaggttccgcaatacaacgtataaatcaattacagaaaaataacgttataactagatactcttttaatgccattattaagaaacataatatacaaaaatcaaaacgatccgaaatgcattatacaattgatgaacgtcatcgatactctgaaaaattcatacaatgggttgtaaaaagtttggagcaaccgaaatggttagacgaagctatagaattttataaaaaacagatgaagaaaaaatag

SEQ ID NO: 170714 - DNA, 714 bp, Enterobacter cloacae
atgtcgaaaaataaaaaaatcagtgcaaatggccttgtgtcatttgtgcgtaatgtttgtatttttgcggcttttattttgtgttggtctttgatttcgacgatattctcacaggaattatatgatttagatttttgtttgcaaagtgaatgcattgatttcttttcgaataaaatttcgggtgtcgttaagttggcgcaattttttgggggtgttattactttaattgcggcgcttggtggtgctatcattgcattgagaacatacatttcaggtgttgataatagtaacataacaaatcatatagctcatttttcaatgttcagagattttgtgaatttagaagtttcgaagaggaaaaaaatttctcctgatagtgtggatatccatttatggtatagcaccatatttcccgagtctagaaatgggaatctaactcactgtgatttttataaaaacaacctaggtgaaataaagggagtgattgaggatgctaattgtaatattgctgacttaactggcaagtacaaatatcaaacacatcagcataaaatgaaaaaatctttggaaaaaattggtattgcgataaataatgggcctaaaaatatttttatagatattgagtttgagatactgagtctcatcgattcagtaaatcaaacatttattggtgagtgtccagaactttgccaaattgaaaggaaatatagttag

SEQ ID NO: 170715 - DNA, 1191 bp, Enterobacter cloacae
atgtcttctgaactacccataaaaaaaagcaattctggaatttctaccttagattctctttctaaaaccttaggtttctctcttgaagaacttgaggaaataagaagtattccgctagaaaaacgatattttaagttggaaaaaccgaaaacagatggaacgatgagaactgtttataggcctcaccataagctaaaacggttgcaacgtagaatcaataaaagaatatttcgtgaactggtaatatggccggattttttatttggttcggttcctaatgataatgacgatgaagattctattaaaagggattatataacttgtgctagtttgcactgctctgcaaaatcaattcttaaaatagatataaaaaacttctttgataatatacataaagatttggtaggtgatatttttgaagggtttttatgtattaaatcagaagcaaaagaatacatgattgatgtttgttgtgctggggagtttattgttcaaggagcgttgacttcaagttatatagcgtcattgtgtttatatgatgttgaaacgcaggtgtatcgtagggcaaaaaggaaaggtcttacctatacaaggcttgttgatgacattactgtgtcttcaaaaatttatgattttgatttcacccagataagaaagcatattgaggatatgcttgctgaaaaagatcttccaattaatttcgacaaatcaggtgtttttcaaatatcaactaaacctcttcttgttcatggtttaagaattgatcataataaaccaagattaccttcgaatgaagttaaacgaattcgtgcgtcattacacaacttaattaataatgcaacaaaaaataatagtaaaacttctttaccatatagaatcgaatataatagatgtatggggagaattaataaattaggaaggctaggacatgaaaagcatgctgtttttatggagaagataaaacgagttcgaccaatgccatccttttctgatgttaaagagtgcaagaaaaagctgaaaaaacttgaggaacttcatgccaaaggattcaataaaagtgaacgttatttaagaaattttcaattggttggacatagcatatctctcataaaaagaagtgattcattttctattctggctaaagagttaaggatgagattaaataggattaaacccaatgtcgaaaaataa

SEQ ID NO: 170716 - DNA, 405 bp, Enterobacter cloacae
atgcgccagcgcgcggtaaccggcgatgaccgctgctggtcaacacagggactgctggattcggtgctgccgggacacggcggcgaaattgcgccggtcatctgttttggcatttcacaggatcgggattccgctcccgctatcgtgagtccgcacggtttttccgtcgaatggctgcgtctttctgaggatcacgttgtgggccgacacctgtgcccggatattcaggtcatcatggtctttaaaggccagttggaggtcacatggaacgaggagatcctgcaacaggcgagagaacacaatcgctgtctcgatcccgatggctacgtggccgatgccgacttcctgcccgccacggcccgtcgggccggtgcaataatggagaaatggcaggcggatgcctga

SEQ ID NO: 170717 - DNA, 987 bp, Enterobacter cloacae
atggctgaacgtgaatttttcagtgcttccttaatcactcaagggcagcataaattttatacattaactctccctattgatgttattgcagaatgttgctcaactaacccacgtgatgaagatccagtgtcgggatttcaacgttcattggatgttaaaagggcagcggctatcgcagagtatatacgtaaaggtaatgttattccttcaagtattattatttccgctcaacctaaagcaggttttgaatatttaagtaaaaataaaactgtaggatttaatgttgacccatcttcatttctaatcatagatggccaacatcgcgtgtatggttttagaatgttgaacgaaatgggcttcgatgaaattaaactgcgagttcctgtcgttatttttaccgagctttctcccgttcaggaagccaagatatttatcgatgttaatactcagcagaagccagttccgaaagagttgttacttgacataaagaaacttgcagctactgaaacaagtgaagaagcgctcttagatattatatttacgttgtttgagcaacaaaatgatagttgcttaaaaaataagctgtcacgattcgaaaaacaacgctcaaagttgtcaaaggtaactttctacgaagctttcaaacctttattgaaaacgttcaatattgacaacccggaaaatttatatggaattatcaatgcttacttatatgcagttaaagatgcattgcagcattattcagttgattttaatgccatcattactaagccgacgtcctttaagatattaatagggcatagcaaggctatcatatctattatttctgataatgcgccagacaaactttcactgattagtgaacataagcgttatctctcaagaagcatcgataataatgccgaagctttactgaatagcagaacaaccgctaaatctatagaggcattggacaaaaaacttcttaagcgaaatttgacgatatga

SEQ ID NO: 170718 - DNA, 972 bp, Enterobacter cloacae
atgagtaacgatgataaactactgcgcctcttttcttatttttccagaagcttggttgctggagcgagaaagaaaagcgttactagattcagtgaaaatttagaaaacttagactttcttgtgagaggcttcactcctgccgcttctaaaactcctgcttcagcaaccactccagcaattcctgcaacatcacaactaattgatatgttaatgatagatgatgtgaagtttggaaaatttatagcaggagaagctcataaattttttcttgcagcgatggtttccttagaaagatcgcggcaagtgcagcagcataacttgtcatggcaagtagttgaacattattacgcggcatattacgcagtccattatctaatgcgaatctttggttatagcttgacgaatattgatgacaaagctattaaaaagatcaaagaaggttctgtggtgccaatggatggaatacgttcggggcttagtacaattgagttttcaattgactgtaaggaagtgataattacaaaaaatgaaaaaggaggtggttcccataaggatgcatgggcgatatggataaaaatattaagccagttgattgtcgagtgtgaaaaagaccacggtgagtattcatcgttagaaattgatttattggcccacaaaagttttatcgctataaacgatcaaaaattcaacccctcagaaattcgaggggaggtgaattatcaatttaaaggtaattcttggtgcttcgaagatgatactaatgtccgtttaagtttggtgactaaagagataatgaaagatgattataaccttactgacgcacaagataaaatattgaaattgataaataacaataagtttattattagcttagcgaggcgattttttgagtactcatctgctgaatataagaatgggatatgtcggagcctacaaaaccaatttaaaaataaaatcgcaactatcatataa

SEQ ID NO: 170719 - DNA, 156 bp, Enterobacter cloacae
atgcaaatcaaatacgcctgcacctaccccttagtgggtatatctatgatttgtcaggatttttataagtggcggatattgttcgttttttgtgcttgcctgttttttgcacagttttggtggggttttttacgaatcggcagtcagagcgggtga

SEQ ID NO: 170720 - DNA, 507 bp, Enterobacter cloacae
atgaatcttagtattaatcttaataaaattaaaagaagatgctttttgtttttttgtatcttcttttatggtgcttttgcctggggtttttattgggctagtgtgcccgatataaccgatattattgaatccagaagcattatttattttttctggggttctttttttatgttgtttgttttcccggtagcttgttgctttgttttagttattgtctatatgacattttcgaagaacatggagccacccaagtttttcgctaaaggaattaccgtcgcttttcactttatgggggcaggatttgtcattggcaacatcctctcttttatcgtcatattttatccccttggaaccaactatgtcttatgcgaacgttcagggccgttttctggaacgtattacacccggaccgaagagatttgcacacaggtaaaacacctgctcaaaacgagagccagagatatcgaaaaactcaatgacaaactggacggcgtatcgtcgcagtaa

SEQ ID NO: 170721 - DNA, 879 bp, Enterobacter cloacae
atgaaagggtattcggactggataaggaatcatcgtgaagatatcctcaaaggaaataactggcagcgtaatcagcgtttcgaaaatgaaatcaggcagctgaaaaatagtctggtcaacaatgctcgtcacattatgctgctcacgcctgacgaggcgcagggtgtggttgacgatttgttaggtagtcagcctgtcagcttttccacaacctatgccggtaacatcaaagagacggtttctgcggctaaaagtctgtcaaaactctttacttatcagcaggctggaaagattgttttcacgctaaaaggctttgggatcaaagccacacagtatgtttatcggggaaagctgtatgtgaagattacgggctacccttctctacgacgcattcttaacggaacgcgttaccggattaatcatcccaaagtgctcgaggtgggtataggaagtgccgggtttcgaaacggtattatgtcaggagccagattctgcatctggttttcagcttgctggcggctggtggagttgatctttaaatccgagcatgacgtcgccgcatttctggggaatgtcacgatggacgtggctaaggtgattgtaggggtttttatttcgagattgcttggggggtgggcctcgttggtaatatcaccatttatagcgagtgcagctgttcctgtttggggacagatagtttgtgtagttgtattaggcgtagttattgttaataagctaaatgatctggacaatcggtatgatttgtcaaataaacttatagattgtataaaaaagggactgaaagagcagcaaaaaatcgcagagtggaaatttcaacattcggtatatggaagttcattttacctcgggaactactga

SEQ ID NO: 170722 - DNA, 366 bp, Enterobacter cloacae
atgcactcttccaccctgtcccatcaaattctggcgatcgtggtacagtggggaggcctgcgtgccgatcagatctggtcgcagctatgccaacgagggcgatttcaaaaagtcagaatcgatgacttcaaaacgttattgaagcatatgggggagcaccagtttctgaccaagctatcaagcggtggactggttctgggcgtcgaaggcaaacgtcagctgaatcagtataccttttatgcagtgttcagcacgccggaagagtttcgtattgtggcggggaataaaacactgggctccattcccgttgattcacgactgatgcctgacctacgcattatttttggcggtcgacgctggaagtaa

SEQ ID NO: 170723 - DNA, 225 bp, Enterobacter cloacae
atgttcattcatgatgttgtccgccaggaaatgctcaccatttatcgggagggcgactatcgcattaccgttggcgatcgcaaggccaattttgccgataccacgggcagaaacctgtttgatgaagggcggcgctgttttcacaataataatctgcctttggaatgttttattcagcagggctgcatatctacactcttccctggctgggcgatcaaaccgtaa

SEQ ID NO: 170724 - DNA, 342 bp, Enterobacter cloacae
atgttttattcagcagggctgcatatctacactcttccctggctgggcgatcaaaccgtaaacacgctgtcggcattgtttttccagcgcgatttcaaggcgggctcatttgctggtgtggttgaagtagaaaaaactacgatctcggaggttaaactggcgttatccagcgcacttctggaaggtttgtcttccgaatcccgtcttgccgaaagcatcgctgaaaagtgcctcgaaaaatatgatgagtatttaccagagacgttgctgtcgcagaagtattggttacgtgttttaaatgttgagcgcgtgacggagtggttacagggacatttgtattaa

SEQ ID NO: 170725 - DNA, 645 bp, Enterobacter cloacae
atgattattgtgaaagccagctccagtgaagaagattatgaattactggctgaagatctctatcattgcgtgaagttttttactttgattaatgactcaaaatggcatttagcagaggagcttaagagcataaacttggatttacctgcaagttattcattttattatccagcgtcatggttatattcagaaagatataataatgaaaaaatgagttattattctctgtctttgaaaggcgaaacaagggtacatggtgttattgatggatattttttacactatgatgcgacaatcaataaagaccaaatttgtgatttaattattagcaatatagaagtggttagctacaattatattaaagaaacgttttcaaaacaagttggcgaaatttttaataaaaacattacagaactgtggaaaggcgagtttaatgtaaaaaattcagaggggcggggaggattattaattatatttgtgggtaaagtccaggggtgttggttctttataattggctcgcttacctctagggagcaaagttttgcatcatgggcagcaggcaaacgagcgatagatattattttgaactctcttaacaattacgatttagaatatgaagatcagttctatcatgataagcgttaa

SEQ ID NO: 170726 - DNA, 591 bp, Enterobacter cloacae
atgatgaaagtactgataatgtatcatcctgactttgcgtctatgggaaagtttgaacgtaaactttctcgtatattttctcagtcaaataactatcaagtattttattttcacgatgataataatcttattaatcagtattttagtattgatttactgacccagcttacccctgatgttctaacagacctattatctattggggtgactcatgcagttttatttgattcatcaacacaaccacaatttctttctcattacaaagatttatcagaaaaaattcctgtacgttatataaaagataacattacattcacttcaaataaagatagaggtgagcatttcgatatctattgtggtagaggtactttatggggaaatccttatgcaataggtgttgatggtgatcgtgaggaagttataagaaagttcaaatacgactttgatcgagactatctcaagggtggggctgagttcaaagaaaagctgaaagccctgagaggacagactttaggatgtcactgtaaaccgtatgcatgtcattgcgacgttctttctcaatatttaaatgaattggatgatggtgaatag

SEQ ID NO: 170727 - DNA, 1320 bp, Enterobacter cloacae; identical to SEQ ID NO: 159336

SEQ ID NO: 170728 - DNA, 336 bp, Enterobacter cloacae
atgaatacctggctggtcggctttgccgttgaaatcagcggcgtggaaatgatggtgcatcacatgatatcagcaaccggcctggcgcaggctgaatcgggcgcgatacagatgggccggacgtggtgggacagtctgctgcgcgaggatgaccgtcaccgctggcaatatccggatggcgtggtctggtttaacagtatcatcctgctcgatgacgtggagagcagtatcctgcgcgggctgaagtttctggatacgtgggcagtaaccggcgtgacggatacgcccggcctctgcgatgattacggtaatgactggcgggatatcacccgctga

SEQ ID NO: 170729 - DNA, 234 bp, Enterobacter cloacae
atgaaaaaacgcatgaccgtgaaagcttttataaacaggctgtcgcactaccccgacgacgcgctgtgctgcggcacgttctggctggccgatgattttctctcactggacggctcgctcacggacggcgacatcgatgcagcgatggagcgggcgcaggacagccatgatgcgaatgacggatttaactggagccacctgcaggcggcgattgatgaggtaaaacgtgtatga

SEQ ID NO: 170730 - DNA, 243 bp, Enterobacter cloacae; identical to SEQ ID NO: 96780

SEQ ID NO: 170731 - DNA, 450 bp, Enterobacter cloacae; identical to SEQ ID NO: 96779

SEQ ID NO: 170732 - DNA, 1275 bp, Enterobacter cloacae; identical to SEQ ID NO: 96778

SEQ ID NO: 170733 - DNA, 390 bp, Enterobacter cloacae; identical to SEQ ID NO: 96777

SEQ ID NO: 170734 - DNA, 318 bp, Enterobacter cloacae
atggcagacgtatcgaaactcaggagaaagggaagtcttggtgcacctcctccacctgatgacgttgcaaccagcctaaacgctcctgaaattgctccagttgtaactgagtcattgaccgcggccgagcctgtccagccatatgtcagacgtgatggtcgctctgctcgcaaaactaaccggacccttgcactagctacaagagtgactccagattttgatcgcgagattcgagatatagctgaacgtgagggcatcctgatagttgaggttcttgagcgtgcgcttgaagcttataaagaaaaaatgtcttattga

SEQ ID NO: 170735 - DNA, 630 bp, Enterobacter cloacae
atggcttggaaagtggcgtttatctcgcagaaaggtggtgtcggaaaaagtacagctgctcgtgctcttgctcgtgaagctactgtaggggggatcaaaactaaaattgctgatcttgaccttgaacaagcaacaagttttgaatggaatagacgccgcctggctgaagggttgcctccagttgcctctgttgaggtgttttctaccgcagctcaggctatcgcatcagctgaagactttgagttactaatttttgatggccctgctcgtgcaagtaaaggaacatcagaactagccaaaattgcggatctcattgtacaaccaacaggtgcatcacttgacgacctggttcctgctataaaggtttttcatgcactggtgaaggaaggggtgccgcgttcaaagcttgtattctcacttagccgagttggaactgaggctgaagaaattgaagcaagagcatatatagagcaagctggatatgaaacgttatctgggtgcctctttgaaaaaccggcgtatcgaaaagctatgaatgcgggcctcgctgtaactgagactcgttacaaaggactgaacgaacgtgctgatgaactgattcagtcgattattaataaaataggagattag

SEQ ID NO: 170736 - DNA, 324 bp, Enterobacter cloacae
atggatgaacatcatgcgttcggctgcagcgttctcataaagctgtacttcgctttgcgcagtgcggtgttcaaacatgtcagcaaagacaagaagaacggcgcccttaacggctgcaggaatatcagctgcaaccttccatgctggttcatcgcaccagcgtatgcagtagtcaaaagcggcctgagcgtacagggtgatcagctcgtccctgtcgtcttcctcaaactcaatctgctgcttaaacaggcggaggcctatgacatccagaacatctatcgccatacgttaaaagggcgggtcaccccgccccctccatcatga

SEQ ID NO: 170737 - DNA, 1068 bp, Enterobacter cloacae
ttgtgcctcaagacgggtaacatccgtgacgcgtgcttccgtctcagtggcgatcacctcccggagctgttcgaatgtcgcagagttagccccctgctgcgcagtctggcgcacaacaacatcagcaatagccagggcgttcccaatgattgcttctgctgtctgcttattcgaacctacggcggcagccagaccatcggcgttctccttaatcgcgtcagaaagttcggccagtttctcgctgctggctacagcactctcaatcagatccttaaatacctcagaatctttaatctcctccaggatcacatcggtgatgtcggatacatcgatgctggcctgcccgcgcacccagtcggtccatccgctctgattcccgatcctgtcgacaagccgcgcctggtaccagaattcctgccccgccttcagccccatctgctgataaagtttctgcggatacggtacagatgccaaaagcatcggattcgaaccgtcagcggcaatgctgtattgcagttcagtgctcagggtgtcgccggtattagccgggaacccccaggtaacattgataccaaaaacaacatcttcagaggccgtaaggccgacaggttttggaacgtcacccgtgcgtccggtaagatgagtcaacgcagacgtggcccagagactcgatgcaccgccggagttgatcgcgcgtacacggaccagataatcgccctcgaagatgccaggcacttcgatattgcgaagaccggtctccggtacgttaacccactcattgtcaccgcgcttccactgcacccgataggctatgacatccgcctgtggtttgccgttcttgtcgaccggcgcatcccaggatgccgtcagggtagccactcgctgcccctggcgcactgcgtcatagctcgctaccacgatattggtcggctggttgacgaggccggttggtatcagactaattggcggcgtgtccatgcgggcattgttatcaacagcgtcatatttcgacgtgttatactccgctccagtgatggtgaaggtgttttcctcatcatcaaattttag

SEQ ID NO: 170738 - DNA, 162 bp, Enterobacter cloacae
atggttgcctcagtaatgaattttcgcgcaggggatcaggtcatccttcagagcggtgagcacttctttagccagttcgcgtatttgctcgagaaagctattaaggccacccgcgctataaagcgctggtgcttgctcaggcttgatatcgatgacggttaa

SEQ ID NO: 170739 - DNA, 450 bp, Enterobacter cloacae; identical to SEQ ID NO: 168758

SEQ ID NO: 170740 - DNA, 1077 bp, Enterobacter cloacae
atgtatttttctaaagacacactggcggcaaactcccgcctcggcggccactggaatgagttgtgggccaaccgtaacatgtggaatcgtcagcacgattccatcattgctgctaaccgtgctgacatgactccagacatgctggcctgtaacgccgttggcggtttctcccgtgacttctgggctgagattgacaaccaggtgctgcagctgcgcgaccaggaagtcggcatggaaatcgtgaacgacctgatcggcgttcagacggtgctgccggtcggtaaaaccgccaagttgtataacgtagttggcgacatcgctgacgacgtgttagtaagcatcgatggtcaggcgccattctccttcgatcacactgactatgcgagcgacggtgacccgattccggtattcactgctgcttacggtgttaactggcgtcatgctgctggcctgaactctgtgggcattgatctggtcctggactcgcagatggctaagatgcgcaagttcaaccagaaacgcgtcaactactacctgaacggcgattcgaaaattcaggttcagtcctacccggctcagggcatcaagaaccaccgcaacaccaagaagattaacctcgggtccggtgctggtggcgcgaatatcgacctgaccaccgctgacatgaccgcgatctttgcgttcttcggtaaaggcgcattcggcaccaccgcccgcacgaacaaagtcgccgcatacgatgtgatgtgggtttccccggaaatctgggcaaacctggcgcagccgtacgtggtgaatggcgttgtaagcggcactgtattgcaggcggtgctgccgttcgcaccggtgaaagaaatccgcatgagcttcgcgctgaccggtaacgagtttatcgcgtacgttcgtcgtcgtgacgtgatctccccactggtgggtatggctgtcggcgttgttccactgccgcgtccactgcctaacgttaactacaacttccagattatgtctgctgagggtctgcaaattaccgcagacgatcagggcctgtctggcgttgtctacggcgctaacctggcgtaa

SEQ ID NO: 170741 - DNA, 618 bp, Enterobacter cloacae
atgatggagcaacgcacccctgaatggtttgctgcgcgctgcggcaaggtcacagccagtcgcctggctgatgtcatggcccggactaagtcgggctactccaccagccgccagaactacatggccgagctgatttgccaacgactgaccgggaagctggaggaaggtttttcgaatgccgcgatgttgcgcggcactgaacttgagccagtggcgcgcgaaatgtacgcgctgaatgagttcgatgcggaaatcactgaagttggactcatcgatcacccaaccatacccggattcgcagccagcccggacggacttgttaacgatgacgggcttatcgaaatcaaatgccccaacacctggacccatcttgaaacgatgaaaactggcgagccaaagcgccagtacatgctgcaaatgcatgcgcagatgatgtgcaccgggcggaaatggtgtgatttcgttagtttcgatgatcgcctgccgcctgacctcgcctatttcaagaagcgcattcatttcgatgaagagctggcgcgcgaaatcgagtctgaggttaagagcttcattgcagatctggaatctgaaattcagaaaatcacagagcgtgcagcatga

SEQ ID NO: 170742 - DNA, 297 bp, Enterobacter cloacae
atgccactggcgaagatagcgatgtctatcgtgccggttgcaggagcgtcatcatttgttgtcggagggctgaaaaacctgactgtgttaccgtcgaagtcaattgtattaccgctgttacagcgcccgaaaacgacatacttcgacttgtcgtatcctgctatcgtgggaaccgcccaccccccggtcggaacattaacggtacccttccagatacactgccctgactgcgtggcattggttatcgaggtgaagtcagtactgtcgctgataagcaggcccaccccgcttcgctga

SEQ ID NO: 170743 - DNA, 246 bp, Enterobacter cloacae
atgaagcgctacgggcaggtttttctgctggccatcgggtttgatctctactggacgctggtggtgctgtttcgcgagcaggggctggtcatctggatcgcgctggcggtgctggcctggctgttgttaccgccagcataccgggtatacgcccttgtgctggctgcctcgggcgcgctgcttgacgcgctctgggcgctgacggggctgattgcgttcacgggcgcatcgctgatgccgctgtag

SEQ ID NO: 170744 - DNA, 684 bp, Enterobacter cloacae
atgaatgctgctatccaatctatctgctacaacatttcccaacatcctgaagttagtaataccacgttgaaacgttctcaccttcacgaggtgattgctgctcttttagggtatgccagtcatgcggcactcatccaggaaggaaaagaaacctcacaagaatatgaattctctgatgctgaatttgtggtgctgaatctaccgatgggtacagaaagagcgagtaagtttcttctcaccaatgaaattttccgcatttgtgtcttggaactaaagtcagggatgcctgtacccgtatttgagtccgtagaggatttttatgatgataaggttcgggaactgctcgaagaagcgatatatcaagaagcaggagaatcaggggcgatggatgagagtaacgcttacttcgaatatcttcctgacatggattataagcttgaaaccagtggcaatctctggacttcagttgatgaatggtcaattgcagatactggtacgctctcaggcgaatacgatcctgagggtgagcggatgtataacggacataccttaaatgttaaaggtaagttcatttttgctaaggcgggtcgtgctggcctagttttgttagatgatagcactgaatgctttatatggcctgatgagtcttggcgcgattatgaaccgttagaggctgaaggttaa

SEQ ID NO: 170745 - DNA, 210 bp, Enterobacter cloacae
atgaagaaaattttactatgtgttgtggcactgctgccgctggcggctcatgcaggaaaaatcaccatgagcaaccccgacgaacaagagttacagggcgggaaacggctttgtacttacgaaaacagcatttacttgttcacgctggtgacgcattcgcagtcctgcccgtattcgaagacgttctcaacctgggacaacgaaaagtag

SEQ ID NO: 170746 - DNA, 429 bp, Enterobacter cloacae
atgacactgaacagcattcgaaatgctctgtttgcagcgatgcacggcatgacgccggaagagtacgaatttcaaaaagcgcgggacaatctgaagagcgtcaccgataactttctggataaacatccggaatatctccgaaggagatttgccgaaggcaaacccgctaacgggttagaattgctcaaatcagccctggctgacacacccacgggtaaacggggcgaagccctctcgccaatgcgagacacctttggtgctgaacaacggattaaaaaatcgttgggtgctgatagccgtccggttgtctcacataccgctgaccacatcgatcctgaaatgctggcgaaagctaaagcagcggctgctgctctcgcaaaatccgatcctgatcgttacggcaatatcatcaagcagcagggggtgtga

SEQ ID NO: 170747 - DNA, 858 bp, Enterobacter cloacae
atggcgcaacgtggtaatctctatcgacgtcctagcgggatctatgttctgcggataaccgttccggttcggtatcgtgccctgataggacagcgtgaaatacatgcatctacccgcacaacccacctcgcaaatgctaaggtaatcgccacgcgtttgttggagaagtggtatgcgtctctggaagagttcaagcaagtggataaagagaaaattcggggaaacgccccgttgttagcgggggctggcaaaatcagcttggctctgttttgcgaatcatttgatgtggtgcttgaaacggttgttccgcatcttttggcagacaatattccgctgtatgcttttgtagatagccagcggggttttctgattgatgattttactgccattgatcgtgaccctgatacgcatggctttgttttaaacgacgttgctcattacggcactgaggctatggttaacggctatatgcagatttacatgccgctacatgccctcaataaattggttaaagggctatcaacggaaataactgcattcagggctaccaacggtaatccccttgctctttggctacttgacttgcccggggttacgatagattcaagttctttatttatcaacaatgtgcaggctgaaaagctgcgtagcatgtgggataaagcgtttgcgaaatctgagcctgaattacctcctgttccggctgttgtgccaccaccaccgccccctcctttgatcatctctaacccgttttgcaatccactacacgcgtcaaaaacggtttcagaagtgttggaggagttcattgcgtataagaactcaggagaggctttgttgaataaatcagatttcgggtaa

SEQ ID NO: 170748 - DNA, 753 bp, Enterobacter cloacae
atgtcaaaaacacggtttagtaagcccggtttttcagtcaagtctatgctgaccattattttaataactgcatcatccacgtcttatgcagcagagagtattgatcaactggcaacacgaattggtatggatcacttccgtgaagcgataaaaaaaggcgatcgcaacgcctttaaaacgttgccagcaaaaggctataaaagcggcttttccggactactcatcaaaacgaatacttacattagccccgacgatagttttgcggaatgcgacacagatactgtctttgtttcagttaaagaacgtaagaccattccaggttgtcggatttctttaaagctggcaagtaaagatgcttacgggagctatcatgatagtggcattcgagtcgaatacggtatcgcgaccgattcgaagaagtttatcgccaacaattcaatgtgggcgcagcatgctatcagcggtgataaagtgctggaaggtgctctccacccggatagaacgaataaccataaagatcaaatgtgcatggatatggctcaattcaccgcaaacgtaaccaaaggccgaaacggaggaatgaccaaagcagactattatcagcgtctcgataatatgaatggcaagtccgaagtcacaccccagatgattacactctataagaccttcgttgactatgtatatgaacaccctaagcaagatgttcaggtttcagcggcatttatttacactaactgcatgaataaattataa

SEQ ID NO: 170749 - DNA, 1776 bp, Enterobacter cloacae
atgacatatacgcagctttcagacagttctttttggtcagcattgcaacagagaaaagatctagaaaaatatggcaatttaaattgtgcattatatgcgatagagttacacaacaatatagatagcattgaattaatagctcccgacataataacagagggcggggatgatgagaacatagatatattaatgaccgacagagaaagcaaacaaatatatcttatacagtcttatcaatctactatattccgacctcaaggagccaaaccatctaaagctcaagaaacggcttatgcagagaccgcgcttctttccgctgatatagagaatatacctctgaggataagagatcaggtaaaagatgcaagagatgccttaaaaaacaatgaaattgagaaaataaatgtatggtttgttcataattgccctgaaacacatgactgtgaaaaacctcttcactcgattggtcgctcaattatggataaattaaaatcaatttataacattgacaatttgagaataagttctaagcaaatgggcttaagttcacttgatgagttatataactctcaacacagtccaattttgatttcagataaaatatcgctgaccaacatgcatggcttttatcaaaattccaatgaaaactgggcttcattttccacccttatgccagggaagtttattaaaaatctatacaatggctacggtgaagataaattattcagcgctaatgtgagatcttatttaggaagtaataaaaaagacctctcgataaacaatgagatacaaaacacagctaaaacacaccctggaaatttctttgtatttaataacggtatcactgccttagttcatgattttgagattgatttcattgacgaatccaaaacactcggtcaaattaaaagtgttactggtatctctattgttaatggcgcacaaactactggtagcatctcaaatttagggaaagatccagatgatacactaaatgttgcgattaggttcataaaagtgaacaatcccgagctaatcaatgaaattactctcgcgaataattcacaaaacaaggtcttgcgctcagattttcgctctagtgattctatacaaaaaagattaagaaaggatttcgagaaaaataaagaagctctatatacaggtggccttcgccaagtattaactccggctcaaaaaagaattttattaccaacggatacagttgcacaaatcctgatcgcttttcatgctcatcctacaagtgcataccatcgaaaaaaagatatttgggatgatgaggatctctataaaaaagcttttgatgatacaattacattaggtcatattatatttgtctattctttaaatgaagctataagccagataaaatcggatttcaatgaacagtttaggcataacaaacttcctgaaatagatactattaagcataaattattgactcaaccaggtgtatcattgctaatgattcatgctatagcaagcatattggaaataatattaggttcagcgatacctaataaatacacattatccttcaaagatggtgtcaacagagataatgcgaaggaattatggctccctgtaataaagagagtattaacaagatctgcattgttagaaccagcaacagcaggtaggttatctaaaagcaaagaaattacagagatcatctctcgtttccagagtgatatggatatgtatagagatgattttaaagaacttctccctcaattcatcgcaaacgtccattattag

SEQ ID NO: 170750 - DNA, 1446 bp, Enterobacter cloacae
atgtttattaaaaaactgaagatagaaaattttaaagggtatcacggagaagataatgagttggaattcaatatccctgatggagaaacggaaggtagtggacttaatatatttgtgggtgaaaacaacgccggaaaatccactatatttgaaatcatagactttattaaggatggaaccaaaaagaatattgaggatcttatatgtaaatcagacccggctaatatagctgagaagctttcagccgagctaaccttcactggaaatttatcagaagtaattgccgctcatgtacaagctaataaagttgcagcattcacctcgcatgtttttgagtacgagggtgttaattatttcagagtgaagaggtgcagtgaggtaggggagaagaaaatattattttggaacggaaatgaatttgttaacccaagtggtatagatgccccatttaagaagttttatgataataacttcatttgggctgatacaaacccaagcaatgaagcaaagtttggctctacaactatatgtggttcgcttctaaaagaaatagctttaggccatattgaaacggatgagtatagagcattttctgagcaataccatcgcgtattcaatcatcctgaatcagagttgagacagaaaatattattagtcgaaaatcaagttaaagaagttttctcatctcagtttggtatggcagatatttctttcatttttgaagagttgcaggtagagaatttcttcaaaactatttccatcatgattgatgatggagttaatgtcccaatgggagaaaaggggcatggtatgcaaagggctctagccttatcattacttcaggtgtacgctgagataacgtgtaatgcacatggtgcgggaattagtaaaccattttatcttttcattgacgaacctgaaatatgtcttcatccttcagggcagcaaaagcttttagaggctttaatgattatctccaaaagtagacaggtttttgttacaacgcattctcctttccttttatcctccccttatcttaaaaacatcggtctgtttgttttcaaaaaagagaataacaaaaatgttgtcgaaagggctgatacttctccatggttcccttggtctccatcgtggggggagattaatttcaaagcatacaatttagcaaccgttgaattgcataatgaattatatggttatttgcaggagaaaaactcctgtccaagcgaaaaaacaatggagcaatggctaaattcaaagggaattgcgtttgataaagaatgggttaaagagtttaaaggtgcggcacaaccgccagcggatactacattacaaacattcatccgtaatcatatacaccacccagagaatgttacaatgcaatctcatcgctatacacaacaagaattactaacttcaatccaacaaatggttgggcttctataa

SEQ ID NO: 170751 - DNA, 426 bp, Enterobacter cloacae
atgagtatttaccttgatgttgaaaaaatggttgaacgtatcgatcagcgtgatttgagtcgctcaactcttcagggacaacgtagccgattcaaagccgccgggcgtaccgctgaagcggaagcaatcggcaaggctctggagatgaccagatccagcgcctctggcgtcctccgccagtctcagcgcctcgcagggaaaattacagagatggacgcagagaaggcaatagagcttaaagcaactgtttcgctgttcgcttccaagtctacagacatgcaagcctccattgtgctggcgttccaatccctctttgaggctaaaggcgtcccgatggaatacgacgaagtgatggcctttatcatgctgcaagcggcggatcaatttgagcgtatcaccggagagcttcccgttatcgttcactaa

SEQ ID NO: 170752 - DNA, 246 bp, Enterobacter cloacae
atgagcaaatatcagccttatgcagatttgagtgattcccctgtgttgtcagcgtatgcacagcagacgattaaccagttggcccccaccctgtacgatgacatttacgaaatgttgacgcaggttagcccctccaagttggtgacgattggcaacccggcgatcatcgccccggcgtcatggtggggtgattggttcggcctcaacctcaccgctgtgcacatcgcagaattacaggaggtttaa

SEQ ID NO: 170753 - DNA, 306 bp, Enterobacter cloacae
atgaacggtctaactatcccgtttgaacatttccagaccaacaagatcgccggggtaaatttcactcctgtgatgaaacttgtttatttctttcttgatgccaataaggatctggacggagttattcatatttcccaaacggatctcgcgaatatggttggcgtcactcgcccaacaataggaaaggtgattaagagtctaaaagaaatgggcttgttggcgaaatctgaacaggtagcgggcaatgatatcctgaattacaagacattacctattcggcaatatgggcatggttacagcaaataa

SEQ ID NO: 170754 - DNA, 171 bp, Enterobacter cloacae
atgaaaatcgacttcccgaaagaacaagccgatcagttatatgcactggtaagggcgggcggaggcgctccccataccatcgttaaacaggcgttagccgcctaccttgaaaaccaccctcttttagtcgcttccgcagaaggaaaacagcaagatgaacgcagtaagtaa

SEQ ID NO: 170755 - DNA, 657 bp, Enterobacter cloacae
atgaacgcagtaagtaacggatttgtaatgttggctaatgacctcctcaacctggagaaggtcgccgggaagactttcaccggaaacatgaagatcacctatagcctgatccagggttatgagaagagcggcaagatcgcctacttctcgcaggaggctctaaaacgtcaattaggcgttacccgtcaaaccgtaatcaaattgctaaaagacatgatagagatgggcctgattaacaagaccgggcagatcggcggcaagacttgccgttacacagttaacccgatcaccccggaaatggcgggaacccctgaagccgccaaacctgaagtaaccaaaccaattgcagcaccccaaccgaaggagaccgtagagaatgcaggaagtaaccagcctggaattgttaagtgtggatctgacagcgtacatagaagccgcccggcgtcgtctggagcttctcctgtggaccacagcgggggcgctgttcgtcccgctcctgtccctgtgccagtagagcagggggccgcaaacgatgatttacgcaaccctgttattaattatgtggctggctctaatgtgatgatggtcaatggcttgcctgttgaatatctggagccagaagaaagcgccgttgaccagtttggtgatgctttctaa

SEQ ID NO: 170756 - DNA, 1770 bp, Enterobacter cloacae
atggaacagcaatggtttgaacttaaagatgcaagacgtaaagactggaataaatcagtatggatagttctgagggccatcaaaaatattgaagaagttgggaggtatggtttcctcggatataaagctgatttctttggggcgggaacagttgcattttctttagagcaattagataaggtcaaaaatcttggttggtcagatataggcattggccaacaacatgccggttatgttgatgatagtgaatatattccagccgaagttttcagagacacttggcgagaagtcgatggagtaaaccttgttttggagcaaaggtctgaagggggatatccaagacgatggtttttgaatccagatattattctgaccttagggttatttcaggatgggaatgtttgggtttgtccaaaggaagggtatgatgaagtagctagaattgagtatgaagataatgagccagtttctcttgagattaaaagtaagtatttgaaagattatttatgtgctcgtggcatgtttctgtatgtgactagctattatagccgggattgcatacttgagaatgtagaacatcttaaatgggaagaaaaagagctaaaatgtaaggatgatgaattttccgaatgggaagtaagaattactcctattcatgagggaggcgagacctatggaagcaagatggctgttttccatatgtccagaactgacatagatgaagatgacgaacttcctgatatatctcagtttcctacagatgaaaatacaaaaagtagtcattgggagagaggatttgaggggcgtaaattatatagagttatgggggagctatggcgtaattttgttgttaatccttctttagcgagcccaattgttcgaggtgatgaagtagattcaagctcttattttattattgatcttgaagggaataaaatatccggaaaagaactcatcgattcaggtaagtggctttggtttaaaccggatgtaatgaatattttaagcagcagaagaggtggagggttaaggttttattctcgaactacaggttctgtatcttgctatgagggatataatactcattttggggttaatgatttaggtttagttaatgtctatgctaaagacattggccttcttccaacatggcagcagcagatatgggctggattcaattgttcaccagagggtggcatatcaaaagaacttcatgcctctcaagttcttgcagagccagctgatactaaagcccctgagaaatacctgcctatttcattagattatataaataaatcaacattagaattatttgggttttgtctatttagagatcatgagtcgattcctgatatagttaaaaatattcatagatttagatcagtcacacaggaaacattctatggtttggcaaaggatttagctcgggtaattgttgataacttagatgcagcttctatgcaaaagatcataagcccgggaaagggggagcgttggggatctattaaatctttggagaagcttttaagttcaaaatatgatagtgactttgttagaaagataatggctccactagtgggagtctatgaattgaggcatgccgatgctcatctacctggttctcaaattgaagaggcattttcattaattgatattgatcgcaattccccatttgtgatccagggagagcaaatgctccactatgttgtaaaaagccttttcacgatttttgagcttttcagaaaatggcacaatcagccgagcgattga

SEQ ID NO: 170757 - DNA, 498 bp, Enterobacter cloacae
atgacgggatcagactttatattaccgatggctgcgggaaccgtgcttagctgggccagttacagcatggttgctcacgttacatcaaaacggcagatcagcggtctaagagcaatttcatggggagttctgggcactctttcattggtgctgggcgtatgcgccttttccgctctaggtgcaaaacaaccgccaacaaaacaaaatgccttatgttcaggtaacagcccagaatgctatgcgaaaacgcatcacaacccggtcagggagtgcaagcaggtaatggacaagaaagcgacgtttcgccatatgtggcatgaaagtgaagcgcagccagttttcggatcttacttgtggcatgatgagaaaaagaaaacgattcaagcatttggagatcaggctaacgctattaacagtctgggaatgctaacaccgcttcaatatttttgcgtttttaatgctaataccggagaggtcatagcggcttcttttgagtaa

SEQ ID NO: 170758 - DNA, 846 bp, Enterobacter cloacae
atggcttatacagcaacagttatcccggtgatgattgcatcgccaagcgatgtagccgaagaaaggaatgttattcgtgaattgattcacgaatggaacgacataaattcagctcgttctaaagtaatgttaactcctattaggtgggagactcatacctcacctgaactcgggattagaccacaggacttaatcaaccaaagactactcgtcgattgtgatttattaatcggtgttttttggactaggataggctcacctaccgggagcgaagctagcggaacagttgaagaaattaatcgtcatttggatgcaggaaaacctgcaatgatttatttctcatcaaaaccagttgctccggaaagtcttgatagagaacaatatgagtcacttaaattgttcaaaactgaatgcatgcaaaaggggatgatcgaatctttcaatgatttggctgatttcaaagacaaagttcgtaggcaacttgcaataagtatttctagtagcccttatttatcctctcttatatcatcaacacaaaacgatcctgatttaagcggaagtcaatctatacccgagaataatttatctgacgatgctgtcaatttattgaagttggcatgtgttaatgaagacggatcaatattagtgttaaagcatttaggtggcacggatattcaggctgggaatcagtcgtttggtggaagatcggcgagagaagtagctcgctgggagggcgcacttgatgagcttatatcatttggacttgtaattggaagaggaagtaaggggcaaatatatgatgttacccataaaggatggactctttttgaatccttaaaagattaa

SEQ ID NO: 170759 - DNA, 522 bp, Enterobacter cloacae
atggacaagaactactcgactcaagcattcttcgatttcttgattgaactgccgaaacttgggctaatcaacgaatcaacagcgcgaaatttaaagaattcagcgttactcttgctctctgttattgattggagcgaggacgacgatgtacgagatatagatgttgatgaacttattactcggtatgttgaaacacaggccaacaagcccagcgattcaacagtgcacaactatcgtagccggtttaaaagtgcagttaacaaattcgaggagtatgtacgagtggggactattgtgaacttggcagataccgagggtaatctcagtggattcgacgccgtggaacagaaaattgaaaaagctaaactgtcaaaaggggataagacacaagcctttaatttgcctatcgtagtccgtccagaaacgggcactctgataactgtgcagggattgccaactgatctcacagcagaagaagctgaacgcattttcactgtgctaaaagcatatgtgcggtcttaa

SEQ ID NO: 170760 - DNA, 348 bp, Enterobacter cloacae
atggcacgtcaaatttctatgcagaagaggttgtctgtttttactaaagcctctggcgaatgtgcttattgcggcagcaccctctcaatcaacagcatgcacatcgaccatatcaagccgaagaaacatggcgggagtaatgatctcgtcaatcttaatggctcctgtggcccatgtaatgcagccaagggtgacagggatttagaagactaccgcctgcacatgatgattaaaaaatctcaattcagcggcgtgatcacttttaagcaatggcaggacctcaatgaaagaggggtgctgattaatctcccgacccacttatttcactttgaggttgagtccttatga

SEQ ID NO: 170761 - DNA, 777 bp, Enterobacter cloacae
gtgacaatgcaactgatggcagcaattcagaaccgtgacggtgatgcgctggcccgaatgtccggcagttacgatccgaaaaacgttatcaacatcgaggccgagaacctggtcgattcgctctttcgccagctgaaacagatattcccggcggcatcccagaccaacctcaaaaccgacgctgacgagaagaccgcgaaacgccagtggatcgcagcattttccgaaaacggcatccgaaccagagagcagttgtcggctggcgttcgccatgccagggcaagcgcttccccgttctggccgtcgccggggcagttcatcaagtggtgcaaagacagcaactcagtgctgggcgtgggtatcgtggatgtgatgaacgagtttcaccgatacagtcgcgagaagggcgttcatgttggtggtgctgaaaacttcccgtggacgcatccggtcatgtactgggtcgttaccgacacccgccgggcgatgtaccagcgccaactcagtgaagtcgaaacggaaaagtacgcagccaaaaagcttgaagaatgggctttgaaagtggctggcggcgagcagattccggcacctgtcgtagcgctcggatatcacgaagatgtgatccccacaactcatgagagccgtagcagcggataccacccagaaggtaaaacatttggctgcatgcctaacgccgcatcacttggtgctctcaccccggcccaatggctttgggatgaatatctgagaggcaaagcgtccgggctaatccggtga

SEQ ID NO: 170762 - DNA, 468 bp, Enterobacter cloacae
atgaacacacgagacaagatgcttgctcacctcgaaaccagcaagccaacgtcctcatctgagtttcacgcactgacaaaatcaccaaaatcccgcatcaaccagatcctcaaggagctacttgagtccggccatatcgaaatcgagagcgcccgtaacgatgtgaagcgctatcagctaaccgagctgcatgccagccgtcgccaggcgatccttgactacctgaacagcgggcatgaaggaacatccggagatatctctatcgccaccggagtgtgcctgccaatcacctcgcagatactcgcgtcgcttagcaagcagggtgagatttatcgcgaatggttgggccgtggaaaggtctggatgtaccgcaagaacgcaccgcacaagttcggctgcgccaaccccctcacaaccctattcaacgagcgcctggcttcagtcaggggcgggagagcagaagtatga

SEQ ID NO: 170763 - DNA, 417 bp, Enterobacter cloacae
atgagcaacatcgacaaacgcgcattacgtgaagcggcggaaaaggccggtgccgatgagtggtgcgccttcattgacacgaaatccaaaacgtattccgttcacacgcctggcgataatcgttgcggcgacgtggttaagtgggctggctttgacgggcagaaacgcgcggcagctaaggccaagttcatcgcagcagccaaccccgcaaccgtgctggcgctgctggatgagctggaagccaaagacaagcgtattgctgagctatcacaccacctccaatgcgcgcacgcctttatcgaacatacagaggcgtttggccacgaggcatcaaacgggattctgtgctgtggtgatgcgcagtggaacattgatgagtctaagtcggctctggccgcagccggtaaaggggattga

SEQ ID NO: 170764 - DNA, 1461 bp, Enterobacter cloacae
gtgagtgaacaacaaagcgaggtttcattcctcgttaatgcccttgctgatgctatcgggcggcagcgcatgctgtacgcaggccagccgggaaataccaaacgcacgaagttgtgggatgagtttggctatccaaacagtctcgagttcgaccgctactaccgggcctacgagcgcaacgcggtagcgtttgccgcagtccataagcttctcgattcgtgctgggttgataacccgacgatcatcgacggcgacggcggaaaggagtcaaccgagacaacggactgggaaaagtcagccactaagctgctgaagaagcactggccgaaaattaaggatgcggatcgccgcaatcttgttggccggtactcggcattgctcattcagttccgcgacggcagggaatggcatgagccggtagatcgggcgaaggttaaatccctgcgaaatatcggtagcggacctatcgttaagctaatcctcgcgtgggaatcgcagatcaagccaggcaacttcgataccgacacgctttcagaaacgtacggccagccagtctcgtacaacttcaacgagcagccagttggtgatgatggcacgtatggcccggtgcgcggcgttaccgtgcacccagagagaatcatcattctctgcgaaggctcagaagacgagaacatgctctctggcgtgcctttcctgcgcgctggttacaacaaacttctcgacctcgaaaaggtatctggtggtagtgccgaaggtttcctgaagaatgcaagtcgccagctcgggattgcgttcgacaaagaaaccaacattgcgaacctgtcaaagcaagccatagaatctggctacaaagacctgggcgaggcgcttaacgacaaagtcgccaagatgaaccgtggcacggatgcggtcctggttatgcaggccggcacgccgtctgttctctccgttgcggcggcagacccatccccgacttggacagtggccgccaacgagtttgcatcttcgatccagtgcccgttcaccatactgtttggtcagcagacggggcgacttgcttccgatgaggacaaaacagactgggcgaagcgctgtaacggccgccgctggggattccagtcgacggtgatcgagagcgtgcttgagcgcttttggaccgtaggagtaattgacccgccatcatccggagaggtcacgctggcatggtctgatctgctcgcgccgagcgaaaaagagaagattgccaacatgcaggcaatggccgtcgtggcgaaagacacacagcaggcatacggcactccggcggtggatgaaaacgaaatccgcgcagtcggtgagctggagcctcgcaaggtcgtgtcgccacctaaccctgatgtaaagcaaaccgataaggatccgctgacagatgatgatgacagcgcaaaccagaatcgggacgccaatcgtaccgcgcaataa

SEQ ID NO: 170765 - DNA, 1947 bp, Enterobacter cloacae
atgagtgttttctcatcaaccgcaaaaactaactcatccacctaccagcccggagttgatggtttaagggctgttgcagtactacttgttttgctttttcatgcaggatttgagtctattccaggtggttttattggagttgacgttttttttgtaatttctggctatttaatttcagggataatattcagccagttagataaaaaatcattttcttttatcagatttatttgctccagaatatcaaggctttatccagcgcttatatttactcttttcattgtatttattggctgcttcctagtttatactccttctgagtttgcagaagtatcaaagtcagcaatatattcaatattttcagcgtctaacattttttttgctagtaaggctggatattttgataactcttcagaaatcaaccctttgcttcatacttggtcgcttgctgtagagcaacagttctatatcatatggccagttatcttatcgttgtcttttttaataaatagaaaaatcgtcccatatgtcattggggtggtggcgttatcatctttggcggcatcgcaatgggcaactgtaaactcccctgtcgatagttattacctaatgccgtttaggactttcgaacttgcattcggtggccttacttactttgcatctaaaaaaataaaattaaacaattcatttaaagaagttacaatgctatttggtctggctgccataatagcaccttcaatatactttacctcgtccactaaattccccggattaaatgcaatgattccggtttttggtgcgatgctatgcattatctctcaaaattcaaagatatcaggttttgttgttaataatagactatcagttgggttagggataatatcatactcaatatatcttattcactggcctatactagttatttataaatattgggtattcagacctttagatctaactgaaaaggtatcaattgttattgtttcaatagtggcaggatacgctatgtataacattattgagaataaattcaggaaaataaatatactatcactaagtagaggaacgctagctggaacatcagctcttatccttgtgttagcttcattttcttcagcgtatctatatggtggttttccgtttagggtatcagataagagcgcattgagcttctctgatgcaaagaaataccacgatgctaactttggtggtggcaatacacctcaaggtagggtttttctgggagatgcctccagaaaaccatctatcataatacttggagatagcattgctaggcaatatgcattagcaattgatgaagacttgaaagctagaaataaatcagcagttgctttctttgaggacgggtgttttatgtctgagtcatactcaagattgtggaatggtaacccaggaatgcaatgcaacaaagcgtataaagatgctatcagcatggcaaagcaaacaaaattaccattaatatatgcgcagagttggcttggttacagaaatgtcatgggtgaaatgtcaggtaaacaagttcactttaacaatgatgaagattaccaatctttcatggttaagaatattgaaagaataaactcagaaatacctagcaagctaacagttatacttggtgcaaatggttcaggtggggtgtcaggcacactttcatgcgttgctagaccatcatatcttccgctcgtttgtagggataatatggttagcgtaagaggtagatctgcatctgataaaatgaacaactttataaaaacaaactcacctagtgacgtcaatgtagtttcagtaaatgatgtgatatgtgagaaggataaatgcttccctgtaactaaaagtggggagatactttactctgattatttacacttcaataaaagcactgcgaagaaagtatgggaagctattagtagaaaaattgaaatgtag

SEQ ID NO: 170766 - DNA, 810 bp, Enterobacter cloacae
atgattgatgaaacttcaggggatatgaccccaagaggctacacatactcaaatatagttatcaaaggaagaattgagctcggcggcggagatgcgtccaatcaagcatttacttttaactacaatgatgggaataattgggtagccggtgataacattacaaatttctatttaaaagatcttgtggtgagaaaaataaatgggggtgcattgtatttaaatgccaatcaattactaggcgcagtaaattccccagatcaaattgttattgataatgtatcatcaccagaaatgacccttaattcgtcgtcttatggggataaggtactcttcagaaattgttacctaaaggattatacaacaatcaatgccgttcagaatgcatatcaatcactatcatcgtcagttttgataaataaatcatcctcagacgcatctagctttaccattggtaccatgagcacatatagaacaatatgcatgctagagataacaattagagcgacatcaccagcatcggcatcgacaaatacttggggaggggttatcactggtcagttacagcaaggatccacgccaagcactccgacattatctggagcaacaactaaatattatggtgttggagtagcgatgactccatctgttagatgtgaaactgacggaaggattattctaactttagctggttgggagtcactggaggcttttgttgctgttgacgtggatatgtcttatatagaatattctggcggctcttacaaagcacctaaaggcttagtttcaactaagtttacaatagcatcatga

SEQ ID NO: 170767 - DNA, 132 bp, Enterobacter cloacae
atgaagattatatcccccgccaactatatgtgggatattatgaatcatactaaagagggcgattattttactggtgtaatccacattaggttcatcagcgcagtttattatcaaatctatatcagagggtag

SEQ ID NO: 170768 - DNA, 1053 bp, Enterobacter cloacae
  misc_feature (894)..(937): n is a, c, g, or t
atggataaaataatcataaaaaaacatgacacccttcgtacattgttaacagaaacactaccatatgaggtaccattaatcttttccaacattggtttctataaattcctcaaaaaaagggacaaggctaactatttctttaaggaccttttaatagaaaacaaatcaccgatgattccattcaactactttattactaaaaatgaaaaatcaacaagaaaaatcagtatcccacatccaatagtacaatatgagattggcaatttaatacattctaatgcagagtatattacatatttatgttctaaatctaattttagtataagaaaacctacagcagtggcagcatattattacgagtcttcgccattcgattctcaatatcattcagaactaaaggatgacgatgtcgctcagcaagacacaaatgaagaggaaaaatattcatcttcgtatttctcttatgatggttacactctcctttataagttttttaattcattaaaatttcaatctatagagaaaaaattctcatattctttgcgctttgacattgctaaatgttttagcagtatttatacacatagtataagctgggcaattaaaggaaagggtttctctaaggaaaatatttcttcaaattcttttgacagcaaatttgatcatttgttgatgaagatgaatgataacgaagcaaatggaatattaattgggccggaattttctagagattttgcagaaataattttacaagctattgatgtagctgttgagcgagatttagaagaaaaaggatatagaaacaaccttgattatgttgtaaagaggtatgttgatgattattttgtttttacaaaaagtgaaaatattgccgatataatttatgagttattnnnnnnnnnnnnnnnnnnnnnnnnnnnnnnnnnnnnnnnnnnnntgagttatttattcatgaaatgtctaaatttaagttatatattaatgagtctaaggaacagagagaaagaagaccattcattactaaacttactattgcgaaaacgcatgtattaa

SEQ ID NO: 170769 - DNA, 267 bp, Enterobacter cloacae
atgcatatcgaaattttcagaattgaagggcgaacttgtttactcatatcccccatcagaatctctgtagcagagcgaatggcttccgccatagaaaacagcgaagtcgttgcagctcttggtgcttatttcacacccgttggcgaggcaccagttagtgaactcgttgggctctatctctactttgataacctcgataccgctgcgttcataacgatcaatcatctgattgaaacggataagccaatcccggtaatcgtcaggtag

SEQ ID NO: 170770 - DNA, 420 bp, Enterobacter cloacae
atgacaaaaccattaacccaaaaagagcaggtagcggtttttgttcgttaccaaccgaactgtgcagttggcgacgtttccgaggcgcttgatatgcatggagccaccgctgggaaattactgagagagttaagtgacgaaggaatattaaaccgaactcgtaaaagcgttcagtttacttattcggccgcccctgatgcgaaaattcctgaggtggcccttccgtgcatggttgaaaaaagcgatccgatcaggatgcaggctgccgagcaaaaagcgaaggagcttgaggcgaagggcctgtggcgacgtgctgcagctgtgtatgcggaaatgtttgggagcgccggtagtgctgttgaggttacccgtattgccaagcgtcgcaaagactgcctgcgccaggcggggagggcgtaa

SEQ ID NO: 170771 - DNA, 1116 bp, Enterobacter cloacae
atgattagattcgttgatggtgatttttttgattttcaagctgacataagaatcaatacagttaactgtgttggtgttatgggagctggggttgcatttgcctttaaaaataaattcccagaaatgtttagtgagtacgtaatacaatgtaaaaaaggtgaaatatctccaggtaagccagcagtctggagaagtattgacacaaatggtaaggaaattgaaatcatcaacttccctacaaaggatcactggagaaataaatctaaatatgaatatattgaaaaaggtttactttggctttccaattatttagaaagcaagcaaggaaaagtcatcactcttccagctctcggctgtggtcacggtgggcttgattgggaagtagtaaagaaaatgattgaggattctctttccgagaatgtgaatgaaattttagtcttcagcccccaatcttcaaaaactactaaacgggataaagttcttccatcccaaagctatccaacattaagagacttaaaagtatccgaaactagaaaagacgataaacatttcccggaaaaacttgccaccatctcaaataaaacactattttatactgggcggctttttacagatttcgatctttcgataatttcaagtacatcgcctagtgatttagagaaacaagttattcttaatactattgaaatttctgccaacaaaggatactcattgctttttggcggaagcgcattcgacaaaaaaatggctctcacagcattaaaaaaaggtattagaacgggtgtttttttacctagcggaatcgctaaatctgcggaaaaaatgaatttgcatgggagttttagccaattgacaatactttctttcggagatccatttattcagtttaataaaattgagtatttaccttcagttttaagtcgtatattattgccacggaaagtgttatttacgacaagcaaattacagtggattatgaaacataagaaagtttttctacaaaataaggttgactcatacttcttaatttccgaaacaaatgaccttgatattgaggcagcaaatacaattatgtcgaaagcgatagatgaacatggcttatataatataatttaa

SEQ ID NO: 170772 - DNA, 1332 bp, Enterobacter cloacae
atggacgcacaattctcgggaaaatatgtttaccactttacgtactttacgaatttagagcaaattataaagcatggcttgctcagtacaaataataaagaacaacaaaaccttgctcacgaaaatatagcaaataatgatattcaacatcgccgtagcgaaatgagagttccttgtggtccaggcggcgtcgtgcatgattatgtacctttttatttcacaaaaagatctccaatgcttcttaatgtcatcaaaaacaagaatattgatcaggaaggaataatatatcttgctgtaccaatagaggttgttaaaaaaagttccgttgtttttacaagttcctcagcaaatactctaacaccgccaagcttttattccgatccagatgatttaagagagttaaactgggatataattactagacagatttgggttccaaaaccagattctttaaaacaacaaaaaatggcagagttgcttatccacgatagagttttaataagtgacatttcatatttcgtcgtttgggatgaggaaatgaaacagtgtgttagtaacttattgactaataatggtcttcaccatatagatgttcgtgctgactggcgatcatttgatgaccatttttttcatgatttgaacgtgacaggaagagtaaatatcgtttctggtcctataattcttttaaaagaaactcaaagcactatcaaattcataaaagaaaataaaccttcaaacccttcttacaaaactctaaacgatgttttaaaagcaatcaaccacgattttgactgtataaaagagctatcagatataaatggacttgaaactgacaatccagttcaccgggaagatgtcggggctcataccagaagagttgtcagcttactaaatattgagcctgaatatgaaaacctatcagaaagagaacaacaggttataacattagctgcatatttccatgatattggtaaaggtccaaaaactagatggccaaatcaaatacaaagagttgacgatactcatccaattaaatcactccctatgcttaaaagaattttatgtaatgatataggcgggctatcgaacaaggaaattcggcagatcgtgacgttagtggtttacgatgatctagttggcgacattattttctgtggaagaaatgaagaccagatgaaaaatattataaaaagcaaatctgacgtcgatatgttaatactaattgcaaaatgcgatatcaattcaattattccaggaggaacagattgtcacgaagttcaaattgaagaattaagagtaaggatgtataatcacatcgaggagacaatatga

SEQ ID NO: 170773 - DNA, 342 bp, Enterobacter cloacae
ttgaagacttctgttctcattcaaaaattgattgaaattgataagacagtcccattcgatgcggatgtagtaaccggtgaagattggtggccgactccgatttctcgtgtctatcacaatcctcccgatacattcatagaatttgagtcaggcgatcaatcccgagatgacactgatgaactaaccatttattccgagttgaaaattcgcacccatcaaatgatgcaaattagagattttgtgcagtcaaatacaaatcttcatcctgacgaaatcatctctgaattggacattcaaattaagcgcttgagggccatggctgaggcggttttgaaaaaataa

SEQ ID NO: 170774 - DNA, 441 bp, Enterobacter cloacae
atgcagtgtgcagccctgcgccacggtatcacggcaggcgatatcaaaacagaaatgcagtgcactctcctcaacatccgccagtgcgccgacttccagccagacatccgttacccgcgcaatgccgtgctgttcagcctgttcgcggataatgtccgccgcaccgagggctttactaagcttgccccttccgccgttgtcataatcggttatggcatcgcattttattttctttctctggttctgaaatccatccctgtcggtgttgcttatgcagtctggtcgggactcggcgtcgtcataattacagccattgcctggttgcttcatgggcaaaagcttgatgcgtggggctttgtaggtatggggctcataattgctgcctttttgctcgcccgatccccatcgtggaagtcgctgcggaggccgacgccatggtga

SEQ ID NO: 170775 - DNA, 189 bp, Enterobacter cloacae
atgaaccatgacctgatggctgctcaggcagccagtgaaatcgttgagctgctgacgctctgccaggacctacagtcggaaaaggacggccggcgcccgccgcatactcccgcgatgaggatgcgcatgcggaacgtatccgttccgcatgcgggcacgccctgctgctgcgctggctgcttccggtaa

SEQ ID NO: 170776 - DNA, 969 bp, Enterobacter cloacae
atgacctctgaactcgccatcattgaggcagacattgcggagcgtgaagcgatcttgaagcttaagttcgacgacacactgtataaaactttgacagcagctaaaccacgtttaggcgcaatccagcaactagctgaacggctcacagccgagggtattcaaatcacatacactttcagcaacgacaaaacagttgttgaagctaggctagaagagttatgcaatttgatgcgtgctaagaaaacagaagagatgtttgctttacccgaagactggcgccagaccatccatgcggtgttcaaggacatacaggacttctacatctgcgtaccacaagatttaaaagataaagagttatatatcaagataaaggctaatgaagcgcaaagtggaaggcttaaaaaatgcttggaagatcttcaaaaaattcaacgcgagaacgcagcagcagaaaaagccaaagataaggtcaacaagctgcgtgcgacattagtcaaagcggagcaaaaatatgctgatcagaccatttcggaaattgagcttattttccatatctacagtgggcgacttatccagaactaccagcgaggtcttggattgttcattgagagtcgagatggcaagcaactaaggttcctgacagcggaaaagtcagaccatgatgcagttatgtcgatgagtacaggtcaagtctcagcacttagccttgccttcttcctgtcgctcaataaagtttatgcagatgtaccgcttattctcattgacgacccctctcagtctctggatgaggtgaacatagcatcactgaccgacttgcttcgctgtgagctaaaacattgccagctcatcgtgtcgtcacatgaggaagatatttcagcatacatgcgataccgttttaatcgagcaggattggcaactaattctctcaacatgcaacaattagcaaaagaagcgcagtttcgttcataa

SEQ ID NO: 170777 - DNA, 720 bp, Enterobacter cloacae; identical to SEQ ID NO: 167721

SEQ ID NO: 170778 - DNA, 285 bp, Enterobacter cloacae
  misc_feature (269)..(278): n is a, c, g, or t
atgaataatattattttgttcaaatcaaaaaaacatattcttgtagaagaaaattataatgagtttataaaattttgtcgctatcaactgcccggactaacccaaactcaggattgggagcagtatgcctggaaaggatatgtaacatttagaaaaataggggttggaaataaagtctttgattccattgatgcaatgcacgaagattatatcaattttgcgaaagcatatatcagatatcaacactcattgaaaccattgaaaaattnnnnnnnnnnattatga

SEQ ID NO: 170779 - DNA, 1284 bp, Enterobacter cloacae
atgagttggaaaataatccgaattgaaatttcttgctttaaagcgtttaagcacatcgatctagatttaggcacttcttctctattgactctagatgggccaaatggatacggtaagactagtattttcgatgcggtcgagttgctgcttacaggccagataaagagaatagacaatcttttctcgacattaatgacaaaaagtaaaacaaattatgatgataatctgttctggaatattcgttcaggtaagaaagatctatcgataaaaatcgaattttcagacggcgaacgcaagttagtgttagctagacatacgcctcgtaagacgttcgaaactaaagcgaacaaccgtgctgataaatttaaacactttttactttatgaattgccagattttgactctaaagcctatatagaatccaataaacgtaatgacgagtttcttgatgaaatttttgggaggaattttagggagaatttctcatttttgaattatttagaacaaggtcaaaataagctgcttcatactcgtgtagatgagcgtaaagatgagctagggagcttatttaatattagtgatatcgccgctgaaattgaaagctgccgatctgtttcggcgaaaatcaccaagtatttaggcgatgagaaacgcaatgcagacttggattcccttaacaacgagtgcactaccttgcgtgcaatggttcaagcagatttaggaagagttgaatataaaaaagtatctactgctgagtatgaacccgcttgggataaggagaatgtctttcctacatatgctccagactttcacactcaattattggattcaatacgcaaactaagcgaccttcttgctcagaaagcagccattcgtatcagggctaataatgaaactatagaagctgatgttaatgcgcacatggagttacttaatagcttggctcgtatgggggcggatatcaacaagcttgaagagctggaagaatcgaaaaaggaactcgatcaacacaccacagctacagccatcattaaaatgggagcttcagtcattacggttgagcaggcacgtacgttgaaggggtggctgccgaatcggcttgagtggtttgaaacgaagattactgaacgtaatggtcttcaaaaagaaaatacaatcaatgatagcgctgcagccgaattatctcgcttaaagcaacaactaattgatgaacacgctaagctttacccggaagaccagctttgcccattatgggctttgttgaataaatcagatttcgggtaa

SEQ ID NO: 170780 - DNA, 666 bp, Enterobacter cloacae
atgataaataaaattattgatgaggcattaatcgctcatgatttcaaaaaagagcatgagacagaactgacgggattctacattcgtgaattcggttctgctatcaggtttgcgatcttacataggttggatgagcttacgaaccctgcagcattaaatgccgttatcaaccaatcggtgccagagtcttttattaatcatccagcctttaaaaagaactgcgatcttatctgtgttcaccgtctaaaaaaattagcagagttcaaagacttcgaggaacaaatattcgcaattgaagaagatcctcactttttcaaaaaatatattctgtactatagcgataccgaagaaaccgcaattcaagattattcatttgaaaagctagcggccacgatatcggacaagagccagttcattaattataagagtgaaccactggctgcaacacaatacagtgtagctgcaaagattttcatcaaacttccatttctcgaacttccattcacaagagagaaactcgtctccttgcgcctacaggctagtgaagctgtcgcagaagagggattagtggaaacatatgaaattattcagaagcttactacaaataatgtcgacgaaatgatcaaggagttgattaacaatgagttggaaaataatccgaattga

SEQ ID NO: 170781 - DNA, 444 bp, Enterobacter cloacae
atgaagacgctctgtcaattaatgaagccttctgagcgattttcaagccttcaaaaagcagacattaggcgttattccgggctgattgaagccatgaatattgagcccattctaaaactatttcctcactacttagatggtgaaaaaaagttttatcttcctactgcccttgacctgcctttgattgatgaccgagaaggttgtacgtctgatttggtgggagaaatggaaagcaacggggaacttcgtaaactgctattcgagtacaaccatctaattgcatgcaggtcttgtgagtcttttacgattaataccaaatacacagattcagatgatctaagcgatcaggaggttaaagatcgcattgatagtaatttcactaaatcattttgcctaagcataatgagtaaagaagacgcagaggctagactaaatgataaataa

SEQ ID NO: 170782 - DNA, 906 bp, Enterobacter cloacae
atggaaacaccatacacctttttgaaattcgttacacaagatagaattgatattttaaaagatggatatattagatttactccccctaaagacttgaatgaccccttcgaagttaaccctgtagtaattcctcatgatccttacaatcttcaactgatagaatccgggtatgattatcaaaatcatgaattcacagcaagtgatcatgatttttcatggaaaagattcaataaaatcggacactataaaaatgaatattcaaagttctctaataaatatggaattctttctctttctagttctaaagatatgtgttcaatgccatcagtagcaatttttagtgaagaagatccaagacgtaacttattaatgtggtcccattacacagacgaacacagaggttttattattgaattccatcgtaactttattgatgacactgaaatatcaaaaataacgtactctcatgaaaggccaatggtcacacaagaagagatagaatcaggagtcatttttcctttttttgttaaaggtgagaaatggtgttatgaaaaagagtggagaatcataaaacccttggaacaagctgataaaatagtacatttggacaatggtaataccatacatctatttaaaataaaaaagtctcaaattcgctctataactacaggctgtaacatggacacgaataaaatagaagaactaaaaaaaattgtattcactgatccagaattaaaaaactgtatattttatgtttcaaaaatagacaatgaggggttcgctttggattttagatcatattcagccaatggttggactaatgatgatgtatttggattcccaatgatatccagacatcccttattgataaaccctgagaatgtaaaaaagcaagtgcaagaataa

SEQ ID NO: 170783 - DNA, 132 bp, Enterobacter cloacae
atgctgctggtattattcaggtgtatagaatctataacacaggaagaagctatcaacgagcattttacgctgacggtccttggactccgtggacgagaaacttttcttatggcgatccagctcttgctgtag

SEQ ID NO: 170784 - DNA, 390 bp, Enterobacter cloacae
atgaaaactgaactgactgttgaaaacaaaattgcttttgatttaaacgctgggactgaaatctctgaacgtgagcttgcagaaaaacatgaagttcctcgttctgttgttcgtcgtgtaaaagcgaacattgagaaatataccgttgtcgaaactgttgatgttgttgaagcaaaaaaaattattaatcaagctttcggtatcgataacatcgagaaacttttgaaatcaaaatctgctaataaaaaacctgccgatataagcgtaattatctttaatcgctcggaaggagactttgcattattcagtaagcagatgaatggaaaatcatctgcatatatcaaagaccaatttttacgctgtgttaatttaaacaaggattcacaatga

SEQ ID NO: 170785 - DNA, 1026 bp, Enterobacter cloacae
atgatcagaattatagggtgctcgctctgttcgatcaccgaacacgaaggccgtattattcagagccgttccgaagagtcgattgttaacgagatcgaagccattcgcgacacggtgccgggctttaccggtgtgatctccgatctgggtggtccaacggccaacatgtacatgctgcgctgtaaatcgccgcgcgccgagcagacctgccgtcgtctctcctgcgtctatccgagcatttgcgagcatatggacaccaaccacgagccgacgatcaacctttaccgtcgcgctcgtgacctgaaaggcatcaagaagatcctgatcgcctccggcgtgcgttacgacattgcggtagaagatccgcgctacattaaagagctggcgacgcaccacgttggcggttatctgaagatcgccccggagcacaccgaagaaggtccgctgtccaaaatgatgaagccgggcatgggcagctatgaccgctttaaacagctgtttgatacctattcaaaacaggcggggaaagagcagtatctgatcccatacttcatctccgcacaccccggcacccgtgatgaagacatggtgaacctggcgctgtggctgaagcagcgtcgattccgtctggatcaggtgcagaacttctacccgtcgccgctcgccaactcgacgaccatgtattacaccggcaaaaacccgctgagtaagattggttataagagcgaagacgtggtggtgccgaaaggggataaacagcgccgtctgcataaagcgctgctgcgctatcacgatccgaaaaactggccgctgatccgccaggcgctggaagagatggggaaaaagcacctgatcggctcgcgtcgtgattgcctggtgcctgcgccaacgctggaagagatgcgcgaagcgcgccgccagaaccgcaacacgcgcccggcgctgaccaaacataccccgattgcgcatcagcgttcgaatggtgttgcgggaacgaagaagaacgtaaaacgtaagaccggttaa

SEQ ID NO: 170786 - DNA, 924 bp, Enterobacter cloacae
gtggcaaagcaaaagttcagaatcaccaactggtccacctacaacaaagctctcatcaaccgtggctccctcactttctggctggatgatgaggcgattcaggcctggtatgagtcggcaacgccttcatcacgaggaaggccccagcgctattctgatctcgccatcaccaccgttctggtgattaaacgcgtattccggctgaccctgcgggctgcgcagggttttattgattccatttttgccctgatgaacgttccgttgcgctgcccggattacaccagtgtcagtaagcgggcaaagtcggttaatgtcagtttcaaaacgtccacccggggtgaaatcgcacacctggtgattgattccaccgggctgaaggtctttggtgaaggcgaatggaaagtcagaaagcacggcaaagagcgccgtcgtatctggcgaaagttgcatcttgctattgacagcaacacacatgaagttgtctgtgcagacctgtcgctgaataacgtcacggactcagaagccttcccgggccttatccggcagactcacagaaaaatcagggcagccgcggcagacggggcttacgatacccggctctgtcacgatgaactgcgccgcaaaaaaatcagcgcgcttattcctccccgaaaaggagcaggttactggcccggtgagtacgcagaccgcaaccgtgccgttgctaatcagcggctgagcggaagcaatgcacggtggaaatggacaacggaatataaccgtcgctcgatagcggaaacggcaatgtacagaatgaagcagttgttgggagattcactgacgctgcgtgactacgatggtcaggtagcggaagctatggccatggtgcgtgcgttgaacaggatgacaaaggctgggatgccagaaagcgtgcgtattgcctga

SEQ ID NO: 170787 - DNA, 969 bp, Enterobacter cloacae
ttgaaggatcagatcacgtatcttcccgacaacgcagaccgttccgtggcaaagcaaaagttcaaaatcaccaactggcccacctacaataaagccctcatcaaccgtggctccataactttctggctggatgatgaagctattcaggcctggtatgagtcagcaacaccttcttcacgaggcagacctcagcgctattctgaccttgccatcactactgtgctggtcattaaacgcgtattcaggctgaccctgcgcgctgcgcagggctttattgattccattttttctctgatgaacgttccgctacgctgcccggattacagctgtgtcagcaggcgggcaaagtcggttaatatcagtttcaaaacgcccacccggggtgaaatcgcacacctggtaattgattccaccgggctgaaggtcttcggtgaaggcgagtggaaagtcaaaaagcatggccaggaacgccgtcgtatatggcgtaagctgcatctggcagttgacagtaaaacacatgaaatcatctgcgctgacctgtcgctgaacaacgttacggactcagaggccttccccgggttaatccggcaaacccaccggaaaatcaggtcagccgccgccgatggcgcttacgatacccggctatgtcacgatgaactgcggcgtaagaaaatcagcgcgcttatcccgccccgaaaaggtgcgggttactggcccggtgaatatgcagaccgtaaccgtgcagtggctaatcagcgaatgaccgggagtaatgcgcggtggaaatggacaacagattacaaccgtcgctcgatagcggaaacggcgatgtaccgggtaaaacagctgttcgggggttcactgacgctgcgtgactacgatggtcaggttgcggaggctatggccctggtacgagcgctgaacaaaatgacgaaagcaggtatgcctgaaagcgtgcgtattgcctga

SEQ ID NO: 170788 - DNA, 483 bp, Enterobacter cloacae
atgaaagaaattttcatcggtgaaaaactggaattaactaatcctcaaggtgcatctgttcaaattggctctaaagaaactgttcttttcgaacaagaaaattgccccgaaaatatcggggttgattcttctgaattcattgaaggtgttttctctattgttatttttgaagatggctccttgctgtctaatgagttaattaaagttaaatcgccgtttaacgaaaaatcaaagaaacaacagcttcgagaaatgattaacgacctagacaaagttattcaatatcgtctgacttctaatgaagaagcaattcagcaaatgagtattaacggaaaatctttcgtttatgaaactcttgattctctgctgaatgctcgtaagaaatttttatctcagcttaattctattgttcaagctgaaaacgaagcgaaaggaaaatctcctatcgttacgattaaagcgaggtttaaaaatccatcatga

SEQ ID NO: 170789 - DNA, 165 bp, Enterobacter cloacae
atgatcagcttttccagcttgcagaagatggcaaacgtggtcagttcaagattgtctattggatggatgctggtcgtgaagttggtgttgcgactgtttacaacggattcttggcttctgcaactcgttcaggtggtgagaccgaagttactgcacagcaaatga

SEQ ID NO: 170790 - DNA, 252 bp, Enterobacter cloacae
atgagatatttttattgtgataaatttgaaagtatgctgatctatgtcatttatcgcattagagttgttatcaaacactccggtcttttttttctcatcatatatcttggtgcttttattctcataaactttcaattcatacttaatagtttcgcccgaataactgttgtagagggggttattgatgtgggtattgagtgggttacaggaattgctgatgaattttcaatatcattagcattcactttatag

SEQ ID NO: 170791 - DNA, 846 bp, Enterobacter cloacae
  misc_feature (834)..(843): n is a, c, g, or t
atggaaagagatcttacaataatcttagctgagcgagatgctattaaacataagatggagcttgaaaagcttcgtgatgaaaatttaaatctaatgcaacaaataagagacaagatagaaaatgcgaaagtagaaataacagaaagcgcaatagataagacgatgtcaatcctagaaaagacacgactctggttaatctatggctctagtttttttgctatattcataggtattgcagggtttataggttataagagcgttaacaaggaaattacagattattatataaacactgtgcatcattggttacgcttcgatagcccagaaagtgggggaagccgagttctcaatgatttgcgaactgaggccttgctcaattccttaacattgaaatatgaaagagaaaaagtcaactcaggtccgataaataatattaatttgaacacagaggaaagactgcgtctgatgtcattaattttaaaccccgaaacggatgaacaaaattatagggatgccttacgcttaataactataagcagaggactctatggtaggtattacgaagatgacatcggaaaaaaaattgcaagtatattggataacaaagaatttagtgatagtaaaaaaatagatgtaataaattacctaagtaaagatcgcgcattgttcccttgggcattagcagtaattaatgataatagtcctcaaatgcatgaggattttcaaatgaaagcatttgaaaatgtcaaaaactttaataaagagttagccataaaatttgccgaaagaaatataactgaatttaaagatattagcaatagaattcaattaggnnnnnnnnnntag

SEQ ID NO: 170792 - DNA, 186 bp, Enterobacter cloacae
atgcaatgctgggttgatttgtctggaggtacgaactttcgtttttataaatccaaagagtgcaggcttatggaagctccggaaaaaaccttatctctgactttcatggccgttaagcaatcacttaacgggcgcaggtggccattcgccccctttctggataagtttctcttttatttcgtttaa

SEQ ID NO: 170793 - DNA, 135 bp, Enterobacter cloacae
atgcagcggttcgatcccctcgatcccgttctctttcaggaacgcatcaatcagcagtaccgcaccaaaggcgataaagatatcttccccaaagaaaaccgcgatattggtgaaaaatggcctggcggggtttag

SEQ ID NO: 170794 - DNA, 987 bp, Enterobacter cloacae
atgatgaccctcatcaccattaaccgcgtgtactacctgatcggcttcgtcgtgatgctgctggttgtgatgacccttcgcgatcgcgctaacccgaaacgctataccaccgcgctgttctggtttctgttcggcgggatcttcctgtttggcgatctgatggtgcaggagctgggtaagtcgctggcgtatcgcattattggcggcgccgttatcgtgattgcgctgctggccggtttcgggctggtcgggaaggggcactataaaatgtccaccgaggaggagcgtgttgcctcgtcgaaccggctgaaaaactggctgtttttaccggcactgatgatccccgtggtaacggttatcgggacgctgtttctgaaaggcgtgtcgattggcggcgtttatctgctcgaccagaaacagcttacgctggcggcgctgtgcgtggcctgcgtggcggctatccttaccggctggtggctaacaaaaggtacgccgctgcatgcggtgcgtcagtcgcgtcgtctggtcgataccattggctgggcggtgatcctgccgcagatgctcgccatgctcggcggcgtgtttgtggtggcgaataccggcgaatcggtacaaaaggtggtcagcctgtttgtgaacccggacagccgtttcatgctggtggtcatttactgcgtggggatggcgctgtttaccatgatcatgggtaacgccttcgcagccttcccggtgttaagcgccggtatcgctctgccattcctgattaacgtccatcacggtaacccggcgccgctgctggctatcggtatgtacgctggctattgcggcacgctgatgacgccgatggctgccaacttcaacattgtgcccgccgcgctgctggagctaaaagacaaatatcaggttatcaagatccagatcccgaccgcgttaaccctgctggtggtgaacgtgttcttaatgtatttcctcgtgtttcgctaa

SEQ ID NO: 170795 - DNA, 141 bp, Enterobacter cloacae
atgttcgcggccagcgtcatatttgcttctgcggaaaaaagagggcacacggttaatagcaacacgatttttttcataaaaaagccgctgctggaaaacagcggcctcctctgtcaggtaataaaacgcgtcagaaattaa

SEQ ID NO: 170796 - DNA, 186 bp, Enterobacter cloacae
atgggaaagatgacgttcgtatttgagtatgaggacggtaaagagccaccggttagcgctggcatggagtttttgggcgggaagattgtagcggctgcctttcgtgatgctctcgaagagcctgaagtatgtgacgagattgcccctgaccctgaatatctggaaaaaatccgcagtcagttatga

SEQ ID NO: 170797 - DNA, 1149 bp, Enterobacter cloacae
atggatgttttaatcgcgttgataatagtttatacatgcggtttattgctttgtttttatctcaagcttgagtggattcatccagctgtagttcatgcattactatggttactttcttccgtcctggcattagccttttctgaggatgaatttttaccaaagttttactttatactgtatgctaatttggctttctttcttgctgcgattattggtggggaaaccacttctcctaaaattatgggaagaattgattgtggacggcaacatgtttggccaaatattattccatttatattcatagtttcattttattctgttatcctagtaaagttcagcgttagcacactatggaatatttctgcttttcgagattatctagttgcagatgatggtgcaaattttggccttttagggcgtttggccttgctctcgcttttttcgtcatgttttttacttatagctcatcgaaagctatttttgttgacctttgttctttctgtaccaatgttattgttgctcggtgcaaaagttttggtattgctatatctatcgacaattcttattttgacccctaaaagacttaagctttctaaagttacaatttttggaggtggatttatattatgttttcttggggggatgagaatacgttatcctgaagcttctatagaattaatattctattatctttataattatgtttctggtggaatattagcattttcacaattaaatgattctgcctctcaacaattcggttattattcatttagaaatatatatctatggttaacgttcattcacccttttaaaatagctagtattttacaagattgggtaaatgttccattcccaacaaatatatatacttatttaagaccttattttcttgattttggatatttttcagttatttttccagcgttttttggtttcctttcagggcgagtttatacttggaaatataagaacttaaaggcttattatgttatttatccgatagtactttacgcaattttaatgcagctttttgatgatcaatacatgacgtggttatcgaattggatcttgctagtttttgttggctatcttatgatgcatgggaagagaaatgttagaaatcgcagcattaatagtaacgtttaa

SEQ ID NO: 170798 - DNA, 1122 bp, Enterobacter cloacae
atgtcgcatcacataccaatctccgatgttctggtcgccatcaatgatccccgtcagcagggcaagattcgtcacgacctggtcgaaacactggtcgtggctatctgcggcgtgcttgccggcgctgacaccttcatcgaaatcgaactctgggctgagcagcggctggactggttccgccgtattctgaaactaccccacggcattccctcacacgacacctttggacggctattcagcctgatcgatccagaggagttcgagcaggccttccgctgttgggttgcggcgatcctaccggccctttctccgcaagtggttgccctagacggcaagaccagtcgccgctccggcaagaaaaacacggccccgttgcacctggtcagcgcttttgcggctgattcagggctgattctcgggcagagggcgacctcccagaagtccaacgagaagaccgccattcctgagctgctggccacactggcgcttgagggctgcaccgtgacgatcgatgccatgggtacccagccggacattgcacaggccattctcgatcgcggggcgcactatctgctggccatcaagggaaaccagccgaagctggccgaagcgatcgatgacttcgctgacacctttttggacggcgatcctgcccgggtaccccatgcgcacttcgagcatgtcgagaaggaccatggccggctggaggttcgtcgctgccatgttttcgaccaactccagtgcctgccacagccagaacgctggccaggactgcgcactttcgtgatgctggagtccgagcggactgtgggcaaccagaccagcctggagcgccgttactacatcagcagtcttgctccggatgcagagcgcatcgcacatgccatcagggcgcactggggcgtggagaaccgcgtccactggtgcatggatgtcatttttggtgacgatcagatgcggatccgaaccgggcatgctgcccacaacatggccgttctcaagcaacttacattgaatttgatccggttggatccggtcaagcgcaagggtggcatcaaggcacgaaggctgattgctgcaacctctgatgattatcgggctgaactattaggtctcaggtga

SEQ ID NO: 170799 - DNA, 324 bp, Enterobacter cloacae
atggctatcagtgagaaagacctgcttgaggcaggtttcagcaagagcgaagtggataacttacagggccgacttgcagcaggcggaggcaccatgcagcatctcatcgaagcgctctcacggcgcttccgggtgtcggcatggatcacggtcgcgctggttctggttatgctggtcaccctcatcgccggcagccggacacacattctttccgggggcatgagctcccttgttgtccttatcattgcctgggtgacctttccacctgcgctgggctggaaagctttccgcctgcagaaaactatttcccggaaggctcaatag

SEQ ID NO: 170800 - DNA, 279 bp, Enterobacter cloacae
atgctgacgataattttgtttggtgctggctggaaaggcgacgttttggatcttgagcgttacagtcccgttattaaagctcctgatcagacatttcgacttcttaaaagctctgggggcaccccgatatttgaggatgctgaatttgaagtcttcgaatatcagatgggtgatgaaatttatctagtcggggttagcggtcagcgacctagcgacaaactcattgagcagtcgataacgcatggctcaagaaggccaaagccatacaaaacactgtaa

SEQ ID NO: 170801 - DNA, 1275 bp, Enterobacter cloacae
atgatgatctcatatcaggaacttgttcgcaccttccctaatattacaacacgctctaactggcactggcaggataacatctggacgctgggcctctatggtacggccgtcggagcgggaacactgttccttcccgtggaaatcggcacccgtggtccggttatttttctggttatgctcctgctggggctgccgttatcgcttatcccccatttactcctctgtcgcgtgtatatgcgtgaggaaaagactgaaaacggcacgttgccgatcttcggctccttcttcagcggacggggtgaaaagctgatcaccctgttctattgtgtgaccttcttcccggtaaccctggtttacggggtggcgctgattaatgcgctggataatttactggtggagcatctgcatattaccgcgctcagccgtgggccattgtcgtttatcgtggttgctgcactgtatgtggtgctgagcaagggtcgggacagggtcgtggccattatgagcgcgctggcgctgccgttcgcggcatctgtgctgctgatcgccgtatcacttatcccgggctggcatctctctaacctgaccgatacggccgctgaaatgaccgccacgccgctgccggtaacgctgaaaaatatctggctgacgctgccgcttattaccttctcgttttgctgtgcgcctatggtctctccgcttagctcttactaccgggagaggaaagcggagggcgagaaaaaggcactgttcgtgatccgcatcgcctatttagccatcttcgccagtatcctctttttcgtgctgagctgcgtgctggggatcccgcatgacaactttgtgcgggcgaaggcagaaaacctgaatgtgctgtcggtgatgaagggaaacggtgattttagcctgatttaccacattgccccgctcatcgctatcatcggtatgacgaaatccttcctcggcgtaggcctgtcggttgcacaaacgtttggtcagctggctgccagcgtatccggcaaaaaggccaacgccagcaagcggctggcctctctggcgctgttcctgctgacctatggcattgtttatgccaatccggatgtgctcagcctgattgaaatgttctgcgggccactgattgcggtgatcctgttccttatcccagcgtacctcatttacacccgcccctcgctggcagagcttcgcggcgtgacggtgtttctggttgttctgggcgggctggcaacgctgtctgcattgctctggacgatgctttag

SEQ ID NO: 170802 - DNA, 387 bp, Enterobacter cloacae
ttgcttggcctcgatcagcgcctggccgatgcgcccgaacagccgcaccttggcgttgatcgccttgccggatgcctgaaactgctgctgatgcttgttcttggcggcgttgaacagcttgcccaggatgcggtcgtgcaagtcgatgatttcgtcggtgaccgtggccatgccctcgatggcgagcgcgaccagggtggcgtagcgccgctgcgcctcgaacttggccaggtcggcgggtgtcatctggccaccctcgcgggcgatcttgagcaggcgattctggtgcaccgaccgctcgacgccggaaggcaggtcgagcgcctgccatgccttgaggcgttcgatgtgttcgagcatgtgccgcgaattgggcttgacgggtga

SEQ ID NO: 170803 - DNA, 285 bp, Enterobacter cloacae; identical to SEQ ID NO: 166544

SEQ ID NO: 170804 - DNA, 444 bp, Enterobacter cloacae; identical to SEQ ID NO: 129154

SEQ ID NO: 170805 - DNA, 540 bp, Enterobacter cloacae
gtgataaataatcctactctcagtaaattggtcgcattgttaactacatttacatgcttcatctccctttacatatatggtaacaaccacaattgggccctgacattgatactgcttataattccattgttttgcggtggtattatatttttcttctcacataatatctacagtgaagttttaaaaaagtctgtagattcgttgctcagtttattctctctaataagttatgcatattatatatattgcatctcgaatattaattctaaccttacatttgctaatattttctccagtgtctggggttatctattccttacaatggtaagcttgtctggagtgataaaattattaatcagtctaaaggaattttccaatgaatacagcaagttggccaatcccgaaaatgaagccccagtcatctgtgtaaaacaaaagccagatgaccacacgtatatctccattcgctcattggatagcaaagatatatatgccttggtcgaaaaggataataaaatagagatctcgataaagaaataa

SEQ ID NO: 170806 - DNA, 2673 bp, Enterobacter cloacae
atgatcggctcgacttggaataaatgggatcttcatatacattctcctctgactcatataaataataattacataggaaaagacataaatctttttgtggatgagatcattaaaaatgaattaaagctgatagcagtgacaaattactggttttttgctgaaaatgaattagaaattatcaaggctaaatttaaagagagaaaatatccaatatgcatattggccaatgcagaatttcgaattgcacaaccaaataaatcaggtgaatggataaatgtccatgcggttttttcagaacatatttcaactgatcgaatcaataaagtattatctagaattaacttacaaaacactaccgatgataaaaaaacaatatggtgttgtaaagactcaatggatgagtcaaagataaaatttgacgaagcaataatagattacgataccctttccaaagggctaaataacgcttttactcttggtaaggatttcttcattgcaatatgtccaaatggttatggcggctttcagccggaaaaaacagaaggacgatctgttgctgtcgcaaaagagatagataagcttggcgatattgttcttggacgagccagggatcgagatttcttcttattggacacaagatatgaggacgcgccgaaaaaacctgttttcgtttgctctgatgcgcatattctgggtgatattggaagcaaatttacatgggtcaaagccaaaccaactttccaaggattaagacagacaattttcgaacctgaagaaagagttcaacagtcgagtgattttattgaactgaattacataaagccccactttagccgaatagctcttgagggtaatatattcaacgaaactgatttatcatttaagcctcaagcgatccctttaaataaaaacatggtatctatcattggtgggcgaggcactggaaaaagtatcttcctcgatgcaatgaaggccgtattgatgccaggtataacgtttagctctgatagagatttatcaaccaatggcgttagcgtttttcttgataaagggtatggagaggagtcatctatactcttcaattcacaaacagcttcaccttataactaccttcatgtatctcagggtgatatcgttaattttgcaaaaaaaccagaaagtttaagcaatgaaataaaaagaatgctgggaataaaggataaagagtatgattctgtaaactctaacttgctcctggataatctttcaaaatatagagggtttgttgattactggactctcactgactcagaaaacaacagagtaaatacggatgcatttcaactaaaaataataaatgacaataagaaacttacagaaactctaaccaaccctaaaaataaatcactcatctctgattatcaaaaaaattccgaatcaatcaataaatctcagctagcttatgataaaactcaggaactgttatctttcataagtagaaacatttccgaaatcaacgatagaattggagtttataacaatttagatgctgtgacccctaaactacctcccttactagatatacagcatacccttttgttaaataaaaatttagaagcaataaaaaatcgcatcgaggatataaaacttaaaaatgatgaaataaaaaaaggatttatagaacaaggaattaaccaagatgtctcatcattattgagcaaacttagtgaatatcaagaaaacatagacagagccaaatcaaaaatcaatgaaataaatgaaaataaatctcggtacttcacgtatgttaaggagcgaagcgagtacgcaataaaatataaagactttatagaagagcaagcatcagaaatacgtaggctatatgattccctacaaactaataatgatagttggaatgaagaacagaatcatatcgtccaagatatactttcagatattagtataagcggcagagttatcttcgataacgataaattttataaaggattggaagaatgtattaacaaaggaaaattcagagcatccaacgaaaaaagcacaaaacaaaaattaattgaaacattcaacataagatcctatgaggatttctttacgttagttaacaatgataaaataattaattctgatggcggtagcgaattaatttcaattgaagatttcttttggaagaatgaatatttcaatcaaggaggacgctacgaattaatgcattatctattttcccctgaaagaataaagggatatttgtatgtcaatgccgagtttacctacaaaggaaagaccgttgataaactatcagtaggacaacgcggaacattttacgtgagtttaaaactcgcaactgatccgtttggcagtccatttgtattcgatcaacccgaagatgatcttgataatagtttcatcatgaaacaactcgtacctttattcaaaaagattaaaaaataccgacaagttataattgttacacataatgctaacttagttattaactctgattcagaacaggttattgtagcaaattatgacggcagtatgattagctatgaagtcggagctattgaagatggtgatattaaacttcaggaagggataagacatcatatatgttctattcttgaaggagggcatgttgcattctcagttcgtgaaaaaaaatatggtatccagtag

SEQ ID NO: 170807 - DNA, 1785 bp, Enterobacter cloacae
gtgcgaatcgcgacgataacaaactgggcctacggtgccacggtctgcctgaccctcgcttccggcatcatcatgctgatggcgtccaatgccgacacccttgagcgtcaggccgttgaacagcggcagatatttgatcaacttacggaagatatcgaaaccgatatctgggcgcagtctgatttagcccgcctgtacgtgattaaaaaagatccgcaaattctcagggaatacaaccagtcagagaacaagctgaagagtaccgaactccggctggaaaaactgcaggatgtcggcgcgtcagatgatgagctgtctctgctgcatgaagggataaaaatcgtcgatgagctacaggacgaacagcaggccgccctcacccacacggcgcagggagaagatgcgcaggccatcgccctgctctacggtgcgccctatgagcaggagctggaacgcgcccagaatcagatcgaacacttccgccagatactcgacaagcgggtgatcgcttccgttcaggaggcaaccaaaaaatcgaaaacgctgcggacaatctctgaaatgatggttggcctgaccgccctgctgttcctgtttgtgcttggctttatcttaaaacggcgcgtgctgcgcccggtggtacgcctgagcgatgtggtgcatcgcctggcgtcgcaggactatgccgtagaaacacccaatttcaaccagatcgatgagattggcgatatggcgcaggcgattcgtatctttcgtgaaaatggccttgcgcggcagcgtctggaaaaagagcgcgacgccgactgggccatccgcgagctgctggcgcgcatgacccagcggctgcaggggtgtgaaaactttgcggacgtgattaacgtagcggagctgttcgcccccaatatcgcgccgggaattgccgggcggctctatatcctcgaccgcgatccgtggcagatgcgctgcgtcgcgcagtggctttcgccgccaggagaggatacgccttttcatcccgatgagtgctgggcggtcagacgtgggcaaagccatcctccggtgaatggcgagccggatatcgcctgctaccatctgccggcgtcgcacacgcatacgtcgctctgcgttcctatgattgcccagggcgaagccattgggttgctctccttccagaacatcactgcggaaaatgccccttcccgcgcctatctggagctgatggctgaagcgctcggcctggcgctggccaaccaacgtctgcgcgatgccctgctggaaaaagccctcttcgatccgctcaccggcttgcgtaaccgccatcatctggaagataccctgcgcacccaaatggcgcaggcggtgcgcaatgaagagccggtaagctgcctgatgatcgacatcgaccacttcaaaagcatcaatgaccgctttggtcatgaagcgggcgatcaggtcatcaaaagcgtggccaccatcatacaacgcgccgtacacgacagcgggctggcattccgctatggcggcgaagagtttctggtgttgctttccggcgtcgatgaagaggcggcgcaggcgtgcgccaaagagatttataacggcgtgcatgaactgtcgctgcgctatgggctttcagagattggccctgtggatgtgtcgattggcgtcgccagctatccgcagcacgctcagagcgataacctgctgcgcgctgccgacgtggccttataccgggcgaaagagctgggccgttcgcgtattgtgagctttgggatgctggaggcgggctga

SEQ ID NO: 170808 - DNA, 207 bp, Enterobacter cloacae
atggtgcttaacgcggactatctgacggtggtcgcgcgggcgatgtgtcagccgctacagcttgatgacaagctggtggcgttgcccatcacccaactgccgtcggcgcagtattgcgcggtgtggtcgcaaaagtcggcgatgaccaccaacgcgcgccagtttttgattcgcctgcgcgaagcatgcagagggtttagctggtag

SEQ ID NO: 170809 - DNA, 1071 bp, Enterobacter cloacae
atgtcccttatgctctcccgtcatgggatctggtactaccggaaagttaacgtcttaccttgtggtaaacgccgcgagtttcgtcgttcgttaggtacgcgttcaaagactgaagcgacaaagcgatctttacgctttgcagatcgtccttggctgagtactgaaaccgccacgactacaatcgatttgattcaatcccctcattcagacttgtcgctcagcgagctaaaactacatgctgagcagtacgttgagtttaaaagccgtgaagtttgtgaaagggaattttcttctatcaaacgctgtattgaaaagtactttagcttcactgatcaggtgcttaagcgtagcagggctgctgaattcattagcgggctcgatgtcgcgattcctacaaagaacaaatatgttaagaaaatcagtggttttttccgatggctgaaacatcgcactgactatgattttcaaaatccctttgaggggttgctccaaaaggatcgcgagccagtttcccaaaagcgagaggcatatacctctgctcagatcagatgtctggagaatgggatcagtactttacctgactggaagagatggattattttgcttggtcgatttacggggatgagagctaatgaaatttgtcagctatatcatggtgatatatttaaaaatgagggaagatggtgcatcaggattgatgatcgtcatgatggacaggtggtcaaaacggagaacagtaaacgtacaataccaattcataacaaattgatagatatgggatttttggactatgtacagaaccaaaagggtagactgttcccgcagttaactttctataaagggtcatacagccactacttcacccgctggtttagtggttatcgcaaaaaattaggggttccagagtttcattcactgcgacattacattgccactaagttaaaaaatgctggtgtagtggagcattatgctgctgcattcttaggacatgcagataattcaatcacataccgaagatatggtaagtcagttgcagtgtctcaactatatgatttattagaacatatttga

SEQ ID NO: 170810 - DNA, 267 bp, Enterobacter cloacae
atgtcaaagaaaaacggtaaaatacaaaccaaaaataagatcaggactaataggaagtcattgaacaaatcagtacgaaaaaaagaaaaggttaatttcattcaactaacattctctcagtacgagaatatcctactaggtgatatgacaagtgccaggatttgtaatttacttaaagtgaattgcgataaagatttcattagcaatctacgcaaaaataaagtgccagagtatagtgaatggttcaagaaggtacgtggagtataa

SEQ ID NO: 170811 - DNA, 468 bp, Enterobacter cloacae
atggcaaaaaaagaaaggatttatgacaataaaaagttagaagaagcattaaaacgtgttacttacagtggcctaacatcagaagcaactctaataattaaccagacgattcaagagtgtaaatcattgggaaagtacaagttacctgttaaagatgtcttctacatcgtcaaacacgctacagagctttcaaaagtacaggttaagtattatcttatcttaacccgttcagaacagatgaagacattagcagcaagtgaatcttctatcgagaaatacaaattagcctgtaccgcagttgctacagcactggataagtttgtagaagaggggggaatactatgtggattaaagaaagcatcacctggtaagccattgactgatgaacagcataacgcagtacaggaactattggacagtaaagcctcggcgaaagctctaatcgcatatctacgaacagttacttaa

SEQ ID NO: 170812 - DNA, 684 bp, Enterobacter cloacae
atggacgagaataataaagaagttattgaaataagaccagaagataaggactttttcgcagaatttattgattgtgaaggtccaatcatccaagattcaattgatcataaaaaaatcacccttgcacttgataaagcccacgacataagaaagtttgaaatagatctctattggaagcgtgctacatacttcttcgcattcttcactgtaataacagctgcatttggttatttgttcacccataaaaactatactttcttagcccctgcacttgcgatcattggttctgtttttgctttatgtttttgttatgtgaatatcggtagtaagtattggcaagaaaactgggagtttataattgataaaattgaatattatgtcacaggaaacctttataaacttttcttcttcgaaaaccatagaaccaaacgcccatcagtcactaagattaatatatttctaagcaagctaattatagctatatggtacgcttgctttatactttccatgcaccagatatggaatcaaagcatggtattaaatgtctcttatattatccttatcatatatagcactggaacgaccttatattactgcgataaaactgttgcagacatatcgaacaatgataaagaatcaccacgattctttagattcagaaatcctaattacataaaatcataa

SEQ ID NO: 170813 - DNA, 561 bp, Enterobacter cloacae
atggccgggcttgtcgttttcatcatttgtgtgatccttgcagtacttactttcaggaaagtttcaaactattccagaaataaaggtcggggaaagttccgtactttgattacgtcgttaggcatgagttttattgtctttgtcgtttcggtaggtatcggttccggggttgtttcacaagataaaagtactgatgcaaaggcttcaacgtctaccagtactgaaaaggccaaaaccaatgtttataaatgcgataagttcgatgcaataatacaaactcgacagggaacaaaaagcgattcaggttactattcagataaaggaattttaatttattatactatatccgataatgaattaatcagtcgaatgccaattcccggcgataaagatagtgtgtatactgctaaattcaacaagattgcagcagatggttcaaggaagtacggaaattcgtcaagtaattattttgtatctgtacttaatgataataatataaaagtaattgatgttgaatttaaccataatgcaaccattacacaaatttgttctaaacaatga

SEQ ID NO: 170814 - DNA, 357 bp, Enterobacter cloacae
atgaaaagagcattatcagtactgttgtcgatagttccattaaccacaattgcggctactattcctgacggtaaaactgaaaagccgttcgtaattgatggggaagttatttgtttgaaagaaattcagaagcaaatcaccccttatctcaaatcttttgaagaagaaagcggggttaagtacaagtacaatgttaaatctggtttatcgtacaaagatactgtagggctgcggttacagatcaatcgtgtggattcgggattggatatgcgtgttgcggatcttgattactactggttacaggaacgcggcagcctgtgtcaaccaacatacatgatagttgaccgttctcaatga

SEQ ID NO: 170815 - DNA, 1653 bp, Enterobacter cloacae
atgaatatagtatctaaaatagccgatttattcatgccatcgcaagaagtttcttcttgcgacaactttcatttatttaaggctgaatatcgtattttagaaactactatccatcaagattattctcaacgggtggaagaattaacaaatgaagtcatagctaacaatctagatattgaaattgactttaagtttcagacttgtgattcattcacccttcttatttccccagaatattgtagtgatcttcaacaagttaaagataaaattgacaatgctattcaattttcagaaactgatgataccattattatttgcatttctattgataaaaaaatcgccttagataaagacaataaaatacatatatttaactttgataatttcatcaaaaatgtctttggggcgaatgtatccagtattctgacatatcttaactgctttgatctacataaggagttgctttttaatgtctgggacgacattaactcctttggtagtgaaacaatcaaatttgttagccaaaaagatttggttggttctaatactctcagcatagcccgggattccatcatctcaaaaagaaataaaagctgccattttataaatgattcacaatataaattcattcccgatgattttttcctgtccccttcagggtcttgtcattctgatataaaaaacacatttgattctctattaacaacttttctcattgtttatctcgctgatacatctgaaatttcagttgagaatgatagtaatgatttatatattgattataaattcaaaggttatagactaatcagtgaagttattgcaataaatgacatgagcaataacagtacaagtgagcttttcgatatttacaagtgggtctataatagcggcaacttcatagataaaattggtcttgctcgaaatataatatccattcatatggtggataagagtatgacatcgataaatcatggcacattaaagtccatagaatcgggctatgacatataccttaaggataatgtaaagcaatacattgaaataaaaaataaaatctctgagtttctcgttgggcaatcagacaaagcatctgacattactaaaaacatgttttccaccttcaaaactagtttttggagtattataacattctttatttcggtatttctcattaagataatcacatctaatagttatagaggaactgtaaccttagaaactctagttgtaactctggtgtttattttattctctgttgtctattggtattttacaaataaagaagtattggaagaaaaagatagattactcagccgttatgacacaatcaaaaacagatataaagatcttcttaatgaagacgatttaaataacataattaatacagaaaaattaaaagcagatgacactgcatacatagagtcccgacggaaaagattttcaattatttggaatagttttaatgctgttattgcaatagtggtattggggttgttttgcttagataataatatgtcaccgagtaataaattagaagaagaggtaaaagcacagccacagccacagccacagccacagccacagccacagccacagccacagccacaaaatacaaagcagaaattgcaaaatcaagatctaaatacaaattaa

SEQ ID NO: 170816 - DNA, 147 bp, Enterobacter cloacae
atgtttgccctgaaaaccatattaatagagtggttatttttgccggtgggcattattaaaaaaggtttaaacgcgcccgggagaagattattcaacacgccgccgtgccgctctcagaatattctcgcaaagtggctgattaattag

SEQ ID NO: 170817 - DNA, 1164 bp, Enterobacter cloacae
atgaaccgtctgccgcttgttgccgcccagccgggcatctggatggcggagcagctttccagcctgccgaacgcctggagcgtggcacactacaccgaactgaaaggcgatattgacgcaccgctgctggcaaaagccgttgccgaaggcatgatgcaggccgacactctgcgcatgcgcttcaccgaggataacggtgaggtgtggcagtgggtggatgcatcaatgacgctgcctgaaccggaaatcgtgaatgccggttcccatgacgccgccgtggcgctgatggacgccgaccttaatcagaaccttcgtgtcgacagcggtcagctcctggcgtttcacctgctgattcagatcggtccgcaacactggtactggtatcagcgctatcaccatttggtggtcgatggcttcagcttcccggcgattacccgccagatcgccgcgatttatgccgcgtggaagaggggcgagcccacgcctgactccccgtttacgccgttcgccggggtggtggaggagtatcagcgctaccgcgacagcgaggcgtatcagcgcgacggtgccttctgggttgagcagcgcaaacagcttccttctccggtctcgctttcctctgcgccgctgccggggcgtgccgccaccaccgacatcctgcgcctgaaaatcgccgccgatggccgcgccttcagccagcttgcgcaggccgcaggacaggtacagcgcaccgatctggcgcttgcgctggtagcgctgtggctgggccgtctcaccggacggctggactacgccgccgggtttatctttatgcgccgcatgggctccgctgcgctgaccgcaaccggcccggtgctcaacgtgctgccgctggcggtgaacattcatccgcacgagagcctgccggaactggcgcagcgcctggcaaaccagctgaaaaaaatgcgtcgccaccagcgctacgacgccgagcagatcgtgcgcgacagcgggcgtgccgcaggggatgaagccctgttcggcccggtgctcaacgtcaaggtattcgattaccagctggacatcgacggcgtggaggccaccacccacacgctggccaccggcccggtgaacgatctggagctggcattgttcccggacgagcaggggggggctgagcattga

SEQ ID NO: 170818 - DNA, 456 bp, Enterobacter cloacae
atgtctgattttattaaccgaaacattaattatatatggcttggtttatgtgcgctctctgcactaattgttttacttgcttttttggcctggaataccagcacacttagcaatccaagacagatagttatggatttaaataatgtccatgttgatgagtgctcttttgataaacaccgcataaaggttgtaggttgggcattcactgacggagagccatcatcagttaatcgcgttttcgcgtacaagattaatggtgagattgttgaggttatgtcgtcagtggtcatgaggcctgatgtaacacgttacttcaataaaaacatgtcatatgacaggtcaggtttctcagcatcaaaacgcatcttcaatgagaatgattacagtggtgagattgaagtggtttcagaggattataacggagttggtcatgccaaaagattcagttgcaaataa

SEQ ID NO: 170819 - DNA, 1794 bp, Enterobacter cloacae
gtggagtcagggacatctccatcatcaacgggtggggtaggctcctcatcctggctgccaatgagtgatgccgtattaaaagcattactactttcgagttctgggtcggcaaatgttaacaggccatcagagacggttgaggcggcattaacaagaacagatacgcgcttcaccaatgttattagcctttctaatagaacatctattccagagttagggtatacaggaaacaagcactggtgcccaattgagaatgatggcatccagcttggcaactatgttttcgaaacacctacacatgttgaccttaagttcgtcagtgacccaataactccatcttcagggattattttctcttttggacgtccagatctttctgggggcgctgcgttttggtcacaagatagctatgagcttaaaaatggaacgttcgagggaggcactccacagattgcagtatttatgccatggacatcgcataccgcaactgtagaaaacaacagaattttaaacaacggctcgccgtcttactatgctttgaacttcagagcgcaaaactggtggccaatcgtcagaggaaacacatttgctgattacttagataagggaggtaatttttgcaaagcaactgatgatgaaggtgttacggcggataaatacactggtaacagccgactaacattttctcaaaacaggtgtaaatggcttggtgctggcattggcggggtgatgctatatacctctggagtcgcggcaaccatcactgataacgcaagcgagaacagcaagattgctgtgaaatttggatatccatcctcatatgcaattgtagataaactttacaatgagatgatgtatggaactcaaactgtatttgaaattggtgatgatgacgatagcggagcgccatctaacaattacacaggaatagttatcaggaatgtttacagcaactttcactccataaacaccaacaccttcattagaatggcaaataattcagtgctattaaatgaaattgatatagacggggttaatatcacgaacctgccaacatctgggtttattcagccaattgtcaaaattaatgacatagcatttcagaagataatagcaggaaggatatctgctgctaatagccctcttattccactgacaaccaatagagttgccgtagttgataagtatgggttaaatattcctgccattaactctgatcttgtctatattaacaacgcaacagtttctgtgccagctaactcatcaacagttattgctcctggatggttcgctcgttcaaactcttctgcgacctttacgcgtactggttcaggtgcagcaatggccaatttgagggattcgagattcatcggctctttatcagcagcagcaggggcgcaaagttcaatttacttccaatttacagatgcaatacttatcaactctgaatatgcaaccattcagtttttgataaacacatctcaaaacgtcaacaacacagttgttacatcagtgtttaacccagacggtagcaggtcacaaatagacacaagaacaatatctagcggggcatcatggcaagaggttaccatcacaatcagttctagagatgctaatagctcaggctctatgcttaatgttgaaatcaacaattcatcctcatcagcaatgacgacatatgttactggatttagattaaatagaggccaatatggattgtgctataaggccgatattaagtcctatggtcagactgcgagagagcaagcggactatacatacataacaccgtaa

SEQ ID NO: 170820 - DNA, 516 bp, Enterobacter cloacae
atgagaatccccgaccggggttcgacaactggcgacagccagttggacagactgcgagcgcagcgaacagactgcccgaagggcgagcgaagcgagtcaatccccccctcaccgccatattcaaggcaagagctcgtacgaaagtacgggcttttttcttttatagtctccgaaaggggggatgagaatccccgaccggggttcgacaactggcgacagccagttggacagactgcgagcgcagcgaacagactgcccgaagggcgagcgaagcgagtcaatcccccctcaccgccatattcaagacaagagctcgtacgaaagtacgggcttttttcttttatagtctccgaaaagggggatgagaaccttgagccccctgcgctctttatgtcgggtggcgctgcgcttacccgacctacaaaaaactactcttcaaccatccgtgcatactcttctgtaagaaaatccaccagcgccctgacggacggcagtaatccgcgtcttgatggataa

SEQ ID NO: 170821 - DNA, 231 bp, Enterobacter cloacae
atgtttaaaaaaacactcacagtagtggcaattctttcaactctttctgttggtgctaacgccgctgaaattggcgctcagttaggtacacaacatacggagttaaatgcactaattgcgcctgagccgaccggtattttttatactgcaaactgggctaacaattataatgatggccgtaattctggcggtgtcggcctgggttatcaggtgtctctggggctttgttga

SEQ ID NO: 170822 - DNA, 1194 bp, Enterobacter cloacae
atgaatggcgtactgggggcggaaaagctctgtctgtcgctgtttgagcacaacggggtggaactgcagaccgcggcctggtatacgctcgtccgaacgcatctggccggtctgtacggcatgaacgaaggactggcaatactggacgcactcctgtcccgccagtggggcaatatctggccgcagcctgtacatgcgcgtatggaaattctcagcgcgctcagcagacgattacaacagacgatgcgcaccttcacgctgacctgtaccgacctcagccagttgtaccagacagaagagcacctgaacgcactgggcgacgtattgcagcgtcttgaactgaggcatgccagccagctcgattccctgcgtacccaggtccataacgcggcggtacggctggaaaacagcgacggcgggcaggaggcgggcggtgctgttctcccggccagctttacgaccccggcagaacacgtcaggcgggtgtatgtcgcgcatccagacaggcaggtgttgaccgcgccacctccggtgaagccctggaagccatttgccgccggaatgctgtccatgctggtgctcgtgggggcatccgtatggggatggcaggcaacacatcagccggatccgcaacaggtgcagtttaccgcctcgcttaccccgttgcccgtcgcgctttccggtgaacaactggcccggctgcgacaaaaggcgccaccgccggaggtggggataaaacagacgcagcagcagctcacgcagtttgcgcagttaaaaccggactgggccatccgctatggcgacagcctggtgcggcaggcgctgaccctctggccggagcaggcgaaaccgctggcgcagcagtggcagcagtggctggaggccgctgcattaccgtctgagtcacttgacggctggcatcaggggatgacgcagttacagcagctggcaaaccggctgaacgcgctggatgagcagaaggggaaatacatgacggtcagcgagctgaaatcagcggtcttcgccatgacgcagtcatttaacagtgccgtgccggtagaggaacggctgcggcagctggcagaatggcctcaaaatcagccctggcctgccgcacagcagagccagacagaacagcatctgcagcaactgattgcccgttatgccctactgaaacaaaaaacggcggaatag

SEQ ID NO: 170823 - DNA, 159 bp, Enterobacter cloacae
atgcagcagcagcttgaggaaaaccgccaggcgctgctggatctggtcgccagcatcacgaacagacctgacggcatctcctgtgacgacaacatgcaacgcctgctgggacagttgcagaactcagacggtagcccgaacccggcgaacccgcgttga

SEQ ID NO: 170824 - DNA, 291 bp, Enterobacter cloacae
atgccatatctggaggaagtgaaaaccggcctcacagaatcaatgcgtgattttcaggtagtggaatttgaggacgacgcggagcaaccgcgacaaaaagagtggttgctggaggataccgaaacgaaatgcgactactgccgggcgttaaaccatgtgttgctggtgtcgcatgttgaccgcgatatgttgccgcacctgacgggactgcttcatgacattacgcattcaatggcggcagatgtctttgcacctcaacattcagaaaagataatgcacattatttcctga

SEQ ID NO: 170825 - DNA, 1275 bp, Enterobacter cloacae
atgacaattcacgatccacgctacagcgatgtgattatcattggcgggggcgcgaccggcgctggcatcgcacgcgactgtgcgctcagagggctgagcgtcacgctcctggagcgccatgatattgcgaccggcgctaccggacgcaatcatggcctgctgcacagcggcgcccgctacgccgttaccgacggcgaatcggcacgcgaatgtatcgccgaaaatcagatcctgcgacgtatcgcccgccactgtattgaaccgaccgacggcctgtttattacgcttcccgaagacgatctcgcctttcagtcaactttcattaccgcctgccaggccgcgggaattcaggcgcaagccattgacccggccctcgcacgccgcatcgaaccttcggttaatccggcactgacgggtgcagtaaaagtcccggacggcaccgtggatccgtttcgtctgacggcggccaacatgctggacgcccgcgagcacagcgcgcggatcctgaccggccatcaggtcaccgggcttatccgtgaggggcatcgcatcgtgggcgtgcgggtcctggatacgcagtacaacgaacacagcgagctgtatgccgccgtggtggtcaacgcggcggggatctgggggcaacacatcgcagaatacgccgatttatctgtgcgcatgttcccggccaaaggctcgctgctgatcctcgaccaccgcattaataaccatgtcatcaaccgctgccgaaaaccgtctgacgcagacatccttgtccccggcgataccatttcgttaattgggaccacctccacccacgttgactacagcgagattgactacaatcgggtcaccgcagaagaggtcgacatcctgctgcgagaaggagaaaaactggcgccggtgatggcccagacccgcatcctgcgcgcctacgcgggtgtgcgtccgcttgtcgccagcgataacgacccgagcggacgcaatgtcagccgcggcattgtgctgcttgaccatgccgcgcgtgacgggctggacggcttcatcaccatcaccggcggtaaattgatgacctaccgcctgatggccgaatgggcgacggatgctgtctgccgcaagctgggcaatagcgaaccgtgcgtgaccgcagaacagcccctgcccggctcgcgccagtccaccgagaaaacgctgcaaaaaattatctccctgcctgccccccctgcgtggttcggctgtctatcgccatggcgacagaacaccggtctggctgggtga

SEQ ID NO: 170826 - DNA, 357 bp, Enterobacter cloacae
atggtagagattaccacccttgaggataatgttatggtagagatttccaccccgtcaagtgggatgggtgaaaaaattcgtgtgattagagatgcggaggggctaacaaggcagcaattctttgaattgactggaatacctgccggaacccaaaaatattatgagacaggtagagtggagagtatcggcagcgatatcttgctcaagatcactcaacacccccactttgcgaaatacacgctctggttaatgacaggaaatactgcaccagaagccggacaagtcgccccggctctctctcttgatgggccagaagctgcggcaacgtcgcgccgctccgcccgcaaaactggttaa

SEQ ID NO: 170827 - DNA, 1431 bp, Enterobacter cloacae
gtgattcccaagccagctaagaccagcagtgacgtcgtaaggcgcatttggagcctttgtcacatcctgcgtggcgatggagttagttaccatgagtatatatctgagctcacctacctgctctttctgaagatagctgaggagactcagactgaatccggtttgccggaaggttgccgttggcgtgacttgatagaatataaaggcgatgatttgcttacattttatagggacatgcttacttatcttggcggccatgccgcaaatccaatagtacaggaaatttattcatttcccacaaccgttttttcccattctgaaaacctgaaagctgtaattatgggtattgcaaaactgaattggcattcagttactgcggatggaatgggtgatatttatgaagaattattagccaagaattctcaagatgcacgttcaggcgccggtcagtactttactcctagggcacttgttgattgcatggttcgattggttcgccctaccttgggagaaataattcaagatcctgcatgtggtacgggtggatttctaatctctgcgaaacattacatcgaagctggatcttcctcagacgaatacattgccagaaaacctttttttgaagggatggagattgagaaagggacatataggatttgtcagatgaattcattcctgcatggacttaacgcaaaaataaatcttggagatgcattgacatcagatgcaaaaatattacaacaagctgatctgatacttgcaaatccccccttcggaaataaagcaggaagcgcaagacgtggacgcagcgatctacctcatcataccactaataagcaattagcatttttacaacatatatggttggggctaaaaaataatggtagagctgcggtagtagtgcctgataatgtcctttttgaaggcggtgcaggtcgcttgataagaaaagatttaatgaagaactgtaacttacatacaattcttcgtttacctaatggtattttttatagccaaggcgtaaatacgaatgtgatgttttttacccgccgcgataataatattgagaattccaagcgcgtttgggtttatgacatgcgaactggagttcgtcgatttggcaaaaccaggccgcttttatcggagcattttgcagaattcgaaatgcttttcggagagaatccttatgatggatcttccagaactgaggaaataaaaaatgaacgctggcgttgttttgaccgtgatgaaataaccgctagagaggaaaatctcgattttgtgtggcttactccccaagaggaagagtctgagatagaagaggtgcaaccacaagaagttctttcatctattttatttcatttacaaactgctatcgcagaaatcgaactactcacagaagagttttcgccggaagagggtgaaccatga

SEQ ID NO: 170828 - DNA, 1557 bp, Enterobacter cloacae
atgaaaggtcttccactaggttggatagaaacaactattggtgaaatatcaactcttgtaaatggacgtgcgtttaagccgggtgaatgggagaaagaagggctacccatcattcgtatacaaaatttaaacagagctgatgcccaattcaattttttttcggggccagtatcgaaacagcacctcgttaataatggcgatcttttatttgcatggtcagggacaccaggaacttcctttggtgcacatatatggcgtggcgcaactgcaattttgaaccagcatattttcaatgttcgtgttgattcgagagctattgaccgtgaatatctacggttagctataaatcaaacaattgatgagcaaattgcaaaagctcatggtggagctggactccggcacgtcacaaaaaaagcatttgaatctacaaaaatcaacctccctccattgaaggagcagaagcgtatagctcaattggtcttagccttcgaggaacgtaatgcgctcatacgttcacagctcgaaacgattatttcttcagtgagtactggccatgcagcttttttacaggcagcgtatgacctgagtttagtttcagctggaaagctagaattaaattcggacaaaaccttatacgttacggtaggtgaaattgctttaagtattacatatggcacatccgcgaaatcatcagctataggtgaagtccctgtattacgtatgggaaatattcaacaaggtgaaatcgactggactaatttggtttatacctcggacaaacaagagataaatcgttatatgcttgaagacggggatgtattattcaatagaaccaatagtccccagcttgttggaaaaactgccatttttcgaggtgaacaacctgcggtttatgctgggtatttgatccgagttaaatgttcggagaaaatgttgcctgaatacttaacttattgcttaaatagtcctgctggacgaaaatattgccatttagtcaaaagcgatggagtgagtcaatccaacataaattctaaaaagctcgctgcattcaaaataccatgccccgatatttctgtacaaagagaaattgttaacaggactagtagtggtctaaaaaaactggtcactgttgaaattcaagcaaaaaatgctttgaaaaatctggatgttttacacaaaacgatagttcgccaagcattaatggggaaatttaatacacataactccttagacgagcctgcaattgtacagttaaagcaactcactgaggccaaaaaaagtattcaaaatgaacgaagtgagaaaaaacgctcttctggagggaaaatagtgcgcagaaaagttctagatattttgcgtgaagctgacgattgggtttctgcgcaaacagtagctgagcaatatgggctaacttttggaacacagactgaggatgttgaaccttttttctctgaattacgtaagcttgatgctgaaggtgaactgatagttgaatcggtgcttgatacagcgggagctaaagtgagccaacgtttgcgtcttaaggataagagttaa

SEQ ID NO: 170829 - DNA, 1680 bp, Enterobacter cloacae
atgcgagtcgataagctgagaatcgggagttccaaagacagcccaacacatcagttcaaaaatctaaaggacgtaacaatagattttgagcaaagcgaatgggtcacagttgtgatcggatggaacggcactggtaaatcgaatgtcttagaggcccttgcgattatttttcgggaattaatagggtacaaaaaaactccccggattgatttcgcatttgaattagtatatagaattggtataagagaccaacaaaaatggatcaagattgaacatgatccagacaaaaaagaatctttccttataagcattataccattacttcctgtagacgatatgggtcctccagctccggaaaaaattaaactcagagcatttctccgcgatgagtctaatcttccacgttacgtttttagttattattccggagaaagttcacgactgagagacgtattctctccatatcttcaatggtatgatgaacagcttaggcggggtaaagaccccggtctcaaaaggctattctatgcattgccggtgcatagccaatttgttttacttgcgtttatgattggttcttcgagtgaatcatctaatcttctccgtgatcatttaggtcttgatccacaggatggtttggagtctgttctttttgttttacgtaacccgccttggaaagcccatccagacggagatcctcgtttttggggggctaggggtgtggtgagcacgttccttgatcgtcttatgaatgtagcacttgcacctattgaagtagaacgccgtgttccaacatctttatggaatactgagttgctgaaattcaaatatctttatataaaagatatcaatgcgcttcgtgaattggtaggtaacttaagtcctgctcaattttttagagatttagaaagtacatatgtttcccagctcattgatgaagttcgtataaaagtaaaactaagcaaaaatgatggcgttgttacgtttagagaattaagtgaaggagaacagcagttacttacagtccttggattattgaaattcacagcagaaaacgaaagtctctttcttcttgatgaacctgacactcatcttaatcctaagtggagtgtagaatacttagcattcttacgagagtttatcggtggagctcctgaagagcaagaaggtagtcatgtgattatgacaacacataatccattagctattgcagagctttctagaaaacaagtccaaatacttcaagtaaagagggaggaaaataggcgaaatatagttgcatcttacccggaaatggatccgcgggggatgggatatgcggcgatcgttacgagtgaaatgttcgggattgcatctaccttagatagaccaactcaacatgatcttgaaatgcagcgtcttctttcaatgaagaaagagctttcttttgatgaaaagactgaactcgataagattaacaaacgcttagatcgattaggctttcggtttttttatcctgatgatgagtattcgagatatcttcgtctccggcgtgaggcgttggtacagaaatataatacggaggattctaaaagcatcgctggaagcgttttgaatatgtctttagaggaacgtgaagcgctttcacgccgcctcttggcttcaatggttgagaatgaagatgaagaggaaaataaatga

SEQ ID NO: 170830 - DNA, 855 bp, Enterobacter cloacae
atgaggtacatagatattgaagccttacgtttacatgatggttggtttggtgaagctgaggctgcgacacgggctataattgaagggaatgatattccaggcgatcatgaggaaatttggcgaggaattaaagcaaaactagcggaggtgcttcacaacaaatgttggttttgcgagactccaatccctcgttctgataatgctgtcgatcattttcgaccaaaaggccgtgttagtgatgctgccaagaaacacactggatataagtggttagcatgtgaatgtgcaaattttagatatgcttgcactttttgcaatagtcgtcgtattgatgtggaaaatgggacgagcggaggtaaagctgatcgttttcctttgctaaacgaagacaatcgtgtgtatgaaattgatcctaaatcggtagattttgatgatcttttcaaaactgtcaggggggagcagcccactctcttagatccatgtagcctcaatgattgggaacttttaggatgcatgcgtgaaaatgggcgaccatgctcaacaaaaagtgacggcacttctatttctagggtcaaaatgtcaatagaagtttatcatttggatcatgagccaacgtgtaaacaacgccatcttgcagcagttagacttctagagacagtgagggatgcaaaagatgcatttttaaaagttgatataaatgatcctgaaactgaagttaattttactaaatatgcaaggcgtataagacgaatgatagacagaaattcaccatatagcggcgaaatggaatttctccttcggggtcagagatcaccagatgaacatccatggatagaccatttattggtaagttaa

SEQ ID NO: 170831 - DNA, 585 bp, Enterobacter cloacae
atgatcccaccactgaattacctcgtattattcgacgccctccatgcgctgaaagaaggcaatattcgtcactgccaagcgctggggttcacgttcgacgaaatgaacgccctcagtcagttgtctctggacgaattctttaccttaagccgggcatctgcgccattcatagatatctctatacgccatgatgtattacatcagttactaactctgtgcctccaggagacacaccatcagcaacggatcaaccgggctgtccggctgggcggctcgattgcactgctgcatcagtactttggtcttacctccaatgacgtttgcctacgccgccggttattgggggtcactatcccgcatggccggcccccgatcccggatgaagaaaccgatgccgaaatctggcgacagtggcaacagcgccgtcaggaaaacatcgactcgcccgaggcgctagaagcgatgatgcaggttaccgaagcgttggcttaccggcccgaaatcccctcgctcacggcggttcacaatcgtattacgctgtgcgaacaggacgctgcccttgaaaggaggatgccacatgcctga

SEQ ID NO: 170832 - DNA, 915 bp, Enterobacter cloacae
atgcttaaaaataacaacctcgcaaaaaattcgttcttgcaaccagagtggcttaccatacaggaagctgtaaaaataataaataaagtgttaaaaacaaagataaaggagtgtgatatttatcgccatgccttatatggaaatgttttactatccatatattttcaatctccttttatattgcgaaaaataaagtactcttgcaataaactcaagttacgaccagtaaatgcctctcttattgaacggttatgcatacttgagagaagctgctttataaatgatataaacttaacactgagtacagatggggagtatataatcccaacacaaagggttattaatacatgcttattgggacatgagttcgtgttagtacaacggctactcgctgattcactgaatttgcctttacctgtcactggtgcaaataatattaactatgggatcaccgtaaacctgtccggggaaagttttcaggtatttgagaaaataacatggcaaggacggataaaacaccaaacaatgagattacctgaaatagttgcaactgatgtttgtgcgcatgtctcatctaaaaacatggaagattatcgtaataaagattgtttcccaatttatgaattgccacaagatgcctgcttcgtcatccgttatgctgaacttgagaaattaattaattcttcagataaaggtaaaagcccttccttacctccttcccggatatcaacacccttatcacgcctgctctggctagcttgtaaacataatgagactataagtccattgataaggcaaccttataagttattgtccatttttgaacaatgggcattggccgatggtattactgatcggctcagtggcgatacgttaaaaacggcacttgagcgcggctctcctacatccatttag

SEQ ID NO: 170833 - DNA, 411 bp, Enterobacter cloacae
atgactattcacgataacaaacttacagaatcacaaaaaattgtttatgaatgggtaaaaataaatccttggcataaacgtatgcatgccagtgaagccattatgaaaaaatatggactcagctggaggcaagctttcaatgctcatatttccataacgcgcaaaggatttttgcaaaaacagaaagcaagtatgaatacagtatacgctatcagtaccttcagtgaagtaccggcagcgctggaacaggaacgacagcatttcctttcatggcttaaaaatgagcatgggatttatggcaaagaagttatatggcatccggacaaaaatcgctttgcagtttttagcgtaaatttatcatggtgcgcatggcaggctcaatcagaggtgaagaataaacacaagcagtaa

SEQ ID NO: 170834 - DNA, 768 bp, Enterobacter cloacae
atgagaatgcaaagcaaaatagctctggttaccggggccggacagggaatcggcaaggcaatagccaaacggcttgcagaagaaggcgcgttaattatcattaatgacttgcacgatgataatcgcacacgagaaacgctcaatgaaataagaaaagcaggcagtaacggatacattatagcaggagacgtaagtaatccagaaatctgtcgcggtattatcgaaaaaagtttcagtcaaatgggaaacattgacgtcctggttaataatgcaggcattgaacgacacgctgatttccttgacgtaacggaagaagattttgatgctgtgatgaacgttaaccttaaaggggcgttttttattacacaagcattcgcacaatacttccgaggcgttcaacgcaaagggcggattataaatattagctcaatccatgaggagctgccattccctcactttacgagctattgcatgagcaaaggaggaatgaaaatgatgatgcgaaatttagccatcgaactcgcccctttaggaatcaccattaataatatagctccaggtgcgataaaaaccgacatcaatgaacgcttaataaataatccgcagcaactcacatcccttactaagaatatacctttaaggcgccttggtaaaacgttggatgttgccaatgcagtactctatctggcatctgacgaagctgattatatgacaggtacaactatgtatattgatggtggattattgtggaattatcaggaacaataa

SEQ ID NO: 170835 - DNA, 675 bp, Enterobacter cloacae
atgactgatactgagactgaggttgtaaaaatcacgacacctgcgcagcaacaacgaagagaggctattttactggcggcagccgatatgttttttgagcggggatacgcagctacgagtgttgacgccattctcgccaaggttgggggatccaagcgcagcatttacgcagaatttggaaacaaggaaggactgtttaccgcactggtttcccaccacgcccgttatgcgctttcagcacttgaggagcaggatgcaggttacggaaaagatattgaacagcacctgctgatatttggtcgccgcctgatggatatctatttttcccctgcactactgggtatcttccgggcaataatggcagagggcgcgcgttttcctgagttaacccgttctttctacgagcagggccccgcgcacgccgccatacgtctttctgaagtgcttaatgctgctgcatctcgcaatgagattgcggttgatgacggcatcatggcggccagccatttcatcggcatgttgagagataacctgcacctaagtgttgttctcggtctcagaccggtgccctctgaggccgagacggaaaaacacgtcgtgtctgccgttcaaatattcctcagaggtctttcttatcattctgtgaacaacagcacccgacggcagtcaacatga

SEQ ID NO: 170836 - DNA, 1572 bp, Enterobacter cloacae
atggctgctcgttctaaccttgtaaatttagatgcactgattaagcgtgctgatctaggtttaaagatccaggataattcttcatttgaaactctaaacagtattcctgcaagagaactgaaatcaggaaatggaattgcagcgcttctgagaaaaccagatttccagcgtgaaacaaatcattgggggcctgagcaggtcgtatctctgctcgaatgctacatcaatggtgatttgataccttccgttattctttggcgatcatcaaccaatctttttgtgatcgatggtggtcaccgtttaagtgcattacgtgcctgggtagaagatgattatggcgacggtcatatatcccatcaactttttgggcatgatattcctcgtgagcaacgccgcgctgctgatagaacgagaaagcttgttaaggacagggtcggcagctgggaatattatcagaaactgcttgccgatgatgcttcattgaccgaggagcaacagcgaagaatcagtgtactgacgtcccgtggaatctccgtccaatgggtagttggtgatgtagataaggctgaaacctcattttttaacattaatatgaagggaactcctcttgatgctatcgaagaaatgcttttaaagaatcgcaagaaaagtattccgatagcaacccgagcaattattcgtgctggtaaaggccatcgctactggtctgagtttgatcagggcattgcccagcaacttgaagagaaatctgcaaagctgcatcgtttgctcttcgaacctgaggttgatcgccctatcaaaactcttgatcttccattaggcggttccaggggggtcaggacagcgatccaagttttgaaagatttcttactgatcactgattgcaaccagaatggtgttttgaaaaaaatcgaagattaccctgatgatgtgtcgggtaccgatacattaagaatcctttccaaagccacaacattaagcaacagaattacaggtaatggcgatggtagcctgggacttcatccagcgatttatttttatggtccgactggaatccactcaacgccaatgtttttaggaaccgtgctactggtagcaaaacaactctccaacaataacggtcaattctttaaagacttcataacaatcaggtcaaggcttgagagaataatgattgaatttaaggacttgatcgcaatgatagtacaaaaaccaggcagcaacgtccgagtgactcgctactgtgattttttaaatgcggtgatcaaatcactcaagcagggagagaatattgatgagagtaagctcatcgaactggccgaattggaggggagaatactctctggcgattttaagagaacatctgcaaaaatcagcgatgaacaaaaaagtaaggtgttcattgatgtggctctgcgcaacgctttgaaatgtccgatttgccagggttaccttgatactgaaaaatcagtttcttatgaccatattgtacgtgtccgtgaaggtggtgatggcaactctaacaatgtacagttgacacatccttactgtaaccagtcagtgaagtgttaa

SEQ ID NO: 170837 - DNA, 429 bp, Enterobacter cloacae
atgaagatggataacccacatattgttccgctgtcaaagcaagcgctggcgatgttcgaagagttaaaatttctggccggagattctccatacatcttccccagccgaaacgactaccgtcgcccaatttccaaaacaacgcttaactgcgcggtgcgtacgctggatctgaacgtcagggattttgttattcatgacttccggcgtactgccagcacattgctacatgagcaaggttacaactccgactgggtggagaaatgcctggcgcataagatcggcggtgttcgtggtgtttacaaccgtgcgcaatacctgaatcagcgccgggagatgcttcaatcctgggcagactttgttgatgcgcagattgaggaggggcggaaggtggttatcgggaagtttgggaaggcttatgaggtcaaataa

SEQ ID NO: 170838 - DNA, 888 bp, Enterobacter cloacae
gtgctaaatcctacgcaactctcagcgctatcaaggatgttttcttcgtcagtgatttccgagatagcaaaaaaaggtcagtcacctcttttttcaaggttactgtctgaggcatctgttttcgaatttgatgacgcagataatgtaactattggtgatgcctttgatacagcattttctttgctcagacgctcaggtttgagaaacgagtatgtctatcgttctgcgttaattcgaaatgtattattaggccgtcattctttgcgtaccgccagtatgcttactgaatttagaattggttctagcaaagcagacatggttattcttaacggttgtggaactgtatacgaaataaaatcagatagagattcgcttgccagacttgagagccaaattgagaattatagaaaagcattcagtaagatctacgtcattgcaggaactgcacatatccaagatatattggaaaaaacatcagaagacgtaggggtgatgagtttggttcgatggaatagaattagtattgtacgagaagcaaaagagaatactgattatatttgcactgcaactatttttgattcactaagacttagcgaagctattgatatcctaaatgagttaaatattgacattcccgatctacccaacacattgatgcgtaatgcaataagaggtatttttaccaaactaaatccaattgatgtacagagctgcatgataaaaactttaaaaaggacgcgtaatcttgctccattaagtactttaattgcaaacttaccaagtgcattgcaaagtatagccctaatggttcagttacgtagtaaggatcgagatcgcttagttgagacgttgaataaacctcttaatgaagcatttaaatgggtttaa

SEQ ID NO: 170839 - DNA, 933 bp, Enterobacter cloacae
atgtactatccatattttagaggtaagcagtttgagttaatagcgattcgtgagacagcagagacgatggctcaggctggtttcattccaattattgaaccagttaaagaaaccctgaatggattagaaaaaacactaaaagctatctgtgaagctaaaggtaaagctattgtaatagtaaacccttcatatggtgaccattcaacaaatgggcataatatctcgcaattattgaaagatagttttcatggacatgaaaacatttttgcagggatactattaaatgaagggatggatgaagaagatataatagagttgcttgatgaacatgccgaacatcaaccttgtttcatccactctggattttctgagccacgctctttatcagaaaaaacaaatggtcgagtatccaaacatatcttcttagaactttactgcggtaaactctataggaaacattttaacggctgcgaaagaatattaattcgcgatggttttaaaaagagaaaaaatgctgattatcctcctattgaagagttttcagaccttcatataaccttcggggaagaaggaatggatggatttggcgattttttaatcgttggggatgactatactgaaggtggtggtccggcatatgcggtagcaatacatctcacgttcttagaatctaaaaaagaaaatgttatgtatatttatcactttgtttcaacaacaagagatacaccaacagaccctgcggggaaattcggtcaggcccttgaaaaactcattacaacaataaatgagaataattctcctgtattggagacctcagctattttagaatttcgagcgttgcatgcaaaaggccatttccctggattgggaaccgtcaaaaaactctcaatgaggcaccatgttgaaacattagctaattattttaggggctag

SEQ ID NO: 170840 - DNA, 1029 bp, Enterobacter cloacae
atgattagaatgtgttgtgctgaatgtttcaatgatatcggattgcgaaataatataatccctacattgatgccacaaaaaggaaactgttctttttgtaatagtcaagatgttgatattattgaccctaaactcttgttggattattttgaactgctgataaatatctatgaaataaatcctgaagggaaaaatcttgttgaatggctaaaagaagattggtgcttattttcccatccaacaatggacaatgctcatgctaaagagttattgggagaaattctcgatgacggagatatagtacgaaagaacttctctccctccgaaaattataaaagcataggccttgcgcaatgggatacattacgagatgaaattcttcacaaaaacagatacttccttgatgaaaaaattgacactcaaagattacaggaattactcaaccatttaaaagcatttaatatcccgcgaatatggtttagagctaggataaatcaaactgatactccatataaaattgaagatatgggagcacctccaagtcggtatgctagtcatggacgagcgaacccaacaggcattccatatttatatttaggatcaatgccagatacagcgatctctgagattagaccacatacaggtgaaatagcaacagtagctgagtttgaaataccagaagaactaattattgttgatttaagagagccgagaaaacatgtttctccttttgttctatctgatgcgcaagaaataggaaaaatgcgggcagatataccttttctagaaaaattaggagaggaattaactcgtcctgtgttacctcgaagtgctgctattgattatatccccagtcaatatttatgcgaattcattaagaaaattggttttcatggtgtaatttacaggagttctgtaagtgagggaataaacttagctttattcgatccaacattagcaactcctatttcaacatcacaatatgacgtttctcgcgtaagtgttgaagtacaagcaaagcagttataa

SEQ ID NO: 170841 - DNA, 807 bp, Enterobacter cloacae
gtgaaagtgggtgactacggttcctttgactacggccgtaactatggcgttctgtacgacgtggaaggctggaccgatatgctgccagagttcggcggcgactcttacacctatgccgataactttatgaccggtcgtgccaatggcgtagcaacctaccgcaacaccgatttctatggcctggtgccgggtctgaactttgctctgcagtatcagggtaataacgaagatgccagcaataaccaggaagggaccaataatggtcgcgacacgcgtcatgagaacggtgacggcttcggtatttctaccacctatgatttcggtatgggaatttcagcgggggcggcctatacctcttccgaccgtaccaacgatcaggtgagaaataccaccgcgggcggggataaagcggatgcctggaccgcgggtctgaaatatgacgccaacaatatctatctggcggccatgtattctgaaacccgcaatatgaccccttacggcgacaatgaaagcgccgtggcgaataaaacccagaacgtcgaagttaccgcacaataccagttcgattttggtctgcgtccggcaatttcctacctgcagtcgaaaggtaaagacctgggcaacggtcagggcgatcaggacctggttaaatatgccgacgtaggcgcaacctattacttcaacaaaaacatgtccacctatgtggattataaaatcaacctgctggatgaagatgacagcttctacaaaaacaacggtatcggtaccgatgatgtcgttgcattaggcctggtttaccagttctga

SEQ ID NO: 170842 - DNA, 1890 bp, Enterobacter cloacae
atgatttcaatagataatattataagccttgcgaagccatgggctttaaaaataatagaggaaaaattcattccttttgtttataataagggatattctttttatctaaaagagcgggatttagtaaagattaaactcttaatgtcagaatatctggcaaaaattaaagggcaatgttcaacaattaattctttagcatttcccaatattttaaaaaaaattaatgatatttatgaaccacttacattatgttctttagatgcgggggagacccttaatgagaggattgttgatgggagtttattacttgaaaaatataaacatgctttaattatcgacaatgcaggaatggggaaatcaactcttttaaaaaaaatagttattgatacgattgaatattcagaatatatccccgtttatattgaacttagatctttagacgataaacctattgatgagcatattaaaattatgttcggaatagaaaatatggattctaatgatttattgaaaagcttcccatttgcattcttttttgatggtgttgatgaaatccagtatgataaaaagaatgcaatcatcaaaagattgaaaaagttttccgaggattttattggctctaatataataataacgtcgagacccgatcaaagccttcttgagttaaatacttattccagatttaaaataaaacctctggaattgagtcaatcttacaatcttttgaagttatatgatgcaaattcttatagtattgggaataatttagccctttcaaaaaaattaatttcagagattgaactaatgcgcaataaagatagcattagtattttagaatttttaaccacaccgctttatgtgtctttattattttgttcttataagttcaaaccggtaataccacggcgaaaagatcttttttatagccaagtatttgaagctctttttgaaacgcatgatttaagcaaagaaacaggttatgttagaaaaaaacaatctggtttggatattactgagttttacatattgctcagaagattagccttctggtgtttaaaaaataatggaaggcttgagtttactcgtagtgaatttgaaatggtgatgttggaaatatcatcaaatctaaaagggattacattcaaaccgtcttcatttattaatgatttgatttatgctgtgcctatttttgtaaaagaaggagctttgtttagatgggctcataaatctcttatggagtatttctgcgcagagtttatttgcatagaggttaaagaaaaaagagaggatttattacttaagctatatgaaagtaatagtgcagtgaagtataaaaatatattggagctttgttctgatatagattattctacttttagaagatcagtgttgcggaaatgcttggaggattatctttcctattatagagatttttttgaaaacgcaaatattaatgacattgataaagaaatatggagtagtgttacatatttttctgacgtggaagtgatgattacgtcatatggtaacacaagtttaagtgatttttctttaatttgcgaagataaagcattagtaagtaatttcgaaaataagtttattggttttagagattatataacacacataacatatccaatatcattaaaaaataccgttatggaaatattgaggtggagacacaatgagtatttttataaagaaaaagatttttataaaagatcagatgtcgaaactatttcaatccctgaaaatgttccagttttttgtaggaatggaaaggtagttaattatgacgatgatgttattccggaattaattagtatatttctccagttcaggcatacgctaaggaaggtgcgaataagcggggaaattcttctcggctga

SEQ ID NO: 170843 - DNA, 189 bp, Enterobacter cloacae
atggaagatgcgattaacgtcccgattacctattacgattctaacggctgtctaattgttggtcacaatctggttgggaaaatccaccctcaattatttgataagttggttcgccgttcaaacgatggttcaacccgttcacagcaagcacgaatcaccagctacttagaaggactcttaaatggctaa

SEQ ID NO: 170844 - DNA, 138 bp, Enterobacter cloacae
atgagagattatattttctttgattttttgttcagcaattatcttgaatatgtaacatatgcacttcttttatccatcagtcttttcttcctatcaaactggaaagtaaagaatattatggatccttttcattattaa

SEQ ID NO: 170845 - DNA, 1248 bp, Enterobacter cloacae
atgaaaaagttattgggcataactgctatgtccggtgtaatgacattagttaagattgggatcgggtttataatagcaaaactaattgcgctatataccggaccaacaggtatggcattattaggacaattgcagagtttagttacaggtgttaatggaatagccaacgcccctacaggcacaggtatagtaaaatacactgcggaaaattacgatagttatgagaaatgctcgccctggtggcgagcatcaatttattacacatttattattacgctgtgttttactccgtttcttttatttttttcatcaaatatagctgaatggattttccatgatattcaatatcgatggatcgttgttattactatattgacgttaccaataacttcatttggtactgctattacatcagtgttaaatgggttacagaattataagttttatattctgacggggatgctttcagcggtgctctcaggaggccttatctccattatgatagtatgctgggggataaacggcgctttggttgcagcttcattacagtacgtatttataggtctgattgcctttataattaattgcagacaagcatggatgaagttttcttattggttcggacgaactgaccgcaaagcaaacaagaatattttagaatttgtactaatgaccgctgttagcgcagtgattattccttttgctttgatttttattagaaactctcttgtttcacatactggatgggattctgcaggacaatggcaagcagtatggaaaatttcagaagtctacttaggtgttctaacgatggcgctttcagtttactatttgccaaggctagcttctataaatagtccggatgaaataaaaaaagaaataaattcggttgttttatttgtattacctttaattatacttgctgcattgtttatctactttcttcgtgattatgtgattattatattattcactcgggattttttacctgcgagagatttattcgctatacaattaattggtgatgttataaaagtcattagttggttatatgcatatccgatgttagcgaaaaaagcaaccaaatacttcataagtacagaaattatatttggatttacttgggtactcttaagtcttttctttatagagaaatttggcgtttcaggcgcaaatattgcttatgttataaattacataatgtacttaatcgttgtattctttaatcttaaacgagttatttcgtag

SEQ ID NO: 170846 - DNA, 210 bp, Enterobacter cloacae
ttgagatcactcagccagtcagctgagctcgtggcccgcgcggtcgatggtaagctgtttgtggaagatagcgtgaactgggatcagctcaccagcaatttgccgcaaaccgcggaagtgtcagagaatgcgaatgcggttgtcattcagtaccagaacaaaccgtacgttcgcctgaacggcggagactgggtaccttatccgcagtaa

SEQ ID NO: 170847 - DNA, 261 bp, Enterobacter cloacae; identical to SEQ ID NO: 12476

SEQ ID NO: 170848 - DNA, 480 bp, Enterobacter cloacae; identical to SEQ ID NO: 91132

SEQ ID NO: 170849 - DNA, 462 bp, Enterobacter cloacae; identical to SEQ ID NO: 5776

SEQ ID NO: 170850 - DNA, 321 bp, Enterobacter cloacae; identical to SEQ ID NO: 28314

SEQ ID NO: 170851 - DNA, 591 bp, Enterobacter cloacae; identical to SEQ ID NO: 5774

SEQ ID NO: 170852 - DNA, 1446 bp, Enterobacter cloacae
atggatcaggatcttcaaaatgcgctggcattttatcagcctgcgccggatggctggttttcgggcttatcccggaaaatggaagcagcaggggtatgggtatgggaaactattcagggtgactttaacgataatcagactaccggacaggtggtgacggggacacttatatcaatgatccctttagtggatcagatttgtgatgtgagggatctcatcgctaatagtaaaaatattaaagaaaacagtaatgatacatgggcatgggtggctctggcgttaacactggtaggaatttttcctgtgctgggttctttggcaaaaggtggtttaaagctggttctcagaaagataggttcgaaatttctggctggaagtaatttacaaaatattatctccatggggatcaatgatggtctgacgcaactcaataaataccttgatatcccggcagtgcaacagtcattgcatttcctgaagatcagcaatgcctatgaattcctcgaaaaggaactgcgcaaagctatggagatagtaaatgccaatcagttaagcgcacaacttgataaattaatttctgctacagaagatctgttggataccgcgaaaagctggggaccagaatcaatacggcagccgatcaataataatcttcgtgaactgaccgaactcaagaagatggcgaatgtcgggttggcaaaaactttgggaccgctgaatgaagcactggaacagcttgctaatcgattacacgtcgaaggagataatgcctaccgggcctatgtcggagagaacagacatattcttgatgaaaagggaatgaatcgggcatcggaagagcttgagttattaaaaaaagaaaaacctgactgggtagataaagacgttgaaggtaaatattcagcattaggggaattaaaagcgtcttatcaaaaagatattaaaaagggctggccggatattagtgacgattcagataaaggggtgctgaaaagcaaatacaacacttttgatgattctatgcacgccgtggagttaccttctggaacaagattgtaccgtatagtggactccagttcgactgataacagtatctgctggatgcgggaagaggagtttttaaaactgaaatcgaaaagtgactggcggcgtaactttgctgtatggaaaagctggaacgagaacggagaatatgtggtatacaccgtccccaaaggtgagccattaaaggtttgggaagggcgtgcagctactcaagtcaaagaggaagcgaaagagtattcgctggaaggtggggctgtgcaaattgtggtggatcctgcagaactaaaaaaagaatttaccaacccgcgtatggctacgggatggggagagcaggatgtctccagtgacccgctatcaccgtttactggactcccttcactgacaaataaatggtatgaatag

SEQ ID NO: 170853 - DNA, 1065 bp, Enterobacter cloacae
atggcgatacttcacccactggaatattacttgctggaacagttcagctccccggcacactttgccgccacccgcgatgctattatagcatttattgatgcccatgaagcagcctgtgagcgcttgcagaaagatttacctgttcgtatacgtagcgagccattctggaaacagggagaagtggtatggagtagccgcgtactaccaaacatacgtggtggaagaaagcgttatattcaggcgtatattctgcggacgcataatgatccggaagccttctataaagttggccataccatgagtaattactctaaagggatcagtgaattctggaatggctggatgacagaggaggagaaaaaacggatttggaatgcagatgttctggctactgaactggataaaaaactgacgctgacggtcgatggttggtggcaggaaggtaaactcacttatctcggtcctaatagccattatagtttagatagtctgccaaaacgtattccccgttatgaactggataaaaatgtccgagtggagaaaggtgaaaaaccggttgaaattgggatctacctgcctgatgtggaatttgccccggcgcagttactttatccgaataaacatacaacgagatctccagtctcccgacagggagtcaaacgtagtgaatgggtggatgaagataccggaaagcgtgattatagctgggacgagacttgctgggcagaaactggctggacgttaatccgtcgggtggaaggtgaatatctggacgtgccgctggaaggttttttccccaacggcacaccggaagaactctataattggccggagcgggaaaaggattatatcacccgcgaggaggaatatatcagcgcctggtcgggagagttgagtccacattccggtgactggtcggtgtttaccggtagcgagatgaaatacgtttctgtcggacaggggcaggcgttgccttatctgaccggtgccaatgattcgccgcagcgcgtctgctggacgctgataaaacgtgacgataatggttctgtgtttaggacgaaataa

SEQ ID NO: 170854 - DNA, 1059 bp, Enterobacter cloacae
atggcaatacttcatcctctggaatgttacttactggaacgatttagttctccggaacactttgcggccacccgcgatgcaattattgcatttattgatgctcacgaagcggcataccggcgctatcagcaggacctgccggcacggatccgcaaagaaccgctgtggaaacagggagatgtggtgtggggaagccgggtgttgcctaatataagaccatctcgtgaacaatatattaatgcatatatattacggacacataacaatccagaggctttcagaattgggcacgccatgaatgatttcaatcggaacatttgtgaattctggaatggttggatgaccgataaagaacaaaaccaaattgccagggcagaaggtgatgcatactggctggataaagtgttgacaatgactgttagcgggaagtggagtgagggagatttaacatattttcagggtgatttatatcagcttgctgaacttccaaagcgtataccgcgctatgagctggatttgagcgttcgggttgagaaaggcgaacgtcctgttattaccgggatttatttgccggatgtcgaacaggcacccgcccagttgctttatcccggggtaaaatacggtaacccacccacctgtcggcagggagtaaaacgcagtgaatgggtggatgaaaaaacaggaaagcgtgattataactgggatgaaacccgctgggcagaaactggctggacgttaatccgtcggatggaaggtgaatatctggacgtgccgctggaaggttttttccccaacggcacaccggaagaactctataattggccggagcgggaaaaggattatatcacccgcgaggaggaatatatcagcgcctggtcgggagagttgagtccacattccggtgactggtcggtgtttaccggtagcgagatgaaatacgtttctgtcggacaggggcaggcgctgccttatctgaccggtgccaacgattcgccgcagcgagtctgctggacgctgttaaaacgtgacgataatggttctgtgtttaggacgaaataa

SEQ ID NO: 170855 - DNA, 243 bp, Enterobacter cloacae
atggcgtggatctgtgaagtgagcagccgtagtgctgccgatattgctgtttgcgtggtcggttcaagatcagtagccgatctgttggtttgtagagttgagtctcgcagtgtgtctcaaggtattgatgggctatggtgtgaggtaacgtctcgaagtgttgcttcatcgaaagtaaagtttgtcacttcatgctatccgttctcttacatgcagcatcaagagacaactaattatctttga

SEQ ID NO: 170856 - DNA, 249 bp, Enterobacter cloacae; identical to SEQ ID NO: 91085

SEQ ID NO: 170857 - DNA, 438 bp, Enterobacter cloacae; identical to SEQ ID NO: 5754

SEQ ID NO: 170858 - DNA, 993 bp, Enterobacter cloacae; identical to SEQ ID NO: 5753

SEQ ID NO: 170859 - DNA, 234 bp, Enterobacter cloacae; identical to SEQ ID NO: 5931

SEQ ID NO: 170860 - DNA, 393 bp, Enterobacter cloacae; identical to SEQ ID NO: 5932

SEQ ID NO: 170861 - DNA, 972 bp, Enterobacter cloacae; identical to SEQ ID NO: 5933

SEQ ID NO: 170862 - DNA, 645 bp, Enterobacter cloacae; identical to SEQ ID NO: 5934

SEQ ID NO: 170863 - DNA, 276 bp, Enterobacter cloacae; identical to SEQ ID NO: 5935

SEQ ID NO: 170864 - DNA, 168 bp, Enterobacter cloacae; identical to SEQ ID NO: 5936

SEQ ID NO: 170865 - DNA, 642 bp, Enterobacter cloacae; identical to SEQ ID NO: 5937

SEQ ID NO: 170866 - DNA, 321 bp, Enterobacter cloacae; identical to SEQ ID NO: 5938

SEQ ID NO: 170867 - DNA, 1170 bp, Enterobacter cloacae; identical to SEQ ID NO: 91067

SEQ ID NO: 170868 - DNA, 1971 bp, Enterobacter cloacae; identical to SEQ ID NO: 9266

SEQ ID NO: 170869 - DNA, 792 bp, Enterobacter cloacae; identical to SEQ ID NO: 9265

SEQ ID NO: 170870 - DNA, 1023 bp, Enterobacter cloacae
atggtcacttttgagacagttatggaaattaaaatcctgcacaagcagggaatgagtagccgggcgattgccagagaactggggatctcccgcaataccgttaaacgttatttgcaggcaaaatctgagccgccaaaatatacgccgcgacctgctgttgcttcactcctggatgaataccgggattatattcgtcaacgcatcgccgatgctcatccttacaaaatcccggcaacggtaatcgctcgcgagatcagagaccagggatatcgtggcggaatgaccattctcagggcattcattcgttctctctcggttcctcaggagcaggagcctgccgttcggttcgaaactgaacccggacgacagatgcaggttgactggggcactatgcgtaatggccgctcaccgcttcacgtgttcgttgctgttctcggatacagccgaatgttgtacatcgaattcactgacaatatgcgttatgacacgctggaaacctgccatcgtaatgcgttccgcttctttggtggtgtgccgcgcgaagtgttgtatgacaatatgaaaactgtggttctgcaacgtgacgcatatcagaccggtcagcaccggttccatccttcgctgtggcagttcggcaaggagatgggcttctctccccgactgtgtcgccccttcagggcacagactaaaggtaaggtggaacggatggtgcagtacacccgtaacagtttttacatcccactaatgactcgcctgcgcccgatggggatcactgtcgatgttgaaacagccaaccgccacggtctgcgctggctgcacgatgtcgctaaccaacgaaagcatgaaacaatccaggcacgtccctgcgatcgctggctcgaagagcagcagtccatgctggcactgcctccggagaaaaaagagtatgacgtgcatcttgatgaaaatctggtgaacttcgacaaacaccccctgcatcatccactctccatctacgactcattctgcagaggagtggcgtga

SEQ ID NO: 170871 - DNA, 1404 bp, Enterobacter cloacae
gtgaccatctcattaaatatttataacccggccaccggggaggttatcgcctctacggcagatgccagcgtcgatgatgtcgaccgcgcggtgatgtccggctggcgagcctttgtcgcccgcacctgggccgggaaattaccggcagagcgcgagcgcatcctgctgcgctttgccgacctggtggagcagcacagcgaggagctggcccagcttgaaacgctggagcagggtaaatccatcaatatttcccgtctctttgaagtgggttgcaccctgaactggatgcgctataccgccgggctgaccaccaaaataaccggcaaaaccctcgatctctccattcccttgccgcaaggtgcacgctatcagtcgtggacgcgtaaagagccggtgggcgtggtggccgggattgtgccgtggaacttcccgctaatgatcggcatgtggaaggtgatgcctgcgctggcagcgggttgctctatcgtcattaagccgtcagaaaccacgccgttgaccatgctgcgggtggcggaactggcgagcgaagccggtatccctgacggtgtgtttaacgtggtgaccggaagcggcgcggtgtgcggtgcagcgctgacctcgcatccgcatattgccaaagtgagcttcaccggctccacggcgacggggaaacagattgcccgcgcggcggcggacacgctgaccggcgtgacgctggagctgggcggcaaaaacccggccatcgtgctgaaagacgccgatccggcgtgggtgattgaggggctgatgaccggcagcttccttaatcagggccaggtctgcgccgcgagctcgcgtatctatatagaagcgccgctttttgacacgctggtcagcgggtttgagcaggcggtgaaatccctgagcgtggggccgggcatgtcgccggaggcgtttatcaacccgctggtgtcccgcgctcactgcgacaaggtgcagaccttcctggatgaagcaaaatcgcgcaatgcagagctgatcaccggtaaccgtgggccggacggaaaagggtattacatctcgccgacgctggtggtcaacccggatccgggactccggctgacccgcgaagaggtgttcggcccggtggtcaacctggtacgcgtagccgatggcgaagaggcgctaacccttgccaacgataccgaatatggcctgaccgccagcgtctggacgcagaatatcagtaaggcgctggagtataccgacagattgcaggcgggtaccgtctgggtgaacagccatacgctgattgacgccaacctgccgttcggcggcatgaagcagtccggcaccggacgcgacttcggcccggactggctggacggctggtgtgaaaccaaatcggtgtgtgtgcgctattaa

SEQ ID NO: 170872 - DNA, 243 bp, Enterobacter cloacae
atgacacagggctggcgggaggataaatgcccgtctgtccgcgccgggaaaaaaccgcgcgtcggtggcgctgaaaggggccgcgctcacgcgccgcccctttcattacgcggacgttctgatgggggcttctgtcttttcagacctgtcatttgtctgttactgatgatgttgttgttcctgctactgctactgctactgctactgctactgctactgttcttcttttttctactgctctga

SEQ ID NO: 170873 - DNA, 234 bp, Enterobacter cloacae; identical to SEQ ID NO: 10186

SEQ ID NO: 170874 - DNA, 225 bp, Enterobacter cloacae
atgatatctcacagcacggtaggcatcagatccacacagcagaacccagccacgcaggtattgagtcagaccacccatcagtgcttttgtggcactgacctgatcgtcaatatcgcgcatcggatcatcaccaacatcctgatgaaggtcagcggttcgctggttcagtccaaactctacagtccagtcgatctcactctgctgtgtaccaaatgcatcaactga

SEQ ID NO: 170875 - DNA, 975 bp, Enterobacter cloacae
atggaaaaagttaatcaatctcacgtgatgccccagttttcgacgcgggctctcacgttccttattaataattccacgctggtggtgtttattttaatgttggtgatcgccgggatcctgtcagataaattctacagcggcgacaacatcactaacgtactgcgtcagagcgtaccgttaggtctggcggcgctggggatgttgtttgtgatcctgaccggcggtattgatttatccgttggctcggttatggcatttatttccgtggccgtggcgatttttatcccggaaatcggcctgtggcctgcagtatttgccagtctgtccgtggcggcaattatcggcgctggtgccggggtgctggtgacactctttaatattgcgccgtttatcgccacgctggcgatgatgacgatagctcgggggctggcgctgattatctcgcaggggcagccgatatttattgatgatgtcacgctggttgattttggcattgggtattttctgggattaccgatgccggtctacgtgctgctctttttcgcactgttagcgcaattcatttataaatacacggtgtttggccgcttaacaatatcgattggttctaacgaaacggcgacccgtttcgccgggatcaaggtaggctggtacaaattcgccgtttacgcgctgagtgggttcgcttgcggcctggcggggctgttggcctccacgcgtaccggagtgggatcgccggtattgtccattggctttgaactggatgtgattgcggctgttgtcgtggggggggccagcctggcaggtgggcgcggtaatgttgttaacaccattgtcggtgtgatgattctcagtattatttccaacttaatgaatctaatgaatatctccggttacaaccagcaggttgttaaaggcttgattattattgcggcggtaatgctggaaagtttgaaatcgcgtcagcgtaattaa

SEQ ID NO: 170876 - DNA, 1500 bp, Enterobacter cloacae
atggaagaatatgcaatcgtcatcgacagggtgaaaaaaagctttggcgggattcatgcacttaagaatatcggcctgaaaattaaacggggcgatatccatgcgatcgtcggcgaaaacggagccggtaaatcgacgttaatgaaaattttatcggggatttacaccagggatggcgggacgctgcaaattaacggcgaagaggttcacttcacttcaccagcgcagagccgggacaggcatattggcattatatatcaggagctggcactggcaccggacctgacagttgcggaaaatatttttctcgacgatctgggaatgggtaatcgggtaattaactggagctcgctgaataaaaaagcggctagggtgttaagcaacctgggctttgccattaaacccgaagacagagtcggcgatttgagcgtggcgtatcagcagatggtggaaatcgccaaatcgctggcacgtgacgtaaaaatactgatccttgatgaaccaaccgcggtgttatccgaacgggaaattgagatcctctttagtcagttgaaattgttaaaaggccagggggtgacgatcctgtacatctcccatcgtctggaagagatttttatgattgctgacgcgattagcgtcattaaagacggagagtctgttggcgatctcgacccgaaaacctgtagcgaagacgatattatttccgctatggtggggcgtaagtttgaaaacctgtatccaccaaaaaatatcccccaacaggaggaagttctgaatgtgtcgaatttgtcgacccgttcactgcttaacgatatcaatttacacgtgcgtaaaggtgagattgtcggtctggcgggactggtgggtgcagggcgcaccgaaatcgcccgctgtctgtttggcattgaccgaatgtccggcggcacaataaccaaaaacgggcagcttattgttatccatcatccggcggatgcaatgcggcatggcattggtctggtgccggaaagccgcaaagagcagggggcgattctcagccagagcattcgcgaaaacatctctctgtcccacctgaaaagtgtgtgttaccggttaggcattcttaaccaccagcaggacaaacgacttgccgaggagtaccgcactaagctcaaaataaaattgggttcggttgagcatcctgtttcaagtctcagcggcggtaatcagcaaaaggttgtgatcgcaaaatggctcaacacaggctgcgatgtgctgatccttgatgagccgactcgcggcgtcgatgtgggagcaaaagttgagatttacaatgttattcatgagcttgccgaaagaggatatgccattattttgatctcttcggaaatggtggaggtcatccatttatcgcatcgcgtctatgtgatgagcgagggcagcattactcgcgagctaactggggatgagatctctgaagaaaacattatgaaacatgccattccaaaacgggcactggtttga

SEQ ID NO: 170877 - DNA, 960 bp, Enterobacter cloacae
atgaaaaagttggttttgggtatagcgcttgccgttgcggccatttccgtgaccgcacacgctgatgacaaaattaaggtcggctttgctaaccgtactcttaatggcgctttctttaatggattaacggaatacatgaaaatccatgctaaagagcatggctatgaactgatcaccaccgatgcgcgtggcgatctgaataaacaaatctccgacgttgaagatatgttgtctcagggcattaactacctaattctcaacccacaggatcccgaagccgggatgcgtattactaagatcgccaaaagcaaaaatgtaccggtcgtcgtgctcgacagcgatatttcgctggacgcaccagtcatcacacgcgtacaagccaataacatgaaaaacaacattctgattggcgaatatgcggtgaacaaatttggcgataagccaatgaactgcatcattattagcggcaatcagggcaacctggtgggtgaagcgcgccgtaccaactttatgcgtggggttatggaagcgcaactgcggaagtataaccatacacaacttaccatcgtcagccagggctggggtaactgggaccagcagggcggcctgaaagcgatggaagatttaatcgtcgcacagggggacaagatcaactgcgtttatagcgagatggatgatatggcgcttggcgcggtgctctcactgaaagcagcaaacaaactgggtagcgtcagcgtattctctcacgatggctataaaaaaggtctggaagccgttcaacgtggtgatatccaggcaaccgcttcaaataacccggatcagctgaccagcactgtcctggacgttattgctaaatataatgccgggcaaaaagacttcccggactacgtctatatcccgtcaatcttgatcacgaaagataatgtgagcaagtactataacaaggacgccattttctaa

SEQ ID NO: 170878 - DNA, 1473 bp, Enterobacter cloacae
atgtatctgggtattgatgttggaacatcagaaatcaaaacgctactactggatgacagcaacaaaattgtcgccatggcaggcgtgccgctcacggttcagaggcctcggcctcatttttcagagcaggatcccgaaagctggtggcgggcgttgaaccaggcaatgggcctgttacgtactcaggctggaaaacgctggcaggagttgcgggcaattggtctgtccgggcaaatgcacggcgcagtgttgctcggcaagcatggtaatgtactgcgcccctgcattttatggaatgacacccgcagcgcttcgcagtgcgaactgttgacgcagcgtgcgccggaactgcatcaggtggcaggcaatctggcaatgccgggctttaccgcgccgaaactgctgtgggtggcggagcatgagccggacgtatttgcccagattacccatgttctcttgccaaaagattatctgcgctggcgtatgaccggggaattcatcagcgatatgtcggactctgcgggcactctttggcttgatgtggcgcgtcgggactggtcggatagtctgctggctgcctgcggactgaaccggggcatgatgccacgtctggttgagggttcagaacctggcgggcagttaaaagatactgttgccagcgaatggggtatgccgtcaaatatcatgctcgcgggcggcggtggtgataacgctgccagtgcggtcggcattggcgcagtgaaaacgggagatgcctttatttcactgggaacctccggggtactgtttgtggttaacgatcgcttccgtccgaatccgcaatcggcggttcacgcgttttgtcatgcactgccgcagcgctggcatcagatgagcgtaatgctgactgcagccagtgcgctgcgctggttgtgtaacctgctgaactgcgatgaggtcacgctgatggcggaagttgcgcagttgggtgccgcaaagcgtcataccgcgccgctgtttttgccttacctctccggtgagcgcacgccacacaacgatccttatgcatatggagcgttcagtcatttgacacatgatgtggaccgcgcccgcttaggctatggagttattgaaggggttaccttcggtctgatggatggtctgcaggtactgtatgaggctggcgctgaactgacagaatgttctttggtgggcgggggggcacgcagtgccatctgggcacagttgattgccgatgtgctgaatattccgattatcacccatgaaggcggcgaagctggcggtgcgcttggcgcggcacgcctggcctggctggtgacagggggcgatgagcaactggtttgcgccaaaccgaaggagcggcagcgttatctccctgatagctcgcagcaggcgtttctgcagcagcgtttgcaggaattccgtctgcaataccggcaacaggtagaggcccggggaatgctgcgttcttaa

SEQ ID NO: 170879 - DNA, 1398 bp, Enterobacter cloacae
atgaatagtgaaaaatcggtgtggatgcatattggcgcaggttcgtttcatcgtgctcatcaggcgtggtatctgcacaaactgatgcaacagggtgatgatagctggattattgcgctggggaatattcgtggggatctgacttcttttctgacagcacttgctgcacagaacggggaatacgtgctggagaccgtctcgccggaaggcgaacgtaactacgaaaccatcacatctattcataaagtgttaccgtgggatgaggatatcagcgcactggtggcgcagggcacggacaaacagacccgggtgattgcgtttaccgtcacggagagtggctactatctgactcctgaacatgaacttgacagccagcaagcggatatcaaaaccgacattaacggcggtatttgcactctgtacggcgccctaacccgtattctgaaagagcgtatggaggtccatggtgaaccggtcacgctactgagctgcgacaacctgcggcataacggcgaacgtttccgccacggatttctctccttcctcaaaaccaaaggtgaaattgcactacacgactgggtgaagaacaacactacatcgccaaatactatggtagaccgtattacgccgcgtccgacgccggatgttgccgagcgggtgctggcagcaaccggtaagaaagacgctgtaccagtgatgggggaatccttcattcagtgggtcattgaagatgactttatcaatggccgtccgtcactggagaaagtgggcgttgaactggtggaatccgtacttccatgggaagaggcgaaaattcgtatactcaatgcgactcacagctgcatcgcctgggccggtacgctgacaggcctgagttatatcgacgaaagtacccgccagaaagcgatccgccagatggcctgggaatatatcactcaggacgttattccatgcctcaccccaagtccgctggatctggaactgtatcgcgatatggtactggcgcgttttggcaatccctatatcaaagatactaaccagcgcgtggcggcagacggcttttctaaaattcccgggatggtcacgccgacgcttatcagctgctaccagcgcggcgcaactccagatgcgacggcagtgttaccagcactgttcttcctcttcttaaaacgttgggccgaaggcaccctgccgtattcctatgaggatggcgtaatgcgtccggaagcggtacgcgaggtgttcgccagtgaagatccgctggcgacctgggtggcggatgaaacactgtttgcagaattggcgaacaaacctgaatttctgtcgctattgcgtcgcaaggtcagttcactggagcagtgggtaaaacagccgcaggcacagctgacaataatctga

SEQ ID NO: 170880 - DNA, 948 bp, Enterobacter cloacae
atgaacagagaagaaaaaaaacaggagcttgccgcccgggctgcgtggatgtattacgttgccgggatgacgcagcaggaaatcgccagggcattaggaatgtcgcgccagatggcgcagcgtttggtttcgggcgctcgcgaaacgggcatggtgtcggtcggcatcacccatccggttacacactgtatgaaactggcacgccagctacaggataaatttagtctgtctttgtgccgcatcgtgccttccgttggattagaaaacgacgcgattcagcagatgctggcagtggagggctcggaggtgatggcgcagtttattggcgatgagaagccgcgagtctttggcgttggctccggtaaaacgctgcgcgccgttattgatgctctgcctcattacgatcgcccgcaacatcaatgtgtatcactgattggcgcgattgcccgcgacgattcaggtacccgttacgacgtaccactcaaaatggcggaaaaaatgcgggggaaatatttcttcatcccggcaccactatacgcagaaaatctggaagacaagacaatgtggtgccagcatccggtttaccagcgcgtcgccatccgggcgctcaatgctgatatcacttttatcgggattggtgaagtcgagttaggtggtccgttaaatgccgaagggtttattactgacgcccaggtacaagcattaaaaagccagcatgtggcaggtgaaatgttaggtcattttatcaatcattatggtgagcgtctcgcatcagaactggatgcgctgcttaccagcgtcccgctaacaagtcacaccgggcgccagattattgctttctccggcggagccaggaaatatcaggctatacgtgctgcactgatcggccagtggatcaccggactagtcaccgatgaagacacggcgctgaaactactgaaagagtaa

SEQ ID NO: 170881 - DNA, 306 bp, Enterobacter cloacae
gtgaaattagcaaatcagcaaatacgtgctgaattattttatgaagtctgtgacagccttacaagctttgcctcttacatgcgaaaactggttaaattcagaccttacgatcttggttttgatccctattttttcatttatggtcaggccattgatatcgtcagaaatgaaggtctggtgagtacacttaaaaaactcaacatttttaagatgaatattggccttgaatcaggatctgaccatacgttaaaaatgatgaaaggcaagagtgacctgcccccagagttagatacaaccttcagttag

SEQ ID NO: 170882 - DNA, 261 bp, Enterobacter cloacae; identical to SEQ ID NO: 17248

SEQ ID NO: 170883 - DNA, 510 bp, Enterobacter cloacae; identical to SEQ ID NO: 5976

SEQ ID NO: 170884 - DNA, 348 bp, Enterobacter cloacae; identical to SEQ ID NO: 5977

SEQ ID NO: 170885 - DNA, 336 bp, Enterobacter cloacae; identical to SEQ ID NO: 17229

SEQ ID NO: 170886 - DNA, 567 bp, Enterobacter cloacae
gtgaacggtcatgctcacctgctctacgcgctcaatatcgccgtgagaaccgcgccggacagctcggttaaggcgctgaaatacgccgctgcgattgaacgttcgctgtgtgagaaactttgtgctgatgtgaactacagcggactgatttgtaaaaatccgttccacctggaatggcaggtgatggagtggcgagaggaagcctataccctcgatgaactggctgattatctcgatttgagcgcctcagcgcgccgtagcatcgataaacattacgggatggggcgaaactgccacctgttcgaaatgacgcgcaaatgggcttacagggcgattcgtcagggctggcccgaattctcacagtggcttgatgccgtgattcagcgtgtcgaaatgtacaacgcatcgcttcccgttccgctttcaccgcctgaatgtcgggctattggcaagagcattgcgaaatacacgcacaggaacttcacgccggaaactttcgcacagtatgtggctgatacgcacacattaacgtacgttttcgttccattggccctcaccccccgataa

SEQ ID NO: 170887 - DNA, 876 bp, Enterobacter cloacae; identical to SEQ ID NO: 5981

SEQ ID NO: 170888 - DNA, 708 bp, Enterobacter cloacae; identical to SEQ ID NO: 10371

SEQ ID NO: 170889 - DNA, 852 bp, Enterobacter cloacae; identical to SEQ ID NO: 10372

SEQ ID NO: 170890 - DNA, 606 bp, Enterobacter cloacae
atgctggctgaacgcggagtgaatgtcgatcactccacgatttaccgctgggttcagcgttatgcgcctgaaatggaaaaacggctgcgctggtactggcgtaacccttccgatctttgcccgtggcacatggatgaaacctacgtgaaggtcaatggccgctgggcgtatctgtaccgggccgtcgacagccggggccgcactgtcgatttttatctctcctcccgtcgtaacagcaaagctgcataccggtttctgggtaaaatcctcaacaacgtgaagaagtggcagatcccgcgattcatcaacacggataaagcgcccgcctatggtcgcgcgcttgctctgctcaaacgcgaaggccggtgcccgtctgacgttgaacaccgacagattaagtaccggaacaacgtgattgaatgcgatcatggcaaactgaaacggataatcggcgccacgctgggatttaaatccatgaagacggcttacgccaccatcaaaggtattgaggtgatgcgtgcactacgcaaaggccaggcctcagcattttattatggtgatcccctgggcgaaatgcgcctggtaagcagagtttttgaaatgtaa

SEQ ID NO: 170891 - DNA, 321 bp, Enterobacter cloacae
atgaaacttttaaagttgttaatagtgttatttgtattaatgtttttctcattttttgcaatgagttcaaattcaaagacaactcctcaacagatagtcagtgattttataagtgactatgagcaatggaatcaatctgctacgcaaaatttaagtgaagatacaggctttcaggcgaaagacgagtacattaaattactgaataaatattgcactcaatcttctgatagaattggttatgatttttatgggcaatattctttgcgtattgccggaggggagaaggtaatcaacatcaaaaaaacaatcagcacgttataa

SEQ ID NO: 170892 - DNA, 405 bp, Enterobacter cloacae
atgaagtgttattttgttttagcggtgttccttggttgcagttcctgcgtactggcagaagagtgtatggataatgcaaatataaattctttaagagagatatttaaggaaaacaataaaaagttgctgattgaaatgtcttcacaagaagtaaggcattatattgaaagtgatttattgatcaaaaatgaatacagtacacttgttaatgtatctgaggtttactatggctggggtgttgacaaaaaaacaaagtatcctgttaacacctcggcagtttacccaaaaaaaaagtgtgtgtatggaatatatcttttgcgctaccagagtacatgcgaaaaaaatgtgatgatgatggtgcttatggatattttattgaatttaagaaagttaatggaaaaatag

SEQ ID NO: 170893 - DNA, 483 bp, Enterobacter cloacae
atgtcagcaatcaactgggaaaaaatattagttatcacgaattttgacgagtcctgcgggctagaagaaatttggctcattctggtactttcattaccatcccggtcgacctgtgaaacaataatgctatcgtttttttgcatggcaatagctatatctttctgtgcaacagacgagtggccggtaataaaagttgcattcagcacctgcagcgcacgtcgagccttacgggtttctcgaagaatccactgttctcgctgtttgtcaaaagcatttgctttgctatcccgcaatgcccaaagaagaaaacaacaagcaaacagaatactccacaaagaaataggtaaacctaaagccaatttccaaaagtacagatttccgacaatttttttaacatgtaatttaacagaggtttatcgttttttagattatgatctggaattggagggttttcaccaccataaccctcgtttgcaacaatga

SEQ ID NO: 170894 - DNA, 618 bp, Enterobacter cloacae
atgacacagcaggaaattttagaggttattaaaaccgcaacaccaaattcagccttaaaggatttccttccaatagccactacattggtgggtatcgttgttggtttcagtttaaattatattcgcgatctgatttcaacaaggaaatcagaaaaactgaactgcaagttactcaaagaagaattagatttagctttggaagatagcattgacttagctaaaaggctatgtgaatcacttgatgaaaaagtagagaagggaactattccttgggtttatgttagcgaaatgagcaatgtatgtttcaactcgttttacccgcagattattaaatcctacacaagggaacaacgccgttgtatacatgaagcatacgctcaaatttctttcatcaatacattctcaaccaaagaaataacgaacagagacattacccaagacttacccaaagccattcacaaattaaatgacattttcattgcttgccttaaactatatcgtgctcatcaaaatttataccttcacaatgcattatgggatataagcatagaaaggtatttaagagaaactaagatccaaagtaaattttatcaaagtatagttgaccgtgagatatag

SEQ ID NO: 170895 - DNA, 240 bp, Enterobacter cloacae
gtggatacgggtgccggtcagcttgccggtgttgttgtcggtcgggatgtacaggttgtgttcctgcgccaccacttcgatgctgccttcacgatcctgaacgtccacggaacctttgatgtccgcgccgccatcgtccttcagccacagataaacaggaattgccatgttaattactccatttcattttttgagacgccatcatcctgcgatggcgcgggtgtgttgcccggcagctga

SEQ ID NO: 170896 - DNA, 210 bp, Enterobacter cloacae
atgagactctctctttatcagttccggacacgctaccgcccgtcgcttttcctggtattcaggaacccaaagcgcataaggtcgggcaggcagattgtgtttttctttgctgaacgtccgcggttacaggcgttcagcaaaacggcggacgggagaacccgtccgcacgagactcaggcggtggcgcgttcgttccaggaatcggaatga

SEQ ID NO: 170897 - DNA, 711 bp, Enterobacter cloacae
atgtctgaaggagtttctaaaaattccagatatgaaatcattgcaattctgagagatgaactcaggattcaatctaaattgtacttctattgtaatgatataaaacaccagtcaaccctaaaaaaaatagaaggaaattttttctatataaaaccatctacctctcatccaggccttcctaaagagagcattttttattttatcatccacagcccattaggaaaaatagaattcacaaccaacaatcgaatcactgacaaaagcaattcaaacaatcttctatgcttcattatccctgaatcattatcaatactacaacgaaggacatcaccaagaattaacgttgggtacgaaagccagttttattgctctggaagatacagaagtggcactatttataaatatcacttgaatgatatatctgaaggtggttgctcgtttatatccctggaacctttgcatagttttattagaaatggaaataaacttgaaaattcagtgttaaatcttggggagtacggacaaatccttgttaatttaaagataaaacatatatccgaggaaaataatcgcaaacaatgtgatgcaacaagcttcagagtatcttgcatgttttattacgaaagtgaagaaaaaaaagagaagatagaaaaaataattgtcaaattgataattgatagaaaaataataaacaggcgaagcctagtttaa

SEQ ID NO: 170898 - DNA, 585 bp, Enterobacter cloacae
ttgaaaaacacattactttatactggcgacaatatcatcgggcactcaatccatgattatatgattgataacaaaaaaaacatcaccactcttaacttccaggatattgttaaggggaccagcgcgccatcaaccactaccattattgtcaacactatccataaggatatctctgcagccacaacggtcgcattgcttaataccctgcgcaagcgtcttacgcactgcgctttactggttttaattgtaaaaagtgacctctccagactgttccgggagctgctttatattgataatatattgattttgaatgaaaaatcttctttatcagatttctcagccatcatcaacagacctttgaccgccgatggctgccagcggttatgtacccggcgtaagctaaccgctagggagcttcaggttctggagctaatcattgcctgtaacaacaataaaagaatcgcattactcctcgatattgatcacaaaacggtacacagtcataaggtacatattatgaagaaactggggatgaataactcacggataatgaataaaaggatagtcaatatgtatcggtgctaa

SEQ ID NO: 170899 - DNA, 1287 bp, Enterobacter cloacae
ttgcgacagcaggcgcagactcgtacggaacgctggcagcgctggcttgctccggtcagcgtaacctgtccggcgggagaagacccgggatatgacgatgatttccagcgcattcgcgaggaggtcaataagctttccggcatcgataccgggctaatttgcacgcttgccgaaaaactgatgaccaccacggcaaaagatatccgggttgcgacttattactgctgggcgtgcctgcaccaggatggcgaagccggcttcgccgaagggcttgaactggtggcaggattactgcagcgctacggcatgcagcttcacccccggcgggaccgcagccgcaaggccgcgctggaatggctcggcagtacccgtgtactggacagtttgtcactgtacccggaggtcgtacgcgaggatgcacagcgtaccgccggggcgctactgctcattgctgacagcctggagacagagcctgaagcatcacgggcggagctgaatgccctgtacagcgctcttgagtcccgtctgatgaaaggcgggggcgtggatgccctggtaccgcagaacgcaagcaatcagacacgtagtcagcagccatctcacacgacagaacaggacgcgccagtgctgagccgcatcacctcgggtcaggacttactggctcaggctcgcaccctgacggggtacctgcgtgagcaacccggtggctggcttgcggcgcaccggatgatgaaaagcctgcgtcatgacacgctgagtgctattccggcaccggatgctgacgggaaaacgcgcatcgagccgccgcgagctgaccagcgggcgatgctcaagcgactctatctgcaacagagctggctggaaatactggagcaggcggacaataccttctcgcgcggtgccaatcacctctggctggatttgcagtggtatacccatcaggccctgatgaagtcggggcaggatgtgctggccgacatcatcacagccgacctgaaagggctgctgcgccgtcttaccgggcttgaaactctggcctttaacgacgggacaccgttcgccgatgaggtcacgctgaactggataaaccagagcgtgctggacgatatgtccggctggcgggatgaacctgtcagcgctatcagtacgggtgataacgatattctggcgcttgaacctgaagcactggagaaagcagacagcgaaggactggatgccacactccactggctgcagacacgcccgggtaccgacaccacaaagacagatggttgctgcgtctgctga

SEQ ID NO: 170900 - DNA, 837 bp, Enterobacter cloacae
atggatgatacgtatgagaagagtggagggagcgctaattctgcaggagagacaacggcagctacagctacagcaacttcatcagcatcttcgcttgcaacttcaccggcaactgctccaccagtaacgacaaccgggcagtcgtcggatcttaagaataaaccgccctgtcagcatactgatggtgcgataaaggttgctgactatatactcaaagaaattaagacgaatgtcagaagccagactgcagacacaataagatatttaatcgacgaggatacgttaaaccaaaggcgtgacgagtggaataagctccctttctacgcaaagctggctcaatatccaaaacctgatttacctgctgcaatggctgtctggtatcagaccgtaaaaacgggttctacctgggatcacaaaccgaaaattcgcgacagattttcgtcggttgcagttgcgcgaccattacccagacaagggaaaccgttaaggtcttattaccacaagtacaaacagcatgattatttttatgatgtttggtcaaacatacattatggctatgttggccttagtgtcggcttttcagaatcattgctcttaaaaggttctacctgggaacaaaatatgacgcctggagcgattggtgacgatacggtggacgacgttacgagcatgaaaatcggttttgctctgttccatcaacacgggaaatatgcaggcagtttgactgtgattaatatacttgatgcgctcgatctaacacctgatgtgctactacctcactcaaagggaaaacactggtgctggaatacagataatccagataatattgaggaatga

SEQ ID NO: 170901 - DNA, 384 bp, Enterobacter cloacae
atgtcgttctcgccggacagcaggctcaccatgaaatcgctggaaatggcatgggaaacccgtggtaagcccggcggggtgatgttccacagcgatcagggcagtcattatacgagcaggcagttccggcagttattgtggcgataccagatcaggcagagtatgagccggcgcggaaattgctgggataacagcccaatggaacgcttcttcagaagtctgaagaacgaatggataccggtggtgggttacgtaagcttcagcgaggcagctcacgccataacggattatatcgttggatattacagcgcactaagaccgcacgaatataacggtgggttacccccaaacgaatcggaaaatcgatactggaataaactctaa

SEQ ID NO: 170902 - DNA, 384 bp, Enterobacter cloacae; identical to SEQ ID NO: 170901

SEQ ID NO: 170903 - DNA, 252 bp, Enterobacter cloacae
gtgcaactggaacgaattcgtaaaagttttgatggtaaagatgtcatttccgacctcaacctgaccatcaatgatggtgagttcctcacgctgcttggcccttctggctgcggcaagacaaccgtactgcgccttatcgccgggctggaaagcgtcgatagcggccatatccaccttgaaaagcaggacattacccaggtccccgctgaagatcgtcacgtggctttgttgaataaatcagatttcgggtaa

SEQ ID NO: 170904 - DNA, 309 bp, Enterobacter cloacae
atggtggatattctctcgcggcgtcgcaagaacaacccgattctggtcggcgagccgggcgtggggaaaaccgcgctggtcgaagggctggcgctgcgcatcgccgaagggaatgtgccggagtccctgaaaacggtgagcctgctgattaagaacacgggtatcaggaaagcgggcactggcagtatgcagggggtgatgaagtcgtttgagtcctctacgtttgatgagaaattcatcattactcaacccatttctggtaaaccactagggaaggtgcgaataagcggggaaattcttctcggctga

SEQ ID NO: 170905 - DNA, 1215 bp, Enterobacter cloacae
atggtgccgaagctacgtttcgaaggatttaataaaaactgggcagttaaaaagttagataatgttttttcatttaagaatgggcttaacgccagcaaggaaatgtatggtaaaggtgttaagtttattaatgttttggatatcattaataacgaaaaaataacttttgatgttattaatgaaagcgtggttgcaactgatgaccaaatatcttcctatcaagtaaggcaaggggatattctttttcaaagaagttcagaaaccagagatgaagttgggcaagctaacgtgtacgctgacgtcaaaacagttttgtttggcggttttgtgataagagccagaccattagttaatataaatagcacttttttaaattttcagttgaagactgatgcattaagaaaggatataactcaaagaagtggtggtagcaccagatataacattggtcaggattctcttgggaaggtcactgcattcttccctgaaattaaagagcaagaaaaaatcgctaattttttatcatctgtcgatgaaaaaatcacgctactgaacaagcagtacgaattgctgtgcatgtacaaaaaaggcatgatacagaagatttttagtcagaaattgcggtttaaggatgaaaataggaaagagtttccgaagtgggaaacgtgcgagcttaaaaagtttctaattcctacacttcgtgaagttaaaaaaccgagtgagaattttctatctgttggtattcgtagtcatttcaaaggtacttttcataaaaacgatcaagacccaaataaagtctctgtggataagctatttttagttcatgaaggtgacttcattctcaatatcacttttgcgtgggaaggtgctcttgcaattgcaagaaaagaagatcatttaggttatgtttctcatagatttcctacatatacatttaaaaaagaagttattacccctaaatttttcagctatatatatacattaccaaaattcctcacttatttagatctttgttcacctggaggcgctgggagaaaccgagttttgaaaaaaagtgagttcattgagattgaaatagacaaaccttgcatggcggaacaaatcaaaatagccaacttcctctctgctctcgacgataaaatcgacgtaaaaaaagcagaattggacaagttaaaaacttggaagcagggcctactccagcaaatgtttatataa

SEQ ID NO: 170906 - DNA, 1635 bp, Enterobacter cloacae
atgaacagaagaaatcttttaaaaaccattttaggtgcggcttcaataacgccatttgcagacgcttttgcgaaggatactaaaaaaatcaggccttatcctgaccatgtacgtgtagtatctgttactgactacgacagcctaatggacgcttgtgaggcattaagatcgtctgatggcggcgtagttgaagttcctgctggtagatttttcgcgggagagtgcaacgggatcacaagttacatgaacgtaaacaacgtatctattgttggggctaaaatgccgacttggaacgatgatgcatcagaacttgttggcggggctgtcatcgaaggaaagtttaacgttggagctcataacttttcagtaagtgatatcggttttgatataggcagtaacgtagtgaacaggcgatggcctggagctgatacaaccgcagattatccgtatggtggcacttgggatggttttgctatagggcaaccaagtcaatcctctccgcttcctcagtggcgagggttcagagccaaaaacgtcatagggttgctgaatgattcatcaaccgttggtcatggcgtgctcattgaaaacgttaatggtggatgtactgagggtgacattataggtgtacatggtgtccacggagtggtcataaagtctgagaatattaactgcgaaaaccttcgtggatatatgaataaaacagactgcgtaatatttaaatctgatactttttctcctggtggaaatattcaggcatgtaatgttattgctgagatgatgcttcctaattgcaaacctcaatccaatccgttaattcctgagtcaggaatatattttaatccagaactgcaaaactatacaggacctgtacaaatatcgaatgcaagaattcgcggtgctaaatactctattctcggaggtagcgctactggaactgttggtgctgatatacagattgggaatgtagatattgacggggcgcaaggcgatactgaatgggctatattcatggcaaaccttggcttgttcccaagattgtcatttggtaatttaaatataaaaaacgttaaaaatgcagtttacattaactatattgatgaaagtagttcagataacgctataacaacaattgagagcctgaaaattacaaatgcacagtcaattggcgttcttacggatgggcattccaagcttaaaataggatcagttgacatgctaagcgtcaagactgcatattatcaaggagagaattccattcttgaaataggttctgaatcacttacaggtgtcacgacaaaatacggtaacaacccatacagcataggtcctggatgggttaatgttggtggcggaaactctacatttgatgttcaatattctgggtatgaggtaaagctaaaagggttagtccaggccggttctggtgcaacaagtttgatactgacactaccatcatatttgcggcctgcagaaaatttaaggttcattgcatataaaaaagaaggatcagatgggacatgcctgatcggcgtttctgctagcggactcgttacgcttggtgatactgattccattcccgtaacagggtcatacatcagccttgatgggataagctggaagctaaaaggataa

SEQ ID NO: 170907 - DNA, 1263 bp, Enterobacter cloacae
atgtttaggatttttattaaaaacattcaattgatggtgggattaataaaccaatcatgtaatatcattgtcccatttgtagtgacttttacttctttaaaaatcctgccccaggaacagggtagtatatggctcatgtttttatcaatggtgattttggtaagtctttttgatttcggattatcacctacaataattagaaatgtaagttatgttattgcaggagcacaacatttatctaaaaacaatttagaagaaataaaatttagtgatactgtatcgtaccctcttttggggcgcttaataagtgatattaaattaatatatagaaagcttacttttctcgcgatattagtaataactatctttggaggttgttatttttttattgttactccacaggatattttgtttgaggctatgatatcatgggttatatttagctcgggtttattgctgagcttatattatctctactacacacctgttttgagtgggcttggtgaaatacagtatgctaatctttccaacatttacggtagattaagttggctgatatttagtttgttatgtgtgccaattggattaactctggtaaacttatctctttctttccttctttctgttatcgtggcaagagtgtcttgtctttatttttataatcgtaatatatatgcaaaagaaataaaaaagacgaaacttgaagagagatctacaattccttacatttctggtagtgctataaaattaggcttggcaacggcagggaatgtggttattaaccgcgctccgattataattgcgggcattgcatttagtctaaatattgcaggtgagtttacattaacgatgcaaattttcttggcgattatttctgtgagtaatgtttacttggcagtgaaaataccaagattatcccagttggttataaaaaatgagaagcttgaaataagacggatggttgttaaaataattttaatttctattttgctttatttttcgggagttgttgttttcgcgttttcctcggatttaattataaaaataacaggtgctaaagttggttttttagaaacaaaatatattttattattaggtttggttttgcttttagatttgaatcataatatatgcgcatcgattttgactgctggaaataaaatcccatttgttatacctgtcatagtgtcaggtgccttaaagttgagttataataattggcgatggccgcttatggtatatcaagaatacattaaaaaatga

SEQ ID NO: 170908 - DNA, 270 bp, Enterobacter cloacae
atgaaaactcgtcttttactcacagctatcacattttttatgtttggctgctctggccatgaaagagaatataatttcaaaatggattacccagtagatgcagcgcgcttatcactcggtggtgatattcacgtcaacatcgactgtgcaaaaaggaaagttaacgttatttctgatagcagcaatggcattttcagccgacatataaataagcggatcagcaatatctgttataagaaaacaggtaatggtgccaacttactgatttag

SEQ ID NO: 170909 - DNA, 1371 bp, Enterobacter cloacae
atgtctgcaggaactatcaccctgacaaacgggtccgctattgttggcggttccggaacctcattcgcaaccgaactcgccgcaggtgatttcattgtttcgactgtgggcggcgttccctacacgctgccggtgaaaacggtcgacagcaatacccaggtgacgctggtcagcaactttaccgggccaacgcaatccggcgcttcctggtcagccgtcccccgcgttgctctgaacatggtaactgccgcgctggtggcgcaaagtgctgaagcgctgcgtggactgaactatgacaaacagaactggcaacgcatttttactggaacaggagatgtacaggtaattctgccggatggaacgacatggacgggcccagcctggaatggcatttctaataccatctcgggaatttctgatgccatctctggcattgctgatgagctatcaggtaaggcggcaaaaggtgcaaacagcgacatcacctctctcagcggactcactacagcgctatctgtagcacagggcggtaccggttcgacaaccgcatcaggcgctcgcacaaagctcgagttagggagttcagcaacaaagaatgttggttcaaatactggtgatgtggtgacgagtggcagtacgcaaccactttacaaaactacgttgcctgccgttggttacaatgaccttggcgattatggttataaggcgacatcaacattaccttcagacagcgtagcaaaaacaacaaccacacttgtgcaaactcccagatggacattaggtgtttcatatggaatatataattcatccgacaactctccagaaaacgcagcgcatttgctgattatgacggatggtgtaggttaccttcgtcgctattatttttacaataacggagacatcgtagggccatctggtaagttttattcagaaaaaaacaccactgttgatacaaacggatttatcaagaaagcctctcctatagtgagattgtttggtgatggaactctgaaaagcaacaatgaagcggaaggcgtaacagcaacgagaaaatccgctggcgtttatcacgtcgcaggaagccttggcctgaaccctgaggggtggacggttgagattccgcaggacatgaatggaaatttcctgtgttttgtgaacatcagtactgatgaagatggtgtgctgacggtatcgacctttaaacgccggtttgatgttgattccgccatgatagtcgccggggaaccgatggatatcccagatggacgctggatagatttacggctgggtatgccagaagacagcatctggaatcgcaagcacgctgaatttcacgaggtggaaaaattaaatagctttgatggaagctga

SEQ ID NO: 170910 - DNA, 285 bp, Enterobacter cloacae
atggctaacctccagctggctgttaacggtgaatacttcgaccagatgaagtccggcgagaaaaccgaagagtatcgcctggtgacatcattctggagcaagcggattctggcaaggaattatgaccgcttgatcatcacccgcggctatccgaagcgcgacgacgcgagcaagcgaatcgacgttccgtatgctggttacgaagtgaaggtgataacacatccgcacttcgggcctgaccctgtgaaggttttcgcgataaaggtgaatatcgatggccagtaa

SEQ ID NO: 170911 - DNA, 693 bp, Enterobacter cloacae
atgaatttatttgaacgtttgctgcatcgccgtctttgcaatgagcaacctgctgatggtggcgctgcaccggcgccgtctgagccagcagcatctactgcagaaactccagcacctgcaggcgaaccagcgaaaccagatggcgaacagccacaggatggaaaacctcaggacgacaaacctgctgatggtgataagccagcggaaaagcctgatggcaaagatcagaagcaggaaggcgcgccggagaaatacgagtttcaggcagctgaaggtcaggagctggacggcgccgctctggagcagttcgagcctatcgctcgcgagctgaacctaagcaacgagcaggcgcagaagatggtagacctgtacggcaccaagatcctcccgatggtgcagcagcaacaggctgaagcctggcaagcacagaccgagcagtgggctgctgacgtgaaggcagataaggaaatcggaggcgacaaactgacggcaaacctcagcgctgcgcagcgcgctctggacctgttcggtggacctgttctgaaagaatacctgaacacaaccgggcttggtaatcaccctgacctggttaaggcgttcgtgaaaatcggtaaagccatgtctgaagacggcatggtcgatggcagtaatcaaggccagcgtagtgcggccgaagtgctctatggcaaataa

SEQ ID NO: 170912 - DNA, 1797 bp, Enterobacter cloacae
atgagttatttcgggctcaatacggtaaatcagaaccagcaactggataccgccgcgtcaaatccagctggtgtatctggcgataacgatgtcggattctttgacaatgccggaggtgcggcgctgtccgggctttattctggtctggtggcgaaaccagatcaattgctttgggctggtgttgataccgttgtttctccgatcgcgcagttcatcaacgaaaacacgccagttcgtgacacgtcacaggagtttatctccgaacagcgaaagctggcgcaggaacaggtaaagcggctcacgccagacgccgccacaaccggcaccgccgggcaggtacttaacggtctgtttgatatgggatcgcaggcggtggtgggtactgcgcttggcgggcctcttgttggtgcggctgctgtaacctccggacagggcttttcagagttcgaacggctccgcgctgctggtgtggacgtcgctacggctcaggacgtggcgctggttcacggtattaccgccggtgctggcacgctgatcccaatgagcctgggcctgcgcgctggcggcgcgctggcggaaagtattggtgcgcagattgcccgcggcggtgaaagtgccgcgcggaacgtgctggcggctactgcccgcgccgcgccggatatcgcctacgccgccggaacaaacgttgcttttggcatggctcagcgcggtctcactgcctcaacgctgcggagcggcggttatgatgagatggcagcgcagtacgatgtatttgaccgccaggcgctggcgatcgatgcggtgctgggcgttgcattcggtggcataggccgttttatgaatgcccgtggcgaaaccgttcgcccgccggaatttgcgcccgctgatgtggatgcggcgctggcagccaacgcatcgcagcacgctgaattcgacgtggctccaggcgtaccggttaacgtgttgtcgcgtaacgcccatattcaggcgctgcaaaaggcaatgcgcgatgtgagtgagggaaatctcgttgacgtcgccagcatcgccgaggctgccgatttcagcgccgtgcccggcaggcgcaacctgatatctcaagccatagatgaggctctttttaccgccgaagatggggcgacttcgcgcgccgtggagacacgaattttggaagaacaggcggcgcaagtattgccgttgggtgagcgtaaagcgcttcagtctgagatcgccaatagtgagcgtatcctggataaccttaacactgatcgcgctgccatcctggcagaggaacctgtcggaagtggtaaagaactggcacaggcaagggctgataagcaggcacgactgcgggcggtagaccaacgcattactgaaaccaccgctcgactggaaactgcaaggacggatctggctccccacgagcccggtggcgctaagtttgaggcgcgtgcggaactggcgcgccgccgacaggcagaaacagacctgaatacccaggccatgtcctactacaaaactgctgaagtgctaaccgcagatgaagcagcaccgttcaataacacccgcgcattaactcaggttgaccaacaatccgcccatgacattgaccttcagtttgcggaagattcactggcggcgtcgccggatatgttgatcacggtgctggatgatgacggtaatccgcagtcccgcagcgcccgtgaagtgctggaagaggccaaacgcgagaatgagcaggctattcaggattcaggcctgtttgatgtggccgtggcatgttttttgagaggataa

SEQ ID NO: 170913 - DNA, 1869 bp, Enterobacter cloacae
gtgaaatttcgctcagacataaacggattgagggctatagctgtactggcagtagtgctataccactttaatgtaaagtttttcaatggcggatttgttggtgttgatgttttctttgtcatatctggctttttaatgacaaacataattattggcagaacagaaagccaatcattttctctcattggtttttacttcgacagggcaagaagaataatccctgctcttggtgtgctttgtctttcaattgcaatattatgctggtttattttactgccagttgattacgcaactctaggtaagcacatatatagcagcattgcatttttctctaatatagtatacttcaatgagataaactattttgatgcatcatcagatcaaaaatggctacttcatacatggtctctttctgttgagtggcagttttatataatttatccaattttgattatggctgcattcaaaactggaggcataaaatcagtcaaagcgctgctctttgttggattctcgttgtcattaatatcttctatttatctctcatacgttggcatgcaatccaaggcattctaccttcttcacaccagagcttgggagatgattgctggaggagtaatttatttcttgcctgagataaaaaacaaaataacacaaagcgctatgtattacgcaggattgattggggtcgctgtcagtattatttgtttcactaaatacacagtgtggcctggatatctggcaataatcccagttatttcttctgtgtttatattagctgcaaaaaagaactccccaattcttgataacgcattattccagttcataggtaaggtatcatactctgtatacttatggcactggcctgtagttgtattggtctcatatctttcatacacttctaatttagatattgcgattgcaatagctgtatcactatttcttggtactctatctttttatgtaattgagaatccatcccgtaaatcacttaataaatttagcggtaaaactggcattgaatttcttacggtaataacaatagtatcaataccttatatatctggtttttcaatttaccatagtgatggcgcaccttcgagatacccattctctcttctaacacaagagcagatagatcaagagagggcaagatactggggggaaggtgataaagaaaatccaatccctaagaatggcgaaaagaaattcgtcattatcggtaactcccacggaatagatctaacctatgctttgatagaaaatggcataaagggtgacataacatacctacgaacaactaacttttgcagcaactttggctacactccaaacataccagagtataagaaaacgtgttctgaaatttacaataatgttataaataacaattatattaaagatgctgactacatacttcttcatgatgattgggaggttgttaatctcgaagatttaagattaatgatcgcaaaaataagaacattaacaagagcgaaaatttatgtgttcggaccgaaaatgatgtttaaagcgagtccatcagaaatttctgcaaaggcgatgtctgagaaaaacttcaccattgaaatgataaatgaatacgctaagagatattataatgagaacagattctcaatagacaaatcagtcaagaatacaatagaaaaaatacagtcaagcgacaatggcgttgagtatatagatacactggaattgcagtgcgggaaaataaaattgtgtgaaataataggaagtgggaataaaaagtatttttattttgactctgggcattttacagctgctggttctaaaaattttggtgaggcattaaaactatcaaatccagagttattccctgattcttag

SEQ ID NO: 170914 - DNA, 783 bp, Enterobacter cloacae
atgaatacatatgaaagtggattattagaagtagcttggtatctggctaagtatggaaaaaaaaagcctcctgaagttctgggtgttgacacatggaaagcagcaatatcactattttatccaacatttggtgcaggtaagacgagaattgaattttataacagtctaaaaaaccaccgtgatcgttttgattcttggctaagtgttgtacgcacaggctggcggaatgctgatggttctcctggcgagctcccgttgtctgctcagactgttatgaacaaaatgaacaaactatcagagtcacttattgaacaaaaaattctatcttggctgtcgataaccccctcagaacaaaaactggctgatatattacctattcaacaagataaaagtctggatgaaacgatgaaagaacgattaatcgcttcaaggcttggacaaggtgaattcaggaaaaaatgccttaaactgttccctgcctgtcctataactggtatttcttttcaacctctgttaagggctagccatattaagccttgggccgcgtgccagaatggtcatgagcgactggatccttataatggaataatattagcagctcatattgatgctctttttgaccaaggatggctgtcatttagtaataatgggcacatcttaattagcactgaacttgattttgaagtaaaaacacagctaagcttacctgaaaatatcccaccattctcggcacagcatcatcactatctaaaatggcatcgagaaaatatattaagatcatga

SEQ ID NO: 170915 - DNA, 762 bp, Enterobacter cloacae
atggatgaactcttagatgctgttgccgagctagtttgtctggtttctcctgaaaagatacaagcgatcgctggccgaattcgacggactgaagcctgcaaggctctgctggtactgccaggtgcagtaggaactcccaaggcaagtaacgctattgagagactagcaattgcatggcaaaacaccatggtcagttcagatgaactagcatctatgcttcttgctgcaagccatgtttactttaaagttagctctgagcaaagtactgaacttgtatggactggtccaataacaccttttgtatctgttcgccgtacagagcaagtgctgctacaaataatcaatgcggcaaaacagtctttatttattaccagctttgttgcctatgatgtgtcgagtattgtgaatgaattgaatatggctataaagcgtggcgttaccattacaatgttgctggaatcttcacaagagcatggtggtagtatcaatattgatataatcggtaagatgcagacgcttatacctggcgcacatatttacgcctggaataataaaaacaatgaattttcagaaggtcgcgtgcatgcgaaagtaattgttgccgatggtcacacttgttttattacaagcgcaaatctaactgggtatgccatggagagaaacattgaagcaggagtacttattacaggcggagggattccagaagcacttagtgatcatctgtactctcttataaacacaaatatcattagtctgatttaa

SEQ ID NO: 170916 - DNA, 1860 bp, Enterobacter cloacae
atgatcatcaataacaaaactccagtcggcgaagtacgccctagccagttgctatggacttatggacctggcgcgctaatcgatctaccaagcctatctgtagtgacactaggtattgaccggtgggagcgagagcgctgccagccaattcaagaggcccggcttcttgctgctgtgcgaaaggtattaggcccacaagtcgaaaatttgcgaatgccaccctttcagaaaagcgagctcgttgacccttggtcagccgaggccaacataggtgtacctgttcgaccatttccccgctggatgcgctgtgtaaagtgtggcttgctatcgccctttgatgatggtctgcttgagatcaaagaggatcgattcagagccgaacgaactcgctttgttcacaaaggttgtacaggttctaaagggaatctaccagctaaggatgctgatgccgttcctgcacgttttctgctagcctgtcgtgacggtcacctagatgattttccatggcactactttgtccatggtggcaatagtacatgcaaagggacactgcgcttctttgagagtggtgcatccttacaaaccgaaaacctgtgggtacggtgtgatagctgtgaggcgtcacgaagcatggcccatgccttcggcaaagcaggtaaagaaaatctcccagcttgccgaggtcgacacccacatttggatcaattcgatattgactgcggtgaagaaccacgggcagtactgttaggagccacaaacagctggtttccgatcacactttctgcattggccataccccaatcaaagaatcctctcagtcagttgattcaagacggatggccgttatttgaagcaattacagctgaagtcatggttcccatcgttgtgcaaacactcaagctaactggtggtcttcctggaatcgacaaatatagcgtgtcagacatctggtcagccatcgaaatgcatcgttctggtggcgatagcgaatttgtcggtgaagccgatatcaaaggtcctgaatgggaagtgctgacggaggccaatcctcccacggattatccacacttcatgagtaagaagatcggaacaccagcacaattcataccgtacatcagccgtgtattactacttgagcgactacgagaggtcaatgctctgcttggttttactcgagtagaggcaccagaaggatccggagagataaatgaacgtcctcagatggctagcttggcacgcaataaacctgaatgggtgccagcgaaccaggtgcatggggaaggtatcttcatccaattcaatgaaaaggctcttgtagcttgggaatcactggatgccgtcaagcaagtagacgagatgcttcgtggtggtcataccggttggcgtaactctcgtaatctcgatccgaatgaagattacccaggtatccgatatgccatgctgcataccctatctcatttgttgatccgtgaactagccctggaatgtggatacaacgcagcaagtattcgcgaacgtatctatgctgatacatcaaacggcagtccacaagctggtatcttgatctacacagcagcagctgattctgatggcacactgggtggtcttgtagatcttggtaaaccagagaatcttggtcgcttgctggtacaagcattaaatcgttctaagatctgttcttctgacccactatgttctgaacataacccagagaaagatcgatcattacatgccgcagcctgccatgcatgtactctggtagcagaaacctcctgtgagcaaggcaatcgctatttggatcgatcgctattagtaccaacactggagcgtattcacgctgcattttttaagggtttttaa

SEQ ID NO: 170917 - DNA, 3978 bp, Enterobacter cloacae
atgactgataacaacaaatctagtaaaacaccgaacgcttggatcgccattgaccataacttttcaagagctcaagtattaacatactacactctacagttaaaaggtgaacattcactgcaccaagccatctccgacaatgattggatcttagtcctagatactacaggtaatatcacgcgagttggacgaatcctgcggatacgttctgatcttgaaaccacaactatctttttcgatcgaatgttgcaggttaagtcggtggtttcgatcggcataaccccattcaaatttcctcccaacgacagagcgggtcgtatccaatggactgacttcattgagaccttgcctaaagagctccacataaccattgcagacataccaaagatcgaggatcaaacttacatccgcgaactgctgcaactggctgtgatggacgacttgcttggccctgctggtggccctaatgagctcatcgtcgatatgggtgtacgcgaccgctacctagttggcaaactcgccccacgtgaagcagccgaaagaggacaagagtttcctgttgatgctgaagatattgaagatgaagagccagacctgatcgtcaaagcgaagactgcaaagatgaactctccctcagtccttggtagcggcgaaaccgacacggcagaagagattgatgctgccagcaatcagtcattggtgcccagtagcctcggcatgactttctgcgtggatggcgacgtcgatcgggtcgagatcgaagcgcgttggggacggtatgagcgtgtgccaaatgatgaacatcaattctttaagtccaatgggcaaaaagctaaggtgtggaaacgcattccttgtggcggcaagatcgtactccccctgatcgaaggctcgatttcacacaatgctccggatagtacttccccagaagttagagtgcagggttctattagagccaaaaatgacaatggtgatcgactgattacactcttcctcgttaatgcgcaggaagaaccggatacaaaccgtgatacggcatgggtgtttcaaccagagttgatcgttcgagcagagaaagatgctgccaagcctgccattttcaggcgcagaccagtactagatgcagatggtatggacccagagcgcgaagcacttgagatgatctaccgagatcgtgttgagttcgccgtgggtcatggagttgcagttcatgcagaaatagcggatgacgtcacattagccaccgaagtgcgtaccacagtgatgccacagtacgaggttcaggcaactgagactcctgggcttgagctatccgatcgtccagctatgcgagaaatggtcagcagtggtctgcttgatatgcaacgactagccactttggacattgacccattagttgatgccttgagtgtgctaactaaagactacgctacctggattgatgaacagaacttgagtgtgagcagcaaggccaagggcttcaaaacccaagcccaagcggccttagatcgttgtcaggagatccatacccgcctgcaacaaggtatcaatacacttaagcataatgagaatgctctggcggccttccgtttcgccaaccaagcgatggccacgcagcgcatacgcagcttatatgcacttgccatgcgccgaggcgaggacgttaccctagataagttcgatgctctgaagaaccgcagctggcgtccattccagttagcttttctgttgctgtcgattccatccctggcggatccgtgtcacccagaccgtgtcaaacctattgaggcttatgcggacctgctgtggtttcctaccgggggtggtaaaactgaagcctatctgggtgtagccgccttcaccatggccattcgacgtatgcagggcaatctaggcgggtacgatagctcacgtggtttgactgtgataatgcgttacacccttcgtttgctgacactgcaacagttccagcgtgctacagcacttatttgtgcaatggaagtgctgcgacgcgaggcactaaataagggtgataaatccctcggaacggagccatttactattggcctatgggtcggtaataaagtgactccgggaacgactgaagatagccataatgctatcgaaaaaacacgtaacccgggtagttataatgcgggaacagcctcacccgtccaactgaccagctgtccatggtgtggtaccgaaatcaatcctgggcaagatgtcgaagttaaaaaggataaagctggcggccgaacgtttatctattgtggtgacaaaaaaggacgctgcgaattttccaagggaaagtccagcaagcaactacaccctggaataccagtactggtggtagatgaagaaatctaccatcgtcctccgacaatgatgattgccacagtggataagttcgccatgatggcatggcgtggccaagtgcggactctttttggccgagttgaaaaagaatgtgagcggcacggtttactctggcctggggccaattgcactggaaaccaccaagcattcaaaggacaaccttcagctaaagtgaaggccatcccccccatccgaccacctgatttaataatccaggatgagttccacctaataagtgggccactgggtaccatggtaggtttgtatgaaaccgccgtcgatgagctgtgtagctggacgctcaacggaaaaacggtaaaaccgaaaatcatcgcctcaacggcgacggtgcgcaaagccaaagaacaagtaaataatgtatttatgcgtcaagtttcggtattcccgccacatggactagatgtggaagataacttcttctcagttcaacgcgacattaaggataaatttgggcgacgttatcttggagtctgctcacccggtagctcgcgcccagcaatgcttattcgtgtctataccgctttcttaactgcggcacaggaactatttgaccacttcggtgaacctgctgatccttatatgactatggtcggctacttcaactctctgcgtgaactaggtggaatgaagcgattggcagaagatgatgtgcagacacgttcctatcgcgtgcaaatgagcatggtggaacggcctgcattggcacaacgtagtgtcaacaacatccgcgaattgacttctcgtgtatccagccaggatatcccaaagtacctcgacaatcttgaggtcaagtttaaggccgagtttgataactctgcaggtaaatacgtaacgaaatggcaggagggtgatactcgcgctattgatgtagtgctggcgaccaatatgctgtcagtgggagtcgatgtgaatagactcggcctgatggcagtgaatggacaacctaagggaacggccgagtatattcaggctaccagtcgtgttggacgttcattccccggcctagtttgcaccgtacttacgtgggcccgaccgcgtgacctctctcattacgaaacattcgaacattaccacgccaccttctacaagcatgttgaggcacaatcggtaacgccattctctccacgtgcaatggatcgtggtttgacagggtcgttgctaagtcttatgcgtctgaagaataacgagttcagcccaaatgaaggtgcgggtaaattggatatgtcaaaccagagtgaactcgctcatgcaattgaagttttagcgactcgtgcaggcaatgtcgcggaagacaatgcacgtaagctgttagctgaaaatgaactgaaagagcgtgcagacgaatgggccaaagaagccagtaaaggcggccgaattctgggatatgaaaagagaggtcccgataaagacaagactgtggcgttgatcaaatcaccagggcttcaagcttgggacaactggactgtacctatgtcaatgcgagaagttgagtctggtgtacgtctgattatggacaccaaatttatcaaggacgatcacgattggaaacctcgtcctgcaacgaaagacgaggattga

SEQ ID NO: 170918 - DNA, 507 bp, Enterobacter cloacae
atgactaatctctctactgatcgtccaagctcagacccgatagaagacctgttcgggcacgccactttcgcagaaagcctcgccaacagcatttgtcgctattcgggtaatgatggtttagtactggccctttatgggccatggggttcagggaaatctaccgtactgagctatgtgcgtcacttcctagaacaacgcacagaagaagaacagcccactatagtgacctttaatccatggtggtttctgactttcttatccaaattttatacacatacacgttcacagaccatgggtgattgggctgtacatcttcaacctcgtttgaatccaacctggttagaacaatatattgacactcaagcttgctatgagcgcctgataggcctgcgacaaaaaggcctcgttccagactctgcacgagaatcgctagaacagttcctaaaagagtttgaaatgctcaaggcaggtaagaatccatatggcgttggtgcatttgatgattga

SEQ ID NO: 170919 - DNA, 4083 bp, Enterobacter cloacae
atgagtatggccagcatacacgatgattggctctcgctaatcgacatttcaggccccttccttgctgtaccagtactaaaagatgcattcccgcaagggctggaagagctagacgctgctaagcgcaaacgactgcgccaagcttacgatgagtggcgagaagcactggaacaagaagatcctcagttcaacaaattgcatttcgcgtggattgaagaagttctttcacgtggccttgagtttgatgaggatgggaaaggcgatgtactgaagggcacagactggtgcgccgccaacttgaacacttttctccctgaccatggtgtagctctgtcaccaaatctagcaattgtcgacgagcaatgcgcgaacaagcctttgatgctcattcagacctatgcgcaagatatcgatcttgacgcaactttgaaaatagacggatgggccgctacacccacggaacgtatggttcagctgtgccgatccaaggagtgtcgccttggtttggtgaccaatggcgaacgctggatgctggtagatgcccctgtgggcgctgtcaccagcttcgctagctggtatgctcgactctggaaccaagagcccatcacactgcaggccttcgtgcacttgctcggtatccgccgtttcttcgttgatgaatccgaacaactacccgcattgttcgacagttctctgaaatatcaggatgaagtaaccgatgcactgggtgaacaagtacgtcgcgctgtagaagtattaatccagtcccttgataaagctgatcaggatcgcaaccgtgaactactttacaacgtaaaagaatccgaactctatgaagcggctctgacagtgatgatgcgcttggtgtttctgctctcggcagaggagcgcggcctgcttcttttgggcgatgaacgatacgaagccaactatgcactttccaccttacgtatgcagttacgcaaggtacccgaagaaatcctagaacgacgctgggacgcctggtcgcgcctgctggcggtcttccgtgctgttttctgcggggtggaacatgaaagtcttcgtctgcctgcactgggtagctcactgttcgatcctgatcattttccttttctggaaggacgggctaaaggttccagttggcggacagatacagccaagccactgccgattgataaccgcacagttctgttgttgctagaggccatccagcaattccagggccgaacactctcatatcgcgcactggacgtcgaacaaatcggttacgtgtatgaaggtctgctggaacgtaccgtaaggcgtaccgatgaagtcacactggaactggatgccaccaagaaatcacagtatccatgggtcaatctagccgagctagattcagcaagcatgaacagtactgagaagctagttgagttgctgcaagaacgctccggcagttctatcagccgggtgcgcaaagatctggccaaagctgttgatgacaccttggctgatcgcctactcactacctgccaaggtgacatccagttacgtgaccgtataaaaccttacgcccatctgctgcgcactgacccttggggttatccgctagtctactccgctggtgccttcatcgtcacaagcggttccaaccgacgcgaaacaggtactcactacacgcccaagtcccttaccgaaaccatcgttactgagacgctaacaccggtagcctacatcggcccggctgaaggcacaccgcgtaaaacgtggcaactcaaatcccccactgaactactcgaccttaaaatctgtgacccagcaatgggttcgggtgcttttctggtacaggcttgtcgctggctggccgatcgcctcgtcgaagcctggtcgcaggctgaaacaacaggaaagatgataagtgtggacggagacgtactggaggaactggacaccagggagccgctaccacgagatactgatgcacgtatcgttatcgcccgacgcctcatcgccgagcaatgcttatatggtgtagatttgaacccgctggcagtcgagcttgccaagctttccatctggctggtaacactggcaaaagggctgcccttcggctttcttgatcacagtctgcgttgtggagacagtctgcttggtattcatcggttggaccagctcacagaattatgcatgacaccagaacaaaagggaaaacgaagtgaccgtctgtttggcaaagacatagagggatcagtactacaagcaatcgaacttcgccaacgtttgcgcgctatgccaatacgtgacattcacgacgtagagatcatggctagtttggatgctcggtctcgtggccatcttgaagtgcataaactaattgccgatgcgtttattgccgaggtattggtctccgggggcaattcgctcacactagagaatgcgctttcctcactcgccattttggcagaccaagcagtaggtggaagcaatgaggctactcaatctattgcaagccgtatttccagttcacttaccagtgatctggcactaggacattcacgtcggcttccattccattggcctttagaatttcccgaagttttcttaagagaacaatccggatttgatgcatttgtaggaaacccaccatttctcggtaatcgcctatggaaaagttcaatgggagataagttgcaatggcaatgtcagatgattctaggaacaccgccagggaaaattgacttgagtattgtcttccatcggcgtgtcgtcgatctgcttagagcagatggttgttatggcatgctggcagcgagcaatatcgccgaaggaagcgctgttgccattggacttggtgtcatcgttaaaaatggtcatatctatttctcaagaaagggcatgcaatggcccggtaccgcgtccgtagttgtttcgattgttggctttttcaaaggcagatggggtggtatctgtgattcagaggggaaaatgtgccaacgtataggagcacgtttagagcctgaagcaattgacacttggatgccaaaagagctttcagagtcggtagttagcttccaaggtgtagacaatagcaaggggatggcttttgttataacagaaaaaagcccttggtttcatcagcttaaaaacgagccgaatagtcttcttcgaccatacatcactggggatgatataaccagttatgcacttcggaggactgaccgctgggcactggatattgcagacagaaaacttgaagacattgaacaaaactggcccattgcattccaatttttgattcaagaagttcaaccaacccgaacgcctcaaaccttaaaaagctacaaagggctctatgaccgttggtggcaattctggaaccatcgagcagatctcatgcgcaatctgcgcaaacaagaacatttcattgccttcgcaaaggtgaccaagtacccgttttgcttagtgacccccactgaatggatctatacaaacaaaatcctgcttattggtgcagatagagatgatcttaatgccatttgtttaagctcatttttccgaagctggctctatgcattctctgtccgtagcttgggggcggacactaatacacttacgctttccattcgagaatctgtatcgactttcccgttaccagaaacacgagtttcgaatgctggtcgtaatcatgcaaatcgttttcagaactttctcgtcgcatggagcgagcaaaattgcggtggtttaaccagcgcaatgaatgctgtaaacacgccaagctacaatgatcccgccataaacgaactacgccaaataatggttggaatagacgctgaagttgcacaggcttatggatggaatgatctggatatttcatacaattatcaggagttcaatggcggttcagtaagagacccgtggcgctgggcactttcagaagacctaacaacagagttgatgcgacgacttactgagctaaaccggcaacgttttgaggagatatcgctaactcagaaaaatgctgctaatccagttaaacgcggacgtcgctcaaaagcagacgctacggtgaacttacttgatttgtctgatggtgcgaactaa

SEQ ID NO: 170920 - DNA, 3141 bp, Enterobacter cloacae
atggaaatttctaatacacctgatatccgagtacagcgaactattccagaacccggtcagttggttgaggtccgtcggcgtcaatggattgttgtggaagttacttcatctcaattgttatctgcctcagctcaacagcacgcagtaactttgtcatctattgatgaagatggtttgggggaagaacttgaggttatttgggaaattgaggtaggtgcccagattattgagcgagctgggctgcccacaatcagtggccaagacgactccagcactcttaatgctttccttgacgcagtgcgctggggagctgccactaatgctaaccgaggcttcctgcaggccccatttcgcagtggcgttagtatagaagacttccaactcgatccgttggtgcgtgcaattgatatggcccgtgtcaatctcctcatagccgatgatgtcggtttaggtaagactattgaggctggattaatcattcaggaaatgctgcttcgacatcgagcccgtacagtcctgattatctgccctgcgtcgctacaggaaaagtggcggatggagatgcaggaaaagtttggactggaatttcaaatcgtcgacactcgctacatcaagcaattacgccgagaacgcgggatccatgccaacccgtggacatcacattctcgactgatcacatccatggattgggccaaaagtggcgaaggcttgagagctatgcgcgatgtgttgcccttgtatagcagctacccacgcaagttcgatctattggtcattgacgaagcacataatatcgcaccggctgctggggcaaactacgcattagagagtcagagaacgcgcttcatacgttcaatcagtcctcacttccagcacaggttatttctgaccgctacgccacataatggctataccgaatccttcacctcactgctcgaacttctggatgaccaacgtttcgccagaaatatactcccggacgataagcagctcaatcaagtaatgattcgtcgcctcaagagcgatctcgtcgatgctgacggcaatctactttacgcccaacgtaagcttgaagccttaccgatcttatacactgccaaagaacgcgaaattcactcaaaacttaatgactactgcaagagccgagaactaggtgcagagaaaaccggtagcacattcgggactgctttcgtgaatcagctactaaaaaaacggctcttttcctcccctgcggccttcgcatcaacactcgaaaaacacatcgctagtctgacttatggaaacctgcgtagtgataatagtccgatggacgatcgcatcttgcgcaaagctattcttcgtgttgatgaagattacgctaacgaccaagaggtagagaacgcgcaatctgaggctgttgaagaagcttcatgtcgagctcagccgctcacgaccgaccagcaacaaatgctgagtgaactacgtaaatgggcacagatagccagaaaccaagtcgattccaaagctaaagccgtgctcagctggcttgataccaatctgaaaacaaacggtcattggaacgaacatcgggtaattctgttcactgaatatcgcactaccctccagtggatacatgaggtcctagccagccatggatttggtggggagcgccttgcgatcctacatggtggtatagcgcaggacgaacgtgagaaagtaaaagcagccttccagaccgctcccaaagactctgccgttcgtattcttcttgctaccgatgcagcatctgaaggtatcgatctgcagaaccactgtaactgcttaatccatcttgagatcccctacaatcccaatgtcatggaacagcgcaatggtcgtattgaccgtcatggtcaacgccagaaagaggtgttgatctggcatcctgtcgatggcgatgaaaatagccaagctagcattggaggccatagtggggacatcatccgagctctacgtaagctcgaatctatgcgatcagacatgggtagtgtcaatccggttatcgcgccacagatgtcgaagctgattgaaggatctatcagggattttgatactcgtattgcagaagctcggattgccaaaactaaacgattcgtaagcgccgatcgtgaactgaaagagcggatagcccggttacatgaccggctactatccactcaaaacgatttccatctaacgccagaacatatcctcatggctgtaaatacgggactttctttggcaggccgaccacatttggagccgtttgctcttccggatgctccagctggttcaacattcaaaatgccagcattgtcaggatcctgggctcgttgcctggaggggctacgccatccctatactctacaaactcgccctatcacctttgaccataccgtggcgagaggacgtgacgatgtcgtactcgttcatttgaatcatcgactggtacagatgtgcctacgtctgttacgagcagaagtatgggctcgcgatgacgtgaagaagttgcatcgtgttactgtacgttcggtgcccgatacactaattgatggccttgccgtagtagttagttcaaggctggttatcaccggaggcaattaccatcgcctccacgaagagttgacaacagctggaggttatcttggggataaatccttccgccgtgaagaaggggtcaataaagttcagctatggctagataatagtaagccaatgacagcttctgactcactatttgatgacatccgtattcgttttgagcgtgcacaacacgctattctacagtcagtgaacgctaggtcaaaagaccggctcaaagatttgagtaatactcttcagctcagtaagaatcgagaattgtcggacattagcacagtgcttgatgaacttgaaaaaaccatctgtatcgaattaaaaaaagatcaacaacctgagcaattttcactgttctcagaggatgaacgaacccagctcaaacgtgacaccgcagctctgaaagctcgcctttcacgtattcctgaagagcgtgaacaggagatccaagccatcgaaactcgctacgctaaactcgacgatcgtacttttcctgttgctgttaccttcctagtacctgaatctactgttcagaggggggaagcatga

SEQ ID NO: 170921 - DNA, 957 bp, Enterobacter cloacae
atggatccggcctgcaaatttccttatgaatcaaacaacaatgccaaatttatagaacgggatataagcaaagtaacaacaaccgaattagatgcattgtttggcgatgctgacatcaaaattctcgctggctgtgcgccttgtcaaccattttctacctatacacaacgttatgaatcggacggtaaggatggtaaatgggggctcctgtatgagtttgcacgcctagcagaaggtactcgcccagacgtgatcacgatggaaaatgttcctactgtggctaaacaccaagtgttccacgacttcgtcgaggcattgaagtgtattggctacagcgtatggtttagcattgttgattgcactcatttcggtgtcccacaaacacgtaagagaatggttttattggcatcactccatggtgagataaagatgtcttctccaacgtgtacaaaacccaaaacagtaagagaagctataggccatctgcgcgcattaaatgctggtgaagccgctccaggagataagctgcatgttacctccacattgtcagataagaatctggagcgtattaaggcctcaaaaccaggaggaacctggcgtgactggccagaacatcttgttgccgattgtcatcgaacagaaagtggcagaacttacgctagtgtttatggccgtatggaatgggacaaaccagcaccaaccatgacaacgcagtgctatggatttggaaatggtcgatttgggcatcctgaacagaaccgcgcaatctccctgagagaagcggcaattcttcagagttttccccgtaactatgcatttattccccatgatgggccagtaagtttaaggattctagggcgcttaatcgggaatgcagtcccagttgaacttggccgagcaattgcacgcagtattaattcacatcttgcaaatgtgaatatggtcactgtggaatga

SEQ ID NO: 170922 - DNA, 2022 bp, Enterobacter cloacae
atgcaatatgaatcaaaattaatgtcactggctcaactcattgatgaaaaacgacttttcaatattcctatctatcaacgcctctatgtatggggtagtgaccagatcaaagtattacttgatgatctagtctccgcctgtaatgccgacaaggatgtattttacttgggtagtacgctggtgattgagcaaggaaggacagaatctgggcaccccttgttggatctgattgatggtcagcaacgttttaccaccttgtggttgcttagcgtagtaatcgagcgactgctctcatcatcgaaaaacaatgagcgaagccaaaatcccctttcctgttttctctatgcccagttgggaaatagtcgtgagccgcggattcggtttgccattcgccctgaggtaagccgtttttttgcagccttacttgatggccgagctgcatctgatgagcaaaaggccgctgcgttgagttatgcgatgcaggtcatggagggttacttcacccatagaacggatgacacccaccggattgatcttgtcaaattgggtacgttcatccgtgatcgggttcaactggtattgaccctggtaccggccaacacggaccttaacaagttgtttgaggtcatcaacaatcgcggtgtgcagctgcagcaccatgaaattttgaaagctcgcttgctggcgttactgccagatagcgctgagcgcgaagcctatggccagatgtgggatgcctgctcatttatgggggcctatgtcgaaaagaacctacgtaccgttaaaggaataaagctgatcccgctttataatgtcgaggatgctaaacgagacagggagatgctctctgatcccttggttatacgtgacgtactgctggaattaggtacacaacaagacctcagacaccactcattagacgatatcctcaatgatgagacactcctgacggagccatctaacaatgcttctgaaaataacgaggcctatgaagccgatgatgtacgcagtattattggcttttccatgctcttacagcatgttttacgcctttttctgttacatcagcaacgcgatgatatcagcaaaatcctagacaaagagctgttacagatcttccagactcattggctggcggggctagcccagtgtgagaaatcagaacaagccaatcagatacgtcgctttatcgagttgttgtggcgttgccgctatctgtttgacaaacatatcatcaaatggattagcgatgatgctaatgaagaaagtcatggtattcgtcgcctccgagtgaatgaaaatcggaacggttaccaaagccttattcgcgctagccgtgatgccgatagcgggtttgctatgttacaaagcatgctctatcactcacagcaattgaccacccattactggctaactcccctgcttagttacctactaaaccatggcggtgaaggtgcccaccgatacctgcaatatctggacaatcacttgctttgcagtggcagtgaacagccactgatcgaacgaacccgtgcgtttgtgttaaatccatggtgcgatagctatccgatccgcgatatgcaggcagtgctgagagctgatgagggaaccggattttctcactactggttttacaagctggaatatattctttgggagcattaccgctttcaaaaagggagtgcctggcaggcattccgaatgacggccagaaattcagtggagcatgtttccccacagcagcctgagcattttgattccaaccgagtgagctctgaaatactggactgttttggtaatttagggctagtttcacgcagtatcaactcagagtacggcaacaaaccctatgttgaaaaacgggctcgtttcattgagcgtaaccagagcagggtggactcactcaagttggcacttatttatgaaaatgagcagtggaatgacgtgctagcattggctcatcagcaacaaatgcttgaggaatataacgcatatttttctgaggtggagctcgggaaatag

SEQ ID NO: 170923 - DNA, 1461 bp, Enterobacter cloacae
atgacgattaagcagcccgtcgaggtctgcatgatggattttgccactttgtgcagcaatggagcaactttacagctcgaccactaccaacgaccctatgtttgggacagacacaaggtcaatcagttgctggaggatttggacgagttcaggcacagcggcaatgggcagaaagtctattatctaggtaccctattgctgcatcggaatgacgaaaaaaaagcccgctttgtgatcgatggccaacagcgcctcagtaccctagcagtgctgtatcatgccttgcacaatgaattacccaaagggttagaatttcattaccgctctcccatctcagctcgtaatttgcgagtagcacgcaagctaatgagcgaacatcgtgagtcagctctagagccatccatcgttgagcaattgtgttttacggtgatcacagttgagcgcgaagatctcgcttttaccttttttgatactcagaattttcgcggagtaccacttaaagcgactgatttgctcaaagcttatcacctgcgggctgtgaacgggcccaacgtacagcatgtcgagtcattgcagcaaatctgtgctcgacgttgggagcatgttcaaatggcaggccctaggcggcaggattgtgaacagcaagattttgcacccgagctgtttcagtactatttgtggcgtgcccgcaattggcggggtaataagaaaatggagcgtgaagatcacgatagtctgctggaagcctttcaacaacagagtgttggtggtggtgagattgatgagatcccgctctacccgggttatcacaatcaatttgccaattcccttaaattgcaaagtagcgatgactatcgcttggcattgaaccctttacaaattagtggaagtgcggccaatttaccatttaccttgcgccagcccattcataaaggcatctgttttttcctttacgctcaaaaatatgcctctttacttgatgcacttttataccaagagaatacctgccacgaattagaggcattccgaaagttttatcggcgtgtggtacgtgctaatgcctattacttgcaggagctctttaacttggcccttctgatgtatgtcgaccgtttcggttatcaacatctattagcctttgcagtgggtttggaactggtgttggggggattacggttggagaaaagttatatctttaaagaatcaccactcaagtacttacgtgacgctccttacaatctgcttgatgagatatgtggagcctatcgcccacaagaggtgatggcattcttgcgttctgaaatcgaacgtagtaagggatacgggaatgctgtctccatcgtcctctctaagggcgttcaggggcgttaccttaatgcgttgctggattatttcaatcttgatggtatccctgagggtgacagttgggtacttaaaggttggctagggatggaaaagtag

SEQ ID NO: 170924 - DNA, 576 bp, Enterobacter cloacae
atgaacgataactacccatatattgccaaatataaaatggactggtttttacatagcctgataaacaatcacctgaacaatgtcattgaacgctattcaaaggtgattggtatacgactggacttttcgtacaaccagaattcagaaagttacaacaaggattataattaccttcaacaggatctgcggaagctatttaaacgagttgaacaggagtctggtgttgccggattcttttgggtgattgaatatggcgaggacagtaaatttcattctcatactgtggtgtatctggatgggcaaaaaatacgcaaaacatttccgatagcagaacgcataggtgctttgtggaaggaaataactcagggagaaggtaaatatcatcgctgtgaatacaagggaagctataaggcagatatcaaccagatcatcagccaccgggatactgattatattcaagggttgagatatatcatcagctatcttgctaagcaggagcaaaagtatggtatgaacatttatgggagcagtgaagtaccgctacctagtggattaggtcgcccaagaaaatcttag

SEQ ID NO: 170925 - DNA, 1035 bp, Enterobacter cloacae
atgggtgtgattaaaaactatagacagattagagagtataaaaaatgtctcgatcatatcgttcatgaatggaataggactgtttcggataatgacatgaaacaactggtatctaggggtgactattataaattggtgagagctatagttgactcccttcctgacaaagaaaagataaaggaagccgaaactttattggctgcagtggttaataatgaattattaccagaagtgcattttcaatggttgcacgatagcgatcgcattgcgtgtttttccttgtattacatcatgtttcatccagcaaaaaacaaatccaatataacaagcaatggatgcgctatttctgacttttccaaaaaacctgccatgaaaaacgatgacatagatatgatcacgcgggatgattatgtggatgccattatgcagtatgtcgacgaaaccaaattacccttgacagataaagtaaaatatttatcagagatgcagcaatattggagaaaagagtacaacacccacccacaaccttttgactggctaaataaaaaaagtgaagaggatattcagtgggcatgggattacatggtcaaaaatctcgttcactttccactgcgtccgattaatagctaccagcgctggcaatttatagaagcagcattttatacattaccagagcgagaccttaccgaaatgatttcaatcataacccgaaacaaaaagagagtgagcaagaaagatcagcaggaaagtgatattcataacctaggtgttgtgggctttcagattgatagcgagagccttgattataaatcaaaattccttaaggaaatgagaaatgcctgggctcaaaaaaactggcgagaaagaaacagaactggtcagaaaaaggaaaaggttcctaagttggatggtgtaacattaaaaaagcttaatcaaatacaacaagaaacaggcgagggtataaacgacattatatccagattagtcgaggaggagctttcccattatgaaagaaaaaaattgtggtcacattag

SEQ ID NO: 170926 - DNA, 441 bp, Enterobacter cloacae
atgaaacgtaaaacactatctctgctgacggttcttaccgccagcctgtttctggccgcctgcgatgaccggagtgatgacctgaaggccctcagcaagttcaaggacctcacacctccacgcttcagtgaagtagtcagccgtcagaatgatgtcagggaagagtggtcgcagattgctctctcaggccccactctgcagatcttacgtacccgccagtcacccgatggttgcgagggtggtaattactactatctggtggatatggaggaaaaaaccgttcagccgctgatgaatgcgttgtgcatagccgacaacatcacgctgcaatatcacgaagagaccgatccacacacccaggagcgattccttgaatattcccatgacggcaagctgatgggacggctgctgataccatcaaaccctgataaccgggaataa

SEQ ID NO: 170927 - DNA, 468 bp, Enterobacter cloacae
atgaatactcgttcactcactcggtttgtgctggcaggcgcactgctcgccagctttaatgcctctgcggttcccgggctgtggcaacagggttacggccagggcaatacggaatacagcgtaaccgatgccagcgggaagagattcactatcaactgtacgggaaatccggaccagaatggtttctaccagcattctgcttttcttaccctggcggataacagaatggtcagttcgcacgatgacggtaccaccgtcaccgtggtgatgaatcatcagcagtacgttattccgtccagcctgggctggcgtaacggggataacgcctggtatgacttcatcagcgatatccgtaaggcccggcagttcgaagtctacgtcaatgaccgcaaagcgggcactttcagcactgacccgacgaacgccgcgaaggtcctgcccgctcccggagagtgtggtaacgactga

SEQ ID NO: 170928 - DNA, 1020 bp, Enterobacter cloacae
atgaataacactgatattaaagatattttaaattcacttttgaaggtttatcaatcaaatactttttctatgaattgtttcttaattacaagaaaggttaaaaaggactctgaaatatcctcgcaagaaagattcgaatttaatctgtataaggtcagtcttgataaggatatggtcaatttcttcaaaacaggaacatcagatacaattagtaaaatagtgaaaaataataatcttgaattttctaattactcagtaatttctgatgacggtatagatgctgtatacggatatgaggggatggaaaatcttgatttcaatcatgtattagatggagtcaatgcagacacaaagtttgaagttttaaaagatcttaaagaaataaaagatgacatcttggctttttgtttgaaagtaagcactcaggatgatagcttccttttatttaggaagttaactaaatcaaaggtagctactgatgcaccattaaataaaatgcaaagagtgcaggctttttttgatgtaaatctttctaaaatgaaagtagttcctatgcaaacggtaagctttgatagcaagatagatttctttttcataaataaaaaagtgtatattatttcaaagttaggatttgaacaaataattggaatcgagagggagttcatggagaatgctaaaagtgtacttcaagtattatctaatgcatgtgtaattgataatatgcaacttctcgagcaagttattttatctaataagtctcttcttcgaacggttgccaatatagcccaaaagaaaaaccatgaatctttagatactgctacaataagcaaatatcaagctacacttaaattatttgaagatgatatattagaggaaaaaaatggcaggctagtaataaataatgtagatgaagcaaagttgttaataaggttgttaaatgatttttataaacagggcgttgcctctggtaagtattatggaacaaatagcggccatataattgacaagaaagttaattaa

SEQ ID NO: 170929 - DNA, 624 bp, Enterobacter cloacae
atgtcatcgtcaagtgaagagctaaagattggggcgaggttgacgctattcttagtgtcttatatgcctttgtttttaataatgacagtaaatcaggtatacaaaaaaaaagatttcttgcattggggaggtatgaataaaaaggcactattattatttgttgaaaattttggtgctgttacagttattttgatgtttgttctttttggttttattggcctttattttttattgaataatattaattcgcgtattgataatgacggggtttttgtaaagatagtcgatatagaaaataaaaatagtgaatcgataagctacctttttacatatttactaccattccttttccaagacctttctgatctcaccagtgtcttttctttggcggttttattactggttacctttatcatttactcaaactcatcaatgattttaataaaccccaccttagctataaaatactccctttatagtattgaatatacaaaggagaacgggccgaaaaagaaagggatgataatttgcagaaataaatatttagatgaaggtgattgtataaaaattcaaaaaattggatataaacttttctatgctaaagctcaggagaaaaaacaatga

SEQ ID NO: 170930 - DNA, 753 bp, Enterobacter cloacae
atgagcgagcaatttgaattaatcccacgagttgaggaaggctctatcattcctcaacgtttaagtgatggctacattaatgcaactgccctttgccaatcagtaggtaaaacattctcccactacaaagcatcacggcaggcaatcgagtttattgaggaactcagtaagcaaagtggtttaacggaagctcaattgatccattcaattgtgggcgggaatgcgaagttacaggggacatgggttcaccctcaactagctattaatcttgcacaatggctttccgcaaagtttgctgtcaaagtatcacaatgggtgcatgaatggtctcagggccaagtaaagtttgcaacacctgtccacattaaacgctacatgcaaaataggcacaagatccctcatactcatttctcaatgttaaatgagatgacgttgagcttgattgctcctcttgaaacagcaggatatattttaccagaaaggatggttcctgatatttcggaaggacgaatgttttgttcgtgtttacggaaaaatcgcggggttgaaccaagtgattttcctagttatgaacatgaatatacagatggaagaaaagttcaagcaaggctgtatccagttgaactttatgcggattttcgtaggcacttccatgaagtatggctgccacaaaaagcaccagaatatttccaacaacgagatgcttcagcacttgaatttcttgaagtacttttacttcctgcacctaaataa

SEQ ID NO: 170931 - DNA, 135 bp, Enterobacter cloacae
gtgaaattgttatttcaggcgataaagtggatgtcgaagcatcgcaggctaaacaaaattctgctggtgctggtgctggtgctggtgctggtgctggtgctggtgctggtgctggtgatcatcacaatgcaatga

SEQ ID NO: 170932 - DNA, 555 bp, Enterobacter cloacae
atgctgccgttcctgctgctggcgctgctgctggcggcgctggtcagcctgatgcagcttggcctgtcaccgcatcttagccctctgctggagggcaacgcccgggaaatcagccatcatgttgcgcttctgctgagcctggccgcgctggccacgctcgcggcgcagtttctggtggtccgcccgcagcatttcactccggtgacgttgctctgcatcgcggcggtgttaatggttgcagggcttgggctgatgaccgtcgccggtttaacgctgttctacgtggggattgttatcacttcactcggggcggcgatggccacgccgggctaccagcttctgctgaacgacaggctgaccaccgggaaaggggcgggcgtcatcgccaccagccacacgttaggctacggcgtcagcgcgctgctggtgcctgtggtgacgcgcttttacggcgagcagtctttgacggtggccgcatggggaatggcagtgctgtttttagcgttgagcataggggtacggtcaaccgagcggaccccttccgaaaagccttaa

SEQ ID NO: 170933 - DNA, 228 bp, Enterobacter cloacae
atgatgtccaaagcaagaactaacctttctgatgattctttcatcgacatgctttacatgacaaatgactcaggctttacagcccgttacttctacaaactcataaataacggggaattccccgctccgataaagtttggcagaatgtctagatggttattgagggattattctgaatggaaaaccagacatattgagaaaagagatagcaaaatgcatttgaagtaa

SEQ ID NO: 170934 - DNA, 264 bp, Enterobacter cloacae
gtgagcggcggcggagagcagaccattaccctgaccttccagctgacgcgttcccccctgcgtagcgatgcttgccgtcaaacgcagctggccgtcctgctggctgtcgctgcggtaggattgcagcgcaaactgcggcgtggctaccaggccgtagcgggtgcggaacagctgccacagcgcattctgcgtcatctcttttccgtggcgatcggtttcctgctgcacgtgctggctgaaatcctgctgcagggcgcggggtaa

SEQ ID NO: 170935 - DNA, 1545 bp, Enterobacter cloacae
atgtgtaacacggataaacactggctgtatgttatgtacaccgatgagggcattttgatcttcggttgtttagtgcacggtgcagagccatgggcaactatacctaaagaagagcaattcgttgagctggaggttggggaaaacaaggtcaatatcttacaaaaaatccttaataccacgtcagccgtacaactgacagatatgttggaaagtgagtcagctctgaagcatgcacttccccacctcgtacaagacattgagttctcaagcatgtgtagccatttggcagatggttttgggcgtttgggaaaacctgttgtgacgtttgcagcaaaacaatttatctccatgccagatgagcagcttaaaagtttgctggagcacattgaaaaggatactggggtcagtttcagaaaaacaccctatcgattaggtacatttgaagtatttgatatacccgcaaatggggaaggtaatgaagtgatcagtctggagcttatcaccccgttgaccagaaaccagtccggtctttccgcgccaaagggattcagactagcaccaactattaacattgacgcccctctaagcgcgcacgtaattctcaatcactcgggcatgattgttcataacggccttcacatcattgagcccggaataaaccagacagttaatactgcgccttggtcaggttacgagatcagtgttttcgataatgatggtaagctcattcagtatacccagtcctcactcattcttcgtatcggcatcaatgctcagattcaagaaggcacaatccacattaatgacaagctcactcagtcttcagcaggactaggtaaacaaatacacagcagcgcatcttatattcgaccatcgacaacgatgcgctcactaaccggtgtgccggacagcctttttgaagctcatactaagaagactcgtgattacctaaataaaatttaccctctgcagggaagtgatcgctggttcaacaagggggtcgcctacgaagttaaggtagttgaacatttcagaaatatactcaatagtgcgcgagtaaaacacgctgttattgtcgaccctttcttcggagaggatgctctgactcgcatggttccacgtataaaaaatcccgaccttgcaatgacaattattacaagtctgtcgaggcagaatcctgataccgataagtttaattacgacattttaaatatgcgagctgctctcaatagcatgcgtttaggtatcgtggcagggattatgcgtggcttgtgtgttatcaacctggtcactggtagtactcaagcgttccatgaccgctatctaatgctggaactctacgaagggtgcagggagctatatctgctgtccaacagtttcaacaagatgtcaggtaactggccattctgtatgtcaaaacttgatgatgctgtctcactcgaagttggtcgttacattgatggccttattttgggtcaagatattactaaatcatctacccctgaaattacgctgaactggccgaaagatgaacaaactatttaa

SEQ ID NO: 170936 - DNA, 492 bp, Enterobacter cloacae
atggaaaaaaagaatcaatggaataccggctactggatcgttgccctcctgctgttgctgagtttgcagagctactggcagacggcgaaaaccgtcgagccggtgccctacagcgagttcgagaaggcgctggacgaggggcgtgtggccgaagtgctggtgtcggatcgtacggtgaccgggcgcctgaagtcgccggacagccggggcaagacgacgatcgtggcaacgagggtcgaacccgatcttgccgatcgcctgtcgaagtacgacgtaccctatgcccgcgtgttggagagcacctggctgagcgatgtgctgtcgtggatcctgccagcggtatccttctttggcgtctggttcttcctgttccgccgcttcgccgagaagcagggcatgggcgggtttctcaacatcggtaagagccgcgccaaggtgttcgtggaaaagaacaccggtgtgacgttcgccgatgtggcgggggggggatga

SEQ ID NO: 170937 - DNA, 186 bp, Enterobacter cloacae
atgcgcgagccgctggtcgcgccttatcttgagagcggcgagctggtgaagatatttgacttacccattgatgacgggcgcgactatcacctctgcgtgcgttcggattcagagatgaccgaggacggtaagctgctgcaaaactggctgcgtcgggcggcgagcggggagccgtcagccgggtaa

SEQ ID NO: 170938 - DNA, 390 bp, Enterobacter cloacae
atggatggtcacaccgcctcaataacccagctgacgctggctaaatttctggagggaggccattttggcgcctatgttcgtaagatgcggagtatttatgttgctcgtcgcgacacgctggcaagcatgatggacgaatatctctccgaatatgttacctgtgaaacgccagcggggggaatgcaaatgccttgtcacctgaagcacggcatatccgagaaagaaatagccaccgccgcccgccgcgcgggtgttgatatacttggccttaccgatttatatgcaggtccccccgcgtccaccggttttttgatgggatttgctgcttacacggaaatggaaatagaagacgctgtaaaaaaactggccgcaattttccgtcatgtttga

SEQ ID NO: 170939 - DNA, 162 bp, Enterobacter cloacae
atggaacacatttgggatagcccggataagggtgtttacaaagatgagttttccagtatccgctgcattcagaagagaacggcccatctgacgttcaagcgtctggagctaatagaaagaatgaatgacattattgcgaaacattatccgggatgctgttag

SEQ ID NO: 170940 - DNA, 252 bp, Enterobacter cloacae
atggcaacaatcgaacctgacacattgaccgatcatacggatgtgatttgttccaccagcattgaacgtatcgtcaaaagccgcaacactgcgctgagccagattgaagcgctgatccaccagcttgatagaatatcactgatgactttctctgttggcggcgggattaacttgcagaccaggagagaatgctgtttctgctttatgggagatctatctctgacaaccgtggcgatatatctatccgattga

SEQ ID NO: 170941 - DNA, 378 bp, Enterobacter cloacae
atgcaaaccttacccgattcaccagaatgggcggctcccgcctgcccgtcacctgttgttgtatggcggatgttactgtcacgcctgctgtcgcagcactatggcctgactctgaacgacactccatttagcgacgacaccattcaggagcacatcaatgccggtatatccctgtgtgatgccgtcaattttatcgtcgaaaagtacgaactggtgcgcaccgaccgccccggattcagtttcactgagcagtcagcgctcatcacccgtatcgatatcctccgcgcccgtaaagcctgtggcctgatgactcgcaatagttataaagcagtgaccaatatcacccatggcaagtactcacaggagcctggacgatga

SEQ ID NO: 170942 - DNA, 339 bp, Enterobacter cloacae
ttgtcgcaaacaacacgaacagaaaacgataacgtcacagagctttggtgggggctgaagcgcgatatcaccccgtgctttggcgcccgtctggttcaggagggcaaccgcctgcattacctggctgaccgcgccagtatcatcggtacattcagtgaagcggatttcccgctgctgctgaaacagttagaactaatgctgaccagcggggagcttaatccccgccattcgcactgcgtcacgctgtacgcgaaaggattaatctgcgacgccgacacgctggggagttgcggttatctgtatattgcgatttattccacccccacaacaaacgcataa

SEQ ID NO: 170943 - DNA, 141 bp, Enterobacter cloacae
atgaaaattatcagtaaacgccaggcgaattacgctggtcgtgaggtgcaggacatccgcggggggctggcggtatttgctgagtgtcgtcaggaccgccatggcccgtatgtggtcctgcggagcgtcacgttgaactga

SEQ ID NO: 170944 - DNA, 528 bp, Enterobacter cloacae
atgacgaacaccacattgttacccgcaccgtcacaacccgatatgttcccttcctttattcatcctcacccgccatcagtcctgtccccgtatgcacagcgaacgctgcggagtgctctgaacatcctggaacgccagctacgtgaacccggtgtggccttcacctccagcagtgcagtccgggactggctgcgcctgcagctggcaagggaagagcgagaagtgttcatagttctgttcctcgacaatcagaaccgcctcattactcacgaaacactgttcaccggcaccatcaaccacacagaggtgcatccccgtgaggtggtgaaggcagcgctgaaatataacgctgctgccgtcatccttgcccacaatcatccgtcagggcatgccgaacccagtgatgccgaccgccaagttacgacgcgcctgaaaaccgcactcacccttgttgatgtccgcctgcaggaccacctggtcattggtgggatgggtatcgtctcctttgccgaacgtggctggctgtag

SEQ ID NO: 170945 - DNA, 480 bp, Enterobacter cloacae
atgcataatgacacgacgttagaacgaaatgatcatctcaatcacagtcagaaagagtccaccgaagacaacttacttcatgccattgtagtgcctgatgaaatgcgcctcagcttctggccgcagcactttggcaccatcccgcagtggatattgctggagccccgtatcttcgcccggatggagcgcttctgcgacgactatcacggcggtatctggcagttttacacgctgagcaacggcggggccttaatggcacccgatgctgtcagtgacgaaaaatggatgctgttcaacagcatgaacggcaacagtgctgaaatgagcgctgaagctgctggtattgcggtctgtctcatcgaatacagccatcacgcctgtcgcaccgaatgtgatgccatgacagagcaatattaccgtctgcacgactacgcgctctgccacccggaatgtcatgcgattatgtgtatcattgattag

SEQ ID NO: 170946 - DNA, 927 bp, Enterobacter cloacae
atgggcaaaaagggtacttcaccgtcaacagcactcatgcaactcaatccagttaaatggctggcatcaagaaattttgatgctcgtgttgaagagattgtactgattcagggagggacggatacttcacctgctccctatggtgacgatgcgcctgaaccagaactgagagattttcagcagggcgatgatgccagacgtttcagtcagaattacttttcttggggttctgctatgtccggcgtttcaaggattcgaattttccgccatgatcgctctattcaggccttaaacagggattttgagttcgtcttttataatgcagaaaaagactttgccgccctagggttgattgaacagcgaagcggacagtggtatgcaaaacactcaggcagtctcttatccgatgtcaaaacagatattcagaacaccatcatgagtattaacctacaccagccgttatcgacaatgcctgcaggctggaggaaaactctaaagaattgctatgaaaaacattttggtcactctggcaaggctaaaaataatatttcgctatgtatgtatgctgcacctatcagagcaacaccctgtcaatttcatgtgaggaattacgcgaagaagccgactgttcggctggccacactctgtactggcgatattcatcttacttcatcagtgatttcagatatccaaaaccatctgggaacgcaacgctgggacagaattggcttggtgcaggttcctcaccatggctctcaacattcgtgggaaccaggtaatgcgggcttactggctcctgcgcaatttgtacattgcgcatcgggcacaaagcaccatccacatccactcgtgcaggcagatctcagcagttctgttgtgcataccgctgaccgtaagcgaagtttatatgttcgctacaagttttaa

SEQ ID NO: 170947 - DNA, 1173 bp, Enterobacter cloacae
atgtctttgtttgatgatattgtcacaagggatgttaattgtcgcaaatacgggcaattacaacagatgtacggtaccaccgatgtattaccgctgtggattgcagatatggattttgcgacaccagagccaatcatgagcacgctgcgttcggtggtgtcacagcctgtgcaaggctataacctggattatccacaatggaaagaatctgttattcattggtatgcacaacagtatgatgccgatatcaaggcacactggttacattttattcccggtgttataaaaaccatcgtactctctttaatggcgcttacccgtccaggcgataatattttaacctgtacgccaatctatgatccctatcctaatctggtaaacaccagcggtaggaatttgattcagacgcgcctcattgagaaaaacgggcactatgaatttgactggcatgatttcagcgagaaactcaagcagtgcaaaatgtttttgttcccttcaccgcataatccaggtggaatggtgtggtcgcgggaaacgttggaaaaaataagccactattgccagcaggcaggcgtcatcattctgtctgatgaagtgcatagtgatttaaccctgccaggaaagcgccatttgccgttttttactgttgatgaagcgccagatagtcggtcaatcgtgcttacttccatcagcaagaccttcaatacggcggcgatccagggcggaatcgccattattaagaatgatgaattacgccatcagttctaccactttctggataactgctaccttgccgagacgcattcattacagcaggcggccatttatagcgcttttacccattgcgccgactggcaccagaaattattggtctatctggccgacaatgtagcgtttgtaaaaagtgaaatcgaaaagtactgtcccttgatttccattgtgtatggcggcgcgtcgtatcttctgtttctgaatgcggaaaaaatggatctcagcgatgagcagctaagcgctttttttgtgcatgacgccaggcttggcctgtcacctggggcgcaatacggtcccggtggagaggggcacatgagactcaacgtgggctgcccccgcccggtactggtagaagcgatgaacaggctaaaagcggcataccagaaatggcagaacgcatag

SEQ ID NO: 170948 - DNA, 636 bp, Enterobacter cloacae
atgcaacatatcatcgagggcttcctcaacttccaaaaagagattttccctcaacgcaaggaactcttccgcagcctggcatccagccagaatcctaaggcacttttcatctcctgttccgatagccgcctggttccagaactcgttactcagcaagatccaggacagcttttcgttatccgcaacgccggtaatatcgtaccgtcatttggtccggaaccaggtggtgtatccgcaaccatcgaatacgcggttgtcgcacttggcgtaacggatatcgtcatctgcggtcactccaattgtggcgcgatgaaagccattgccgatagccagcccctggatccgatgcccgctgtcgctcactggctgcactatgccgatgccgcgaaagccgtggtcgataaaaaaacctgggataacccaatcgataaagttaacgccatggtggaagagaacgttatcgcacagcttaacaacattaaaacgcatccttgtgtcgcggttgggctgcgcaataatgcgcttcgtctgcacggttgggtgtatgacatcgaaagcggtgaaatccgtaccctggataaaaacagcaaaacctacgtttcccttgcagataacccgcaggtgcatttcgagtaa

SEQ ID NO: 170949 - DNA, 939 bp, Enterobacter cloacae
atgcaaacaaaaataaaaagaataatggataagttattttatcatgagtcgtgggacatcatgcttattaaggataatggtacacactcattccccgacaacactctggagatattaagcaaatccactgcgcagcagttaaaaaagaaatatacatttcaggccgatccttttctgattgaaaaagacgataaactgtatgttttctatgaagctcttagctttcgcaactcaaaaggcacgctacgatgtcgcgttctagaccgtgaactggttgaacttgaagatattaggcttgaaggctttgacgacttaaagtgtcatttgtcattcccttatctgatacatatcaacgatcaactcttcatgatccccgagtcttcagaaagaaaagaggtaatactgtttcagtcaattgagttccctgcacgctggaagcaagttaaagttttaatctctgataccgaattaactgacaacgtatttatctcagttaatgaaacctgttatctgttgtccaccacgatggataacgaaataattattcattccgcagatcatatttatggacaatggcagcggattaccccctcattaaaggtgagcaatcctcatcatcgaggtgcaggtgcctcctatcaggtcgaaaataaaatgtacttccttacacaggagtgcacacctgaaacttatggaaaatcaatctatatcaaagaattagtgacactaaacgacgctaattttgctgaaactctgatcgaacaaatcaattcgtcgatcaaccacagtgacggcgtccacacgctgaacttctcaaataactatattgtttatgatacaaaagttaataagttcagtctgttggcaatctttaaaaaaatagcatataaatgtatgataaaatacagaaacacttaccttacccggcaaaataactga

SEQ ID NO: 170950 - DNA, 1017 bp, Enterobacter cloacae
atggcaattcttgtcactggtggtgcaggttatattggttcacatactgtgttaacgctactggaaagaggcgatgatgtcgtagtcatcgataatctggcgaacgccagcagaatctcgctggacagggtcgcggaactcaccggaagagagcccactgtctatatcgccgatgttctcgacaggcaggcattaaaaaacattttcgccgaccataacatcaccgatgtcattcattttgcgggactcaaatcggtttcagagtcgataaaagagcccctcgcctactatgaaaacaacgtcaccggtacgctggttttgctggatgaaatgctggctgcaggcgttaatcgtttcatttttagctcatctgccacggtatatggtaatccagaaagcgtaccgctgagcgagcaatcacctacgggcggcaccactaatccgtacggcacctctaagttgatggtcgaacaaattctggccgatttctcacgtgcacaacccgattttcgcattacctgcctgcgctatttcaacccggttggcgcccatccatcgggtcggattggtgaagatcctaacggtatccctaataacctggttccgtatatctcccaggtcgcgattggtaagctggaaaccgtatcggtatacggtaatgattatccaacccctgatggtaccggtgtgcgtgattatattcacgtcatggatctggcgaccggtcatttagccgcgctggattgccagaacaaaggcgcggctcacaaagtgattaatctcggtactggagtcgggtattccgtacttgacctcattgaggcatttgaaaaagcggcacagacaaaaattaattatcagtttgtcgccagaagacccggagatattgccgaatgttggtctgacccatcgctggcatacaaagagctaggttggaaggccatctataaccttgatgaaatgatgcgtgacacctggaactggcaaaaaaataacccgaatgggtatcaaatttaa

SEQ ID NO: 170951 - DNA, 1392 bp, Enterobacter cloacae
atgaagcgtaaatgggtttgtgcgttgttgtgcatgtttttcccgctgacggttatggccgcattgacgaccgttacccccaaagcattgacgggcccgttaaccaatccggggattggcgtggcaagttttcatcagggatatggtgaaacgctggggctggcggactatcccaataccggatttgaatacgagcgtttttactggcgggatctggagccagtcgaaggccagtacaattttgcgttggtggatgatgccttcaaatacgcggcggcacatcgtcctgcgatgaatgtcgggctacgatttatggctctggcagagccggaaagcggttcgcaaatacctgactggctgattaaaaaaggtgtgaaaggaacctggacgccggataaaaagacatttgccccggatttagacgatcctctgtttattgaatacagccagcgtctgttgaacgcatttggtaaacgctacgatggtaatgagaatctcgcgtttgttgatattggcatggtgggatcgtggggagaatggcataacagcaacttcccgaacctgaagccattactggagcgatacaccacggcgcaactggatcgctacgtcgcgatgcacttttctgcttttccggtgacgccaaaaaccatgctgataagcggcggtcaaagtctggcgaatgcggtggcgcgtggggctgggtggcgtgcggactgttggggggacctgcgcgtattttcggacacctggaaccatatggctgatgattacccgcagcgattgctggctgcgcagcagagttattcagggttcaacgacgtctggaaacgtgcgccggtgagtctggagatctgctcgtatatgcaggactggaagaacacctttcactatacacgtgctgaagtgcaggggatttttgactgggcggtcaagcagcacgccagtaccattaacctgaaatcgagaacgatacccagcgactatcgaccgattgtcgacaatgcgctgaccaaattgggctatcgatttcgccttgcgtccctgagccatgagtccgtgtgggacagtggacaaacgctgacattaaacagtacttggtacaatgagggtatcgcaccgatttatctgccatacatgctggcattccgggtcgtagacagcgccaataaggtggtggcacaggggaattccgcggaggatattcgccgctggctccccggtaagtatcaggtcagttatgcgttatctatgccaggccgactggcgaaagggcaatacgcgattgaggttgcgatgctggataagtcgggtgcggcgagaattaactttgccaatgaagggaaacagagcagcggctggtaccgggtgtcaacaataacggtacgctag

SEQ ID NO: 170952 - DNA, 408 bp, Enterobacter cloacae
ttgaccagtcctcaaaatcgtcctcctgccatcgaacggttttacgctcaccttgatgagcggatagcggaggaattgacccctgaacaaaaagaaggggtggaaaaagcgctccttgctacaaccctgacttcgcggcatcagatcgatattcgcagaagctttccttttttcagtaagcgttattatctggtttttttgtttggcagagatttacgccgccagcatcgccaggaatcaaccctgtcgagaatgttgctcacttttttgctgctgattgccgtgctattcgtcacctgctgcatattgctgacgctgtatatgatcaaatccgcgttaggtattgatgtgttccaaaattttcacgtaggtatctgggactggtggttaagcctgaaagaccgctag

SEQ ID NO: 170953 - DNA, 1113 bp, Enterobacter cloacae
atgagtaaaaaaataacggtttttggaacgcgtggtattcccgatgtattgggcggtgtggagacacactgtcagaatctttatcctgccattaaacagcagttcgacgtggatatttgcgtgattgctcgctcgccatatgtaaattacaaacgatcggtatataagaaagtcgaaacctacgcgctgtgggcgcccaaaaagcgctcgctggaagcgattgtccattccgttttagcggcgtttaggacacgtatcgaccattcagatattgtgcatgtccatgctatcggccccggccttgtgatcccactcttacgcgtgatgggtaaaaaggtggtttttacccaccacgggcccgattacgatcgccagaaatgggggtttgtagccaaaaaaatattgttgctgggtgagcgttgggcggtgagatatgccaacgaggtgattgtgatttctgacgttattaatcaactgatccagaaaaaacacggtcgctatgatgcgcatttaattcacaatggcgtgaacgagccgaggttattatcacagcttaccatcgacaatacgctctcccgctttgggctgcagccgaaaaactacctcgtggtggttgggcggtttgtggaagaaaaagggatgcatgatgccatcgccgcttatcaacacagtggtttgaccatgccgttagtgttaattggcgatgcggatcatccgaccgaatacagcgtgcgcctcaaaaagcttgccgccgacacgccaggcgttgtgatgactggttttttacgtggtgacgaacttcaggcggtgttttcgcaggctaaattgtttgtgatgccctcataccatgaaggattgcctattgcgctgctggaggcaatgtcattttctcttccggccgtcgtcagtgatattccggctaaccttgaagttcaactgcccgccgaggactattttaaggtgggagatgtaaccggtctggctgaaaaattaggccaaggggcaacagcaaatagcgtggactatggtgtatatttgcaaaactacaattggcatgaaatcgccaaaaagacggttaacgtctaccactccattgataaagatataggttaa

SEQ ID NO: 170954 - DNA, 1212 bp, Enterobacter cloacae
atgaaagtattattggttaacaagttttttttcatcaaaggcggcgcggaaacggtttattttcaagagcgcgatatgctgaaacaggccggagtgcaggttattgatttctctatgcttcatgagaataatttcccctcggactatacggattatttcgtaagtaatgtggactaccacaaagcgagcaatctgctgggtggtatcaaaacggcggttaactttattcataattcgcaggcctgcaaaaaaatgctggcgttattagaaaaagagcgcccggatattgtccactttcacaacatctaccatcagttaacaccggcgttgattaaagttgcgcgcaattttggctgcaaaacggtgctgactgcgcatgactataagattgtgtgccccgcgtattctatgctgcgcgacggcaaggtgtgtgattcctgtattaccggaacggttttcaatgccttcaggtatcgttgtcaggaaggttcagcctcaaaaagtttactgctctccctggaggcaacctggcagtacattgcacaaaactatcaggcactggatgtgattgtttcaccaagcgtttttttacgcggtgttttgctgcgcacgctgccaaattcgcgcattgatgtcatcgtcaatggcgttgatgacagccgtcccctggccgaagtaagcgatgaaggctatatgctgtacttcggccgtctgagccgtgaaaagggcgtggcaacgttgttggcagcgcataaaaaaatgcagaacagcgcgccgctgaaagttgtggggcacggtccgttgcatgatgaattagccgccaaatatccggatgttgagtttttaggttatgtgcaacaaggggaagccctcgacaaccttattaagcatgcgcgagcggtgatcctgccttcagaatgctatgaaaactgttctatggcgatattagaggcgatgtccttaggcaaaccggttatcgggtcgcgcatcggcggtataccggaacaaattcgtgacggtgtcgaagggattttattcgaaccgggcaatgtgcaggagttagccaatgcgatggacgctctggccgactcgcctgagaaggcgaggaatatgggtttacatggtcgtgcgcggttgagtgaaaaatatgcgctgaataaacatatggataccctccaggcgctgtataaagaactgctgagcaggccatag

SEQ ID NO: 170955 - DNA, 990 bp, Enterobacter cloacae
atggaccaaaaaccgtttatttcagtgagtattaaaacactcaatgaatctaaatgtattgagaagacgattgacagtatccgtaagcagcttattgattatccacacaaaattattgtggcagatagtctgtcaacggataacacccaacagcttgcgatcgataaaggggtgaccgtagtgtccttaactgaccctggcgatcgctgctgtggcgtcgggcaccagttaggttatctgtatagtgaaggggaatatctgctgctgatggacggcgacatggagctggaggaggactttgtggatcaggccgtcgcgtttttgcaggccgaaccagaatatgcaggcgttgcgggaaccgttgaaatggacgatgccgtaaactatgaatttaaatcgcgtaagcaacgcattaataaaatctatccactcggggatagcgatcatctgggtggcggtgggctgtatcgtcggtcggcaattgaaaaaattggttatctgactaaccgtaatttgcacgcgtatgaagaggctgaactgggcctgcgtttaatcgaagcaggctataaactgcggcgtctggatattccttacttcagccatacgtcacatacgctgccgacgtttaagatgctggcgcggcgctggaccagtggttattaccaggcgccaggtgagcttttgcgttgtagttgggggaaaccctggttttcccagtcattcaacatcgtgaagaatgaggcggtatttgcgctctaccttattctcttatttgtgacgctgctcagtttaaatatcaatgtgtttgccgttgcgcttctaccattactggcgtttgctttgttgaagattgtgcaaaaccgctcgttaacagatgggctgcaaagcgttattaatttaatcgtacgctcagcggggctgatcaaaggtattttttatccggtacgcgatccgctgactccgcctaacagtaaaatcattcatgaataa

SEQ ID NO: 170956 - DNA, 1371 bp, Enterobacter cloacae
atgacgctgaataccggatactatttacaggtttatacctttgtcacgctgatcctgtgtggcctggtgcaatactttaccggcatgcagtcagtgctgtggataccttttttcctgaccctgttgatggtgggattattggtgatgcagacgcgtgatggctccttacatctggatgcccaggagacgattgtcctggcgttgtacttttcgtttctggtgctggctggagcatcgacgctgattcagggcgggatcaccgtcgcgattgtggcatttaaaaatgaaattgcgctgtcgctggtgatgatctgtttgctgctgggcttttgcagggaatcacagatttaccgcgcaacgcgctatctgtattgggtgttttacgcgcagattccggtaatgatttatcaggttttactggttgttccccagcgcgttgcggtgcgcggcgaagatgagaaatgggactccgtggttggcacgtttggcggtgacccaatgggaggcgggaatactgccgcaatgggcctgttttgcctgttaattatgttgttaaaagtctcagaatataagcatggactcaccacgttcaaatccatggcgctgcatattgttctcggtatcgggttatgcatcattggtgaagtgaagtttgtcatcctgctatcgcctatattcctggcgtgggtgtggctttcaccgagctacgtcaaagacgttagtaaggtcaatctgaagacgttgttggttattgtggcgggaatgctgttgcttattagcctgtcgattgtgatcctcgcgtactattattctacagcgttcggtggcgatccatcgaaaagctcgttaagtatttttatcgactccttaagctatatctttgatccgaactacattatgtctaccggtgaattagggcgctttacgacgttcctgttctggttgaaaaataacgatctgtgggggctttcaggaacgttatttggctacggactcaatgccactaacagtggtagtacggtgtcgccgggctttttgaatattatctacaacttaattctcgactcgacttccctgagtatgctgctgtgggaagttggggtgatcggcacgttgctctttattagcttattcatttatatcctgaaagtttgtcagccaaagccattactgacgcttgaacaactggaccagcaggatctccagttattgagctttgcaccggcgtttaacgcttttgctatcagttgcttaattagcttaccttacagccagatactgatgattacaccgatgttacaattcctgttctatttatcactaggatcaagtttagtgattcgtcgaaccgtccttcgctgcgtagggtaa

SEQ ID NO: 170957 - DNA, 1212 bp, Enterobacter cloacae
atgagtctactgaagagcgcttccacgatagccggttcatcagtcatctcgcagttgattggtgcactgtctatttggttgatttcacacaagtacgatatggctgaagtggggctttatgcgctcaactacagcatcgccgtggtgggcgctcaggtgtgtacctttgcatcacagctgttaattcctaaacagcaggatgatgaactggtgcagaatgtcgtgttttgcctaatacaaagcacgatcattgccttaccttacgccgtactcaccgcgtggctgtttcaccagaacatcctgttcctctatttactgacgctggcaacggcgtgggttttaatctcggaaaacctgtcgctacgcacggctaactttcgttttctgatcttccagcgtatttctgtttctgtggtcgttgtactttccgtccttcttacgcaccatgtacaactattttattggtcgtgggcctgcgtgacgatggtgctgaccataagctgtattttgcattcgtttgatattcgttcggtggcggccagacatctgcgacccgccagtaattggcattttttcaaacagaatattcatcacattaccaaagtgggcagcgcggaagtgttggcgatggccagcagcaatttgcctattatgctgattaacttttggttctcggcgctgacggcgggttatttttccgtggttagccgcttttgcctggctccggtggtgatcatcgggaatgcggtgcgtaatactattttttccaagtggtctatcgacttcagaaataatacctttaactatcaggagtataccaaggtacgtatgctattgttggtactgggggttatctgtactcttggcgtgtttattttctacccgattgtgatgcgccttggttttagcgaagactggataaactccattgagacatcacgctacatgttgccctatttattcccggcgctggcgataagccctctgacggtgatagagcttatttttggttcccatcgctattttctgcgtatccaactggaacagctggcgattgtactcttcgcttttgttgtgacgccctatttttataaagattatgcaacgtcggtcatcttgttttcttcactgacatttattcgctacgccttcatttatctgaaaatgaataagcgagccaatctcctgaaagacaagccggtgatactatga

SEQ ID NO: 170958 - DNA, 2130 bp, Enterobacter cloacae
atgaaactatcaatagtggaaaacggcaaaaaacgagaaagcagtgtcgaattctcccgctttgccaaagagctgaaaaagaacgcctggaaaatcgcgctggccggtatcgttgccggggtcgtcgcgtatccgttaatcagcatgatgtcctcaaagtatgtttcaacggcgacggtgctgattaaggcgcaggctgataacgtttctccgtttccacaggttgatggtttcgattcaacacgcagtggttactacgaaacacaatatgcgttgatgcattcacgtattgtgctggagcaagccgtacgtgatatgaagctggatgaaaacccggagtttaccggggaaaaagccggtgctcagggggctgatagcaatgaaagtcggcaactgagaatggagcaagcgctgaaaacgttatcgaaaaacctgaatgtcatcggtattcgcacgacgaacctggcgtccattacctatgaatcaacttcgcctcaggttgcggctgatattgccaacggcgtcgcgcaggctttcatcaactatacggtggagcagaaacgtctgaaggtggagaaagctcgcgaactgaattttgaaaaaatggaagagattcagaagtcgatagctaagcaaaaagacgagatggacagctatctgaaaaatgccggtctgctgaccttccgcggtatcgatggttttgaaaccgagcagttaagtatcgtaactaatcgcctggccgatgcgacccagcgtcgggttgccgctgaatccgtctataacgaggtgaacgggggaggtaagtccattgagagcgttatctcgctgccttcggtctctaaccacgctcagatccaggatttgcgcattgcgttgattcaggcgcaacgaacgttgtccgaacagcgtaaagtctatgggccaaaaaatcccgccattttaaaagccgaggccgatgttcagtcgatccaaagccagaccggacgagtgttgggcgagctgaaagtcggtttacgtcagcaatatctggcggcgctggcggacgaaaaaaactatcaacagcaagtgattgagcagaaagagatcttccagaaaatggcgtcaaaacgggatgcctggaacagtcaaaagctgtcgttagataaaatggaagacctgtataaatcgctttatcaacgtactcaggagctgtcgctgtccggcgtgaatgccgatgcggtgttatacgaccctgcggttcccgcgttaaaaccggcgaaaccgaataaatctttattgttgctgatggtggtcatgctggtggtggtgttcagcatcatgtatttcattgtcaaagcggcaatggataactcaatcggtaccctcagtcgcatgaaaaaacggctcaatgttgttccgctgggtgaaattcgtcgttttagcggaacctcagggcgcgcacaggtgcgggacatgatcatgaagaacccgcttaatgccgatattgtgcacggtatccgtacccggattatgctggatagtcgacctttacagacgctcgccgtggcgtcgacggagcacggcgatgggcgttctttgttggcgaatctgttagcgaactcttttagtttcgaccagaaaacactgcttattgatgcagatttctttaacagtggtgggctcacatccgagctggcgtcagctacatccgcaggcttagcggaactgctgcgcggggagacagagcttgaacaggcgaggatcaaactcagtgataatctcgactttattccacacggcaagaacaccatctcatctttactgatgctgtcgtcggagcatgttgaactcttaatgcgcgagttgaaatcgcattatcagcgcatcattattgatgttgctgctgtgaatcagagccaggatgttcaactgatcaaacgtgccgtcgatggcgttgttttcattgtgaaagccggggcggggtcggcgggacaaatcgccaacgcgctggataagatcgaggaaaataacggcgtggtgattggtgcggtgctcaatgcagttgaagaaaaggatcttgagacgcaagagggtctgcgttcactgaacttcagtaccgatcaactgatggcaacgccaggccgcgtatga

SEQ ID NO: 170959 - DNA, 558 bp, Enterobacter cloacae
atgaaaataatagaactgtgcgcggttttgctattcagtatcctgttggtcggatgcacagcgtccagcccgcgattaatggacgatcctgctactgttcagcaggattaccggcttggggcgggggatacggtcaatatcgctgttcatggtcaacccgatatgacgatgcggtttattttggataagagcggggaaattaatttcccgtttgttggtgctcttaaattacaagataaaacagttgatcaagtgactaaagaattaactcaacgcctgaccggagattattttacatctccaatggtgacggtgagtattgccgagttccgcaaatactatgtttcaggtgaggtaaaaagtccaaatggcttcgcctatgagccagggcttaccgtcgagaaatctattgcgcaggcgggtggatttacagatcgtgctgaccgaaaagatatcaacattcgcctgtcagggagcaatcagctgcttgagaatgtcgatttaacgcactctgttcatcctggggatgtcgtgattattggcatggggttcttctga

SEQ ID NO: 170960 - DNA, 1287 bp, Enterobacter cloacae
atgcatactaaattactcgttattaccggaatcgtgatatcgcagtccgcatgggctgatttaacaccgaaatcacacattggctttgcggggatagacttccagggcaaggtcgctgtggactatggttataatgataacgtgtcttatcagccacatagcagcgatgctatcggttcatcgtttcagagtgcggcgcccgttctgagcatgattggagagcgtggtcaggataagtatttgctgatgtactctggggattatcgtaattactcaagcgattctgctgataactacaacgatcattttttccgttttaacggtgcctggcgttatggactcaagcatggcttaaccctcaatctggaggattcgcttgggcatgaatcccgcggtcgtgacatcaccgaggggtttctaccgagtcagtttgagcagtatgggattaaatctccgctgacgacgaattttatcaatagcgaattgcgctacagctacggtgcgcctgatggtcgcggcaaagcggaactggcgttgttatacaaaaaactgactttcggtaacacctctgatgttcgggacagcagtgaggacttctacaattatattcaggaacaggaatggcatgaaaatagcctgatagcggaagtttttgaccaatactcatccagaacgcgctttcgctatagctttattactaaccagcgtcgctatgataacaactcagataaagacactaatgagtattatttactgtatggcctgaagtcgcagttgacggggaaaaccaatgtcgacatgaatatttcatggctgtataaaacatttgaaaacaacgcaaactcgcatgattttaatggtctaaactgggacataaaagcggagtggaagccgttacagcagtctgttttcacggcccactctgcgcaaagcattaaagacccatcggaagttgggggatatattttagtgacccagtatggcctttcttaccagcatttctggttaggcactcgtttttctactttattggactactcattcacttcggaagactataaaaaacagaacaaggatcgacatgataaagatggcgtgtttagtgtcaccatgagctatgactacacgccgtcggttaattttgagattaaatatcagatagatacattaaattcgaataaggatactgactcgttttatatcggtcccaacgacaatcaggaagtcattagaacgttgggttatgataattctatgattatgcttaaagctaaggttcagatctaa

SEQ ID NO: 170961 - DNA, 1416 bp, Enterobacter cloacae
atgcttaaaaaatcgctaaagattagcagccaaggatatccagtctttttaaaactggtcgatttcattgttatcaatgtgacgttaatttttagtgcccatctgctgggtttggtgccctttaacaccattgccattttgagtcttctcttctcaatctttttcttgctgtttgctgaatacattaaaatgtaccagcaaaagattaagacgatcggtttacgtaatcaaaagcgcttggttttttgtacgctgctggcgattttttttaacgaactggtcagtatgacggtggctgaacctgagtcactgggctacttagacagactgccttcccctttttattcagccattatttactggtacttcattccattaccttttctttactacattcgtttttttatttttaagtattcaacgaaaaagagtatccgtgtggcgattattggtctgaccgacaatggtctggccgcagaaaccgcgctaatgaatgaatacgccaatatcacattagatctggccttttatgatgagcgcgccttatctcgctgtggcgatgtcgttgataaggttaaaagcccctttcgtggtccggtgatcaatctggtcgaggaagccaagaagggaaacatagacgaaatctatattgctttaccgatggttgctttacatcgtattcgtcactttttggccatgatgtcagacaccaccgtagatacctatattgtccctgacttttatacctacagtaacaacatgtccaagttacgctccatccacaatctgcaaactatcggtatctttagttcaccttttgagggggcgggctcgtttattaagcgggcggaagatttggttcttggcagcatcattatggtgatgatttcctccctgatgctggcgattgccattggtatcaaactcacgtcccgtgggccggtttttttcaaacaggaccgctatggcttgagtgggcaaaaaattaaggtctggaagtttcgttctatgcgcgtcatggagaattccgatacggttattcaggccactaaaaacgatccgcgggtaaccaaattcgggagctttttgcgccgcacttcgctggatgaacttccgcaatttattaacgttttgcagggaagtatgtcgattgtcggtcccagacctcatgcggttacgcataatgagcagtaccgaaaacaggtcgaaaattacatgattcgccataaagttaagccagggatcactgggcttgcgcagatcaacgggttccgcggggagatcgatgcgctttataagatggaaaaaagggttcagtacgatattgagtacattcaaaactggtcgttatggctggatataaaaattattattaaaactattttcaaaggatttgtcggtaagaatgcatactaa

SEQ ID NO: 170962 - DNA, 255 bp, Enterobacter cloacae
ttgatcccaacccgttttacgtttttccgtaataacagaagcggcatttccaatattttccagcagcacattaagatgggcgtcagaaaacgtttccccgtaaacaagattaatgagttctttaatttttggattcatttcattttccatggtagcggtcccacggagtggcaatctactcccatgaaaaatatctgtcaacggaccagaaaggagaaaaaggtgattgcaaagcagctcagcgcaatattgtga

SEQ ID NO: 170963 - DNA, 555 bp, Enterobacter cloacae
atgtttcaacaacccacggttttaccctcatctgaattatcagcaggaattagtgcaatgatgatgatcattgcagaagccgaagcagcgtttggacggcgcgatgggcaatacgctattaaccaaagcattgcttatggtgatcattcgcctcgagccacgggtatggagataaacggaaaaaaaatctgcttcatatgcctaagcagtgattcaatgatcgggtggccatgctttatgttcgaaatggcacacgaagcggttcacgcactgaatcctcgtaatggacctgcctcttatctcgaagaaggtatcgctgtgtggttttcacaagaaatgtgcaaaaagcatggatacaaatataacgcagcaacaggtaagtataaaaaggcacttgaattgattaaaaaaattccggaagagccgacagaagcggtcaagatagtaagatcaaggcatgccaatctgacagacataactcctgctgaactgattgagtgctttccgacaattgatcccttagttgcacagaggctggcaaacaaaatggcataa

SEQ ID NO: 170964 - DNA, 132 bp, Enterobacter cloacae
atgcatgccactatcctgcaaataaatagttttagaaaaaccctgcttagccatttcttcatgcagatcgtcgtaatcacttccttctgcattatgcaactctacgcgcactgtgtaacgggtcatatttga

SEQ ID NO: 170965 - DNA, 240 bp, Enterobacter cloacae
atgaatactgaattaggcgatgttttgatgtcacttcaaaacaagaataaaaccctggaaatacagcagattgttcaaagtttgataatcaaaatgttgcttgcaaaatcctcaatggaagatcaaaaagcgattataaacatagttaaaagctcgcttcaaaattctcatagcgatccagaaatgggaattaaagagatcgcggtagcgtatcttgaagagactttcgaaattcgctaa

SEQ ID NO: 170966 - DNA, 264 bp, Enterobacter cloacae
atgaaaatcgatacgcaaaaattaaaaactattttaaaagaattggctgatgtctatccgtactacctaggaccacacaaatttatggaaatcggtgatgatgtcggcggcgaggctgaattcgatggacatcttctatatttggcggaaaaaggattaattattactgatatggtatgggacgcaaaccaaaaagcctatcagttatcagcaggaaaaacgcgcatttcaagcgcaggtcttgactatctcgctgggcagtaa

SEQ ID NO: 170967 - DNA, 537 bp, Enterobacter cloacae
atgctgggggatagaccagtgaaacttaatcttttccctgtctcgattgtcgtcattgctggcctgtcagtcgcactcgttaagagttgctcaaacgccagtagccttcagagcgataacgacgttctgcgaagtgacaacgctttgcaggagcaggtgattgccacacaggcattcaatttcaatcgattcaatcaggttgcagaacaagccaacaggcttaactccctgatcgacaccagcaccgaagaaaccgtaatcgaataccgggagattctccaccgtgaaaaaacctgtgatctgcctgttcctgctgacattgctggcgggttgctcgaatacgcataccgtttacgttccagcgcaatgcacgccgattccgacggatctgacgcagcctttgatcgtaccgctgccgccagctcaataacatactgccaggctgtgctctggattaagccgctgctggctgtgattgagaagggtaacaataacctggctggtataaggcagatagagcgggaaaggaaaaactag

SEQ ID NO: 170968 - DNA, 420 bp, Enterobacter cloacae
atgaaaaaaattacactttgttttgcgtttctggtgtgtggctgctcgtcatcagcctatgacagtggctggaatagtgataagagttccaatacattcagcgagtgcgctaagacgtcattttctaaaggtttttattttcctgaaaatgctgaccgtttggttagcatgggccttcttacaaaagaagaggccgcgaaagcaaaattgcatagtgtttcagttggcgataaggagtgtgttgcttatgcggcttacggctttactgtcagtcaatatcagttttctacaaacacgaaaaagcaattgatcagtcggagtgtcacatacacgtgtgataagtctttcgttgaatgcccggggaaaaaaatcaccatcgcggatgggcgagttgtaggtattgaaagtattaaaaaataa

SEQ ID NO: 170969 - DNA, 369 bp, Enterobacter cloacae
atgatgggatatgcgattggcagcttcttcggaatgatgatgatctcaaccgcctatgcattcatatacacaaggattggcaaagctttatctcagaagatatctcaagcttgggctcatagaccagcaagatttctcatcctcctgattttcgccgcccagggaatagtttgtttaggaatgcacctcatcagcttgtatcttctctaccttggagccacatttgaaccatatattggttcctatgggtatgaatacactggagaagataacatatcgacagcatgggttttcttcggtgcggccatggcaacatgcttgcttgcagacattctcaaaggcatcttcgtcttaacgttcgctgactaa

SEQ ID NO: 170970 - DNA, 300 bp, Enterobacter cloacae
atgacattttatgaagtgatagatctgctcgaaaaacaacatgggcatactgagctgtggttttactcaggtacgggcgaaacagaacctgacttgattgccaataatatcgcgaactggaaatggccaaaaattctaaagcgcaacggacgggcagtcgctgagttcacaggaaaaggcaaagattgggaattcatgggggactataaaacccctgataacgatccctgcagtcctccgtggggagcatgccgcctcgacgatgaattcatctccctttgcaatttttttaattactga

SEQ ID NO: 170971 - DNA, 705 bp, Enterobacter cloacae
atgccagacaacatgatcgaggggctggcgaacgctgccgcacatccggtgaccgtccaggtcattaatcaggggcctggaatctggggaaacgtggccacgggattcatcaccgccggggcagctattgtagcggttatgctgacgcaccggtacacgcacaggcgtgagaaacaggctgcagtgcaacaactgaaacgggagcagctctttatcgcaacagagctgatttttctgctggagcaatatgcggagaattgtgcccgggtcgccgccgatgatggagaaatggtttctgtcgacggaagacaggcggagcgggcacccgttgccggtcatcctgccccgctggattttgacaaagtggccggggactggagcagcctgccggcacggcggatgtatcgaatccgggaactgccattacgccaggccggggccatgagcgctatcgagcatgcctgggataatgacatgccgggtgattaccccttatttttcaggcagcgtcagtatgagtttgccagactggggatcacagctatttccgaggcccggcaactgcggaaactctcaggtctgccggccgatcgtctcaataaatcggaatggtcggctctgcctgtaataatggacatattgaaacgggaaaggcagcagcggatcagtgagcaccttacctgcgctgcggctgaacagccctga

SEQ ID NO: 170972 - DNA, 288 bp, Enterobacter cloacae
atgcactatgacgaactaatcgctgaactcatcgctgacggccatcaacagttattgctttgccttaacaaaagaagaaccgatgacgacagtgaatttctgctcgaatatctcctctttactcccggtggagatctcgtggcaaggaaaattgatgaggacggccatagttggttattggtctactggaccggaagcccatcctcattgcctttatccaacgtaatttttaatcttaatctgaacaaaagaaacgaggtcagcgccttattgtccgtgtttcattaa

SEQ ID NO: 170973 - DNA, 399 bp, Enterobacter cloacae
atgaacacaaccgatgatgaaccacagacaggaacggacgagatggccaccgccttatgcaccatgcgcaagtatggcatgaagctcatcacggccacccagcatatggatattaatacttacgtgaaatccgatccgcggatgccgagaacgcggctgcgccgctacctgggccagtacggcctgcgcggtgaggcgctgagcagggaggtcagacgtatcgttgccggaccagagcgacgcgacagcacgctgcaggaagggatttactatacgtggccctatggctgggagcctgcggatttcacgccgatgatgcgacgtatctttcgcggaaagcgtacccatcacctgatgatgtttgatgaactgcctcagttgtttggcaaattaggataa

SEQ ID NO: 170974 - DNA, 201 bp, Enterobacter cloacae
atgaaacgcttgcttgtgctgacgctgacagtaatgccagtcctgacgactcacgccggacaaataaccctgattctcagtgacgaacaggagacagacaacgcgaagatttgcatctacagcaatgctatctatacagaaacagtggcgatcaggccgactgcacaatgcaaacacacccagacgtttgtagaggattaa

SEQ ID NO: 170975 - DNA, 591 bp, Enterobacter cloacae
atggtggaagcacaagtgaaattcgttgtggttggtcaccattctcggcataagcaggcgttgcgcctggctgaatgcctcggtgccacgttacttattgatagcggcgaacacggcgcgaactggaatcatcgccgcgcgcttgaatgggccgccagccaatcatgtcgtgttgtagtgcttgaagatgatgctctacccgttcctgggtttactgaccgggtgattgactggctgacccgcttccctgacgacatgctgagcttttatctcggtaccggccgaccgcctcagtaccagaaagagatagccggaatgctggtggatgcagacagagtgagcgctgatcaccttgtcctgagcaaactgattcacggcgtatgttacagccctcctcagggcaggctgacgcgcatgcttaacgcatggaataaaacgctggcagcagattacgccgtcggtgaggcgttcggtggccgggttatttatccgtgctactcgctggtggatcacgccgatatgccgacggtcgagcgtcaccctgacaacgagccgaggacagaacgccgccgcgcttggagactggcatga

SEQ ID NO: 170976 - DNA, 342 bp, Enterobacter cloacae
atgaacaaagagccccgcgtatatggcagccgatgggataaggcccgtctccgtttcctgcagcagcacccactatgtgtgatgtgcgagcagcaggggcgcataacaccagcaacggtggttgaccatatcgaaccccacaaactcaaagatgcgattaagtctggtaacccgctggtcatctcgaaagcacagctcctgttctggagtaaagagaactggcagccactgtgcaaagcacatcacgattcaacgaagcagagaatggagaagagcggcaccgtcatcggctgtgatgccaacggctacccactcgatcccacgtctcactggagcacgtaa

SEQ ID NO: 170977 - DNA, 204 bp, Enterobacter cloacae
atgaaagacctcagtattgaataccgcggcggtaagtttgttcagctggtgatcgatggcgtggtgatgaagggcgtgacctcgattgagttctcccattcagtcggccaggacgtaccaacgttgagtgtatccggtcacttatggcctgaccctgagaagaccgctccagtcctccagcaggtagataaagactcggcttag

SEQ ID NO: 170978 - DNA, 258 bp, Enterobacter cloacae
atgatgatctcatatcaggaacttgttcgcaccttccttagtaacgagtattttattgaggtggagatagcgagttttaacaccggcttttcccgttacttcaacaaaatatcccatggtactgttgtattcggcccgggtgatttttccgtcgatgacgctgactattttcgtgttcatgggcatggaataatcaatgccattatggggactcacttttcccgataccgggttaagtcttgcaggattgaaaggtga

SEQ ID NO: 170979 - DNA, 339 bp, Enterobacter cloacae
atgttcaccaagacgtctggcgatttcttttgcagcttcacggcctacatcgtcgttgtccaggcacagccagatttcctggaagcgatcgaggttgtgatactcgtattcaatccactgctgtttggcacccttaccgccgccaaagggaacagacagggcatcataaccgagctgcgtgaaggtcatgcagtcaatctcaccctcgcacagcactaccagacgggtgtttttatccagcgcctgccagccaaacagacatggttcacaatcagcttcagccatgatcagctttttgccgtttggcctttcggtaccaatacgttttacctgcagtag

SEQ ID NO: 170980 - DNA, 213 bp, Enterobacter cloacae
atgaacaaccttagaaaattaagacagtcgcttcatcttacccagaaggggttggctgatgaaattggtcaaacgattagttctattggtcattacgaaactggtaggcgaactcctgatattaaaacatgccatcagttggtagaggcattaagcaaaaatgggaaaaaattgtccattgaagatatttttcctccagcctcggggggatga

SEQ ID NO: 170981 - DNA, 213 bp, Enterobacter cloacae
atgaatatagaaacgcttatatcagaaaacggtaagatccatcaattagccatggatattgatcgtgtcataaacacactcgaatacgcagaatcagatcctgatgttgcttacaagcctgcagcactcattaaaatttgcataaatcaacttaaacaaaacctctccacgttaaacaatgatattgggtatgactggccggagaacaaataa

SEQ ID NO: 170982 - DNA, 513 bp, Enterobacter cloacae
gtgcgcggcgcgaaattccggcgtggcttcgcgatactccgcctcgcagtaaatgtcatcgatctgctgctgaagctcgtattcgtcatcatgggtttcagtagcttccatttgttcttccagctcactgacacgcttctgttcttcttccgtcaggacagctttcggcatggcaaaacggtacagttcaccgtcctcaccgctggcgcgcagttccgtcatgcggaactcagcccagccccagccctgctcctgcttaacgcgagcggcgagcacggtaagcttgccagccagcagggatctcaccagcgccgcatcagcaaaggtactgtccctgtcgctgaacagatcggcggtcagcgtaccgccagcggcggtataggcgtcctcgcccacatactcaaacatcgggtggctgatggccatcttgtcgtcagtcaccattttgcgaagtgtatggggcattggcatactgccgttccactgtgccttcgcttcttcccagacctgtag

SEQ ID NO: 170983 - DNA, 480 bp, Enterobacter cloacae
atgagtgtcggcaagggtcatcacttcacaatgctcaagggtgatttcatcccgcgccagcgcatccagcagggcgggggcaagattcgccagtttcaggcagcgctgaacgtggcgcgggtgatagcccatcagtgcgccgatctgagaagccgttttaccttcctgctgaagggtacgaaaaccgataatctgctcggcgggatgcatgtttttacgtcgaccgttctcgatcatcgaggccgccacagccatctccacgggcaggactttcaccggaacaaacggcgtgtctgcatcgagcacaccgcgcatcaccagaattcctgtgcctctgcggcgaccttccccgccgacaataccgatcgtaccgtccggcagttctgcaccgatcaggttttgcaggatgcccattgcctgaatgctgtctgccatctcttccacttcctgatcggtatgcggaatgatgcgcgtgtttaa

SEQ ID NO: 170984 - DNA, 366 bp, Enterobacter cloacae
atgcagaaccttaacacccgtccggcgacccgtaaggtcgggcagagcaccgaaatcgtgaagctgctgcgcattcaggccagcgacacccacgtggtcgagtttgacaacgtggacacccgatttaatgactgcaacaactggcaggtgatggcaggaggcaaacgtgtcctgttcagcaaccgcatgtatgagcgtttttcagatgtgaaatcggggatcgtggcaacgatcaacgtgtgtgaaaacagcgacagcgtaacggataaagcgatgctggaaggggcaaaagtcatgatgcaggttcttgatggctatccgtcctttgcagcactggcagcacaccccaaacgcattactgattaa

SEQ ID NO: 170985 - DNA, 273 bp, Enterobacter cloacae
atgcacacacgaaacgtcaacgtcaaaaccgccgctcaagaatcttccaggaagataggggaagaacaaaaccctgtttctgtcgcacgggagtgggtggctcaggccacttcgctgaaagatggtgtcaccgtcaccctgtccgatgtgtcccgatacggagacgttcaggtggagatcagaacctacggaactcttaactggcgcgcctggtcatttgacccggattttcttttggaactgaaacgcaatctgcaatacgtgcagatgtaa

SEQ ID NO: 170986 - DNA, 273 bp, Enterobacter cloacae
atgcacacacgaaacgtcaacgtcaaaaccgccgctcaagaatcttccaggaagatgggggaagaacaaaaccctgtttctgtcgcacgggagtgggtggctcaggccacttcgctgaaggcgggggtcaccgtcaccctgtccgatgtgtcccgatacggcgacgtgcaggtggagatccgcaccaacggaacgcttaactggcgcgcctggccgtttgaaccggattttctttttgaactgaaacgcaacctgcaatacgtgcagttttaa

SEQ ID NO: 170987 - DNA, 732 bp, Enterobacter cloacae
atgatcccgtcctcacacgcgctcgtttccctgaagcccgcccgtcaggcagcaatacaggctatcagccatgttgagtctgcccgcgaacgcggcgcacgactgcccgccatgccgtatgtgcgtacctttctgcgccttcttacgggcagcggtcgcatcaacgccacagtggccaataaaatacctggcctgcactgggtaccaaacaaccgccattcgaacctgaaacaggtcgaggaggcactcaacaccatgatcgccaccggaggggaagcctgcccgctgccgctcacgattgacgttcaggccgagctattccctgaagtcatgcacacccgcacgggtcgacggctacacagatccagcattaagaccacgcgtcagcttcgccgccagtcccgtgagtacgaacagcgctggaaactgcgcctgaacctgctggaacaggcaaaagtcgatctgaattttcagtcaccggaaaccgtctgcacctggtatacccggtggagcgacgagtttgacgcggcagagctggccacaccgttctggaactggcagacgcggttcgcgtcgttgaaggaacttgactggcttcgcatgagcggcgacccgctgtactcagtcatgtaccaaatcccgtttattgtccgggaaacacctgagcacatccgggtcgctgaacgctggcagataccgaacaagctgcgttatcagcagggggcagaatga

SEQ ID NO: 170988 - DNA, 966 bp, Enterobacter cloacae
atggcgcgcattagaacaattaaacccgaattcttcctgcatgatgagttattcgaacttgagaaagaaacagggttgccagttcgcctgacctttataggtctttggactcaatgcgaccgggaaggtcgctttaaatggcggcctttaaggcttaaagctgcgattcttccttacgacgaagttgatatgtcacgcgtacttcacgcgttaaatacgcgtggttttctcgttaagtacgctaataacacgggtgagtatggtgtgattccttcgttcaaaaaccaccaagttattaacaataaagagtcaaaatctgagcttccggccatttctggctgtgaaattctgaaatccttatctgatgcgggttgtggcgcgatgagcacgcgtgaaccacgcgatgatgacgcgtaccaaggggaaaggaaggaaggaaaggaagggaaaggaaaggaactaaatacaatgtccgattttcctcggacaaattgtgatgctccagatgaacagaaaagtttacctgcacaggaaaagtcagaactaaagaatggggacgacagcggtgatccagttgaagcagcatttgaaaatatcttttggatggctggacttcgtaaggatgcaaaggtcaaggctaggtctgcttttcaaacaaaatttaaggaatggaaaaaatctaaccatggcacaccagaggacttcgccacactgctagctgatgacattcgaataagagctagggcgcagcaacttgggttcgacaagttacttcctgctacgtatttgaacggtgagcgctggaatgatgagaaaccagtcgtaacgtcgaattcttcaggagcctccactccgggaggctcagcatcaaactcatggttcactccgtcaaatgacggttcatctgaggtttttattaatcaggcggctattgagcgtttgaatcgtggcggacaacgcaaatga

SEQ ID NO: 170989 - DNA, 423 bp, Enterobacter cloacae
atgtacggaacccgcgaagaactttgtgtacagcttgaaaacatgttcacgtttgacgaacccctggtcctgctggtctggacggaagaggggattagcgtggcctgccgtgaagcccggccagaaccggacggggctgaaatccgggaggtgatgaaggcgctaggcgaaatgaaaatgacgcaataccgccaggagggggtaaataatctgactgtcagcgatctcctggcccgtcagcgcgaagcggcaaaccgtcaggtgagtgttccggcggtactcctgtcccgcgtcctgcgtaactatgaatgcgagctggaaaaccggatcggtatggcctgggaagccgggcggcaggagccagaaaccgtcaggaatgagctgaaggacgttcacgcattacaggagacgctggccgcgtaa

SEQ ID NO: 170990 - DNA, 222 bp, Enterobacter cloacae
atgaactacccgggccttgaacacctgcgcgcggacgtggccgcgctcagcaatgccatgtgtgacgtgcggatgctgctgaaccgcctcgaatcgcagcaccggcacgacgcggcaacgcttaccgaacgtatggctgcgcagactctgcgccggatcaacaccctgcttcttgaagcctaccgcgaagccctggtgctggacgaaacctttcaggactga

SEQ ID NO: 170991 - DNA, 198 bp, Enterobacter cloacae
atgcaactgtcaccggaaacccgtaacatcctgcgccaatataaaacgctcatcaacgaacgacgtcgcgaatcaggactcagccccgtaaccacagcgaaagtgctggatgagatctgcgaatcggctacccgccagtgcgccgtctatctttgcggccacttcattctccagggcggtcagggggatggaaagtaa

SEQ ID NO: 170992 - DNA, 144 bp, Enterobacter cloacae
atggatgccaccgtggaagtcagccgtgaagaccgcgataacttcgtgaaaaacatgctgaccatcctgtgcgaagagcgcctggcgttggcgcactatcgcccgacggcaatcatcaagggcagtttctcttctggctcatga

SEQ ID NO: 170993 - DNA, 705 bp, Enterobacter cloacae
atgagttcactgatcctgcttcgccgtgtgagagttgaaaacgccaacgcgattgctggcctgacttacggttttcccgccattacccatttcctgggattttcccatgcgctgtcgcgcaggttgacagaaacgcacgggctgcgcattgatggctgtgctgtcgtcagtcacgagcaccagatccacgcgcacacgtctggccgcgattatcagtttgccctgacccgcaatccgcttacacgggacgcgaaaacggcctcctttaacgaagaggggcgcatgcacatgacggtttcactgctgctggagtgtcacggggaaattccaaatggcgaatacggtcagcgcgatctttccgagcatctcaggcaggtgtgtccgacgctccgacttgcggggggaatcatcgtcgatatccaggacatttcggttatggcgatgcctgccagcgctcaggagatggggcgattaaagtggcaactgatgccgggctttgccttgcgggatcgcagcggctggctgggcgagcatcataagacactgcttgaacataacccgaatgcaacgcttctcgacgcctggctggattttgccgcgctaaaaatacaggcagaaacgccagaggatagcgatatccagaaggtgaaccggccaactggcacgttgttcctaaacccaaccccggttatctggtgccgttga

SEQ ID NO: 170994 - DNA, 204 bp, Enterobacter cloacae
atggcagtacgaaaactcgaaacaggaaaatggatttgtgaatgctaccccgccggacgcaacgggcggcgtgtgcgtaagcagttcgctaccaaaggcgaagcactggcttttgaacgccacacaatggaagagacggaggctaagccctggttgggtgaatcggtagctcgccgaactctgaaagacgtagttgaactctag

SEQ ID NO: 170995 - DNA, 468 bp, Enterobacter cloacae
atgataaatatcaatcaactatgtgattacatcatcacaaaaatctcagcttcaggcgaaactatgtctaatttgaagctgcaaaaattggcgtattacgcggatgcttggtatctggctttttttgatgaaaagttagtggatgaggggtttcaagcgtggattcacggcccagtaagccgtgcgatttataaccgattctcttctacaaaatcactgtattcggacatcacgattgcagattgcactcctggatttgatctttcatctattccagccgctgccgcagctcatattgatggcgttcttgaagtctatggtgctttttctggtgcacaacttgaagatatgacccataaagaagagccatggattaaggctcgtgagggttacagaccgtcagcacgttgcgaggtagtcattgatcgcaacataactagagatttttaccgtagccgattgaattaa

SEQ ID NO: 170996 - DNA, 744 bp, Enterobacter cloacae
atggtgaaagcctttcgcccttcattagggacaaatcagccgacagcggtacagacccctaaaacgccctccgcacccgaaagaaagtgggcgttttcttttcgttattggcgtcaaattgagaattttgggttagatcgtaccgattcaggctggtttgtttcactaattggaaaattatccgagctttcccaaaaagatgtcaaaggctttattaccagtggggccgaaagagaggcatggcgctatcattcaataaactgggaacaaagaaatatccccgtacaacgtaaccagttgacctggattgactctgactaccttgaaaatgacgaagaatacccattattacaatttcagatatctactgcccttggtagagttgtaggcttttgggatgagaaccaaatttttaatgttgtgcttttagatcctcttcataacatccagccaacacgctctcataactatcgagttgactactgtgcaccgcttgagaccccctactcacttttactctgtagagtagatgatataagacgcacatgccgttgttcagatcctgaatgtagcttcaaacgtcgaatcgagcaatttgaagaaattccaatccagacaaacacacttgtacactatgtcagtgacatggaatgggctgagacacagcaatttatagcggatggtttgataagcgatgccaaagaagttttctcttgggggctactggctatcagggaccagtaa

SEQ ID NO: 170997 - DNA, 525 bp, Enterobacter cloacae
atgtctagtttaacccaccatcgtttgcaggaagttttgcactattcacctgatacaggcgtttttacttggcagctatctaattcgaaccgagtacgtgtaggcggcactgctggcagcccaaacagtggcggatacatcctgatttgggtagaccgcaagagttatccagcacaccgtctagcttggttttatgtcaacggtaaatggcctgagaacgaaatcgaccatatcaatggtgtcaagtttgacaatcggatctgcaatctgcgccaggcaactcatgctgagaactgccgcaatcgctcaatgaaaaaaaataatacatctggcgtgaagggagtgagccgcgagggaagattaaacaaatggagggctgagtgtatggtcaacggcaaacaacatcgtctgggcctttttagcagcctcaccgaagcagataaagctgtaaggcaatttcgtgaaatacatcacggggattttgctaaccacggggtcggcgtggagggtaaagaccatgcgtaa

SEQ ID NO: 170998 - DNA, 222 bp, Enterobacter cloacae
atgttagaagccggaatggttgagaagaagtcagcaggtagcgcagccctctggatgcgtgaagccgtggaggcaatagataaacagttcggcacgggctatgccagagagcaccctgagctggtggcaggattcatgcaggcggcagccattgatcaggcgggaatgtatatccggtcactggtggaaacgctggatttatggcctggctcgctgacttaa

SEQ ID NO: 170999 - DNA, 468 bp, Enterobacter cloacae
atgaggaaaggcaatagtgtgaaaaaatataccgtctgttctggcaggccgatattaagcgtgccagcggatcacatggcttactgtgatgcccaaaaataccccgtgattatcatctggaagcgtgcgcggtatgctgatgtgacatggttgaatgaacctttccagcgttcacatggctggctttggcaacgcgatgacttccgggctgatattgaggaaaggggagagactattttccgacgttacaatcgtggggaaaaatcagcgcgtgcaatccagcacagcatgatgacactctacgatctgacaatcaccggtgctgagcaggccgccagtgacttgtttgacatgacgctaagtatcgttgctgagtatcaggaaaggcgcgaaaacgctaccttaatcgatggcgataccatgaaggttttttctgactcaaggagcaaagcagatgtttacttataa

SEQ ID NO: 171000 - DNA, 564 bp, Enterobacter cloacae
atgaaaaatagaatcctgccaagccgtgagtacctaagaaccatctttaaatttgatgaaaaagacggttctttgatttggaagaagcgagagccgaatgagttttcttctttgcgtgcctgtaatgcatggaactcaaaaatggctgggaaaaaagccggttatgtaaatagattccgctcaaagaaatatttagtggttggaattaatggtgagcaatttctggcccatagattgattttcaaaattattcacaactcagagcctgaaaatgtcgatcacatggatggcaatggcctaaacaacaagccagctaatttacgcgggactgactcagccggaaatcaccttaacgtcatgatgagtgagcgcaacacgagtggcgtagtaggagtctcgttgcatagaaaatcaaatttatggcgagcacgtataacgcaagggaatgttagtaaatctcttggttatttccccgacttcgatttagccgttgcggcaagaaaaaaagccgaattagagcttggcttccataaaaaccacggagctaaaaactctcatgaataa

SEQ ID NO: 171001 - DNA, 186 bp, Enterobacter cloacae
atgatctgcgtttatatcgagggattattgaaaaagttatttctgccacatttggtcagggaagtgcgattgcagatgttcatcgggattattttatattgcttgctgagcatcagctccctgtgcttcctgtcggtcatctggttaatatggggaaatatcttgcccggcagttacctgatgtga

SEQ ID NO: 171002 - DNA, 480 bp, Enterobacter cloacae
atgctgcaaattttctaccccttgtacaatcttgcggaaagttttattgataatgtcgtgcgtgacacggtggtcagaccggcagtcggcggcattgtgtggtgtgaaatggggctggatgtgacccgtcacagcggtatttatgtgggctacgggatgattgttcatctggatggtgacggacgggtatgtcgggataatgccagaacctttatggcacggctgaacggctggaatactgccatgtcaatttataccgactgtcagggcgttaaaccggcaggcgatcctgctgtggcgaaacgtgcgcgggcgagtgtaggccagacaagaacctataacctgttatcgaataattgtcaccgtttcacggcagaatgcatatcaggtgagtcctgtccggatgtcactctggcgagtagtctggatgtatacaggaagggtgatacctggcgggtgtgggaaaccccggtgaaatga

SEQ ID NO: 171003 - DNA, 252 bp, Enterobacter cloacae
atgtcgttaaaatgtcctaagtgcggtggccgaaacacagtgacagaaacagccggaaagatagctgagttgactcgcgatgatcggttcctgacaacgtctgctggttatatcagcccggagcaattatctgaattgctcaaaaacatcatcacggcaataaaacgtttctttggatttctggagcagcgagaaagaaataatgcatcagtgctgatctgtaaatcgtgtggatattatgagagaatatag

SEQ ID NO: 171004 - DNA, 324 bp, Enterobacter cloacae
atgggctttccttcaccagctgctgattacgtagccccgcgtttatctccggaaattatctgcgggataggcatggacagccgcatactcgaaacgtcgtcagggtttgcggtgatagagccgtgcaccaggctggtacagaatcaggttctgctgattttgtctggcggccgcactcagtttgcccgggtaatgggcagggcgctgatttgtgatgatggtgaagcgatcgagggtgaggctctggacggcgtgactgtaatcgggccagtgacggcgctgatcaatgcagtggggcgggacgacgactgcccggttccgtaa

SEQ ID NO: 171005 - DNA, 240 bp, Enterobacter cloacae
atgcctcgtaaatcagaagtcggagccgcgtttagggccgccatcgaactaaacccaaaaggctataaatgcctacggacaaccgattttgtccgtgaattgcgcgccaggaactggccatttaacaatagtgatgcgaatgcctggataaagcgttatcaacccgactttgtggataagacagaggatgagggggataaccggtactggatattacgcaccatggggagggttcactga

SEQ ID NO: 171006 - DNA, 219 bp, Enterobacter cloacae
atgacaatgatgaaagtaattcgtgacgcaaccggcagggtcatcaacattggcgattgggattatctgatccgcaccgaacccgcacctgacggtagtgaggtggaggttactggcaacccttatccggaaggggcgactgaatcagaggaagaggtcattacgggttgggatggcgggctgtacgtaaaaggcgacccgcccgccaatgctccgtaa

SEQ ID NO: 171007 - DNA, 2043 bp, Enterobacter cloacae
atgacgaaatacgccaccctgaatccgctggggtcgaccagcccgtacgatttattcgacaacgcgcagaatctggattttgccgtcaacagctatacagccaccatctggcaggaccgctttaacaaaacccgcctcagctggtacgggattgaaaagatggcccgtgaggctatcgctgcgtttggctacatcaccatggactcgttccaggctggcgcgacgctgacgcttccaaaccaggttcttcgcgataccagcaccggcgagtactaccgctgggacggggtgttcccgaaaaccgttcctgctggttcaacgcctgccagcaccggtggcgtgagcctgggtgcctggttaggggttggcgacgccgttctgcgcggccagatttccaacccggaggcggcgacactttacccggagctgcagctggctcgctggcgtgataatggggatattcgtggttggggtgcaaaggatggtcttgatagctcggatgcttttcaggctgcagcggattacctggcaacgaaacccggtaaaaaactgatagtgccacctggtcgatttatcgttacacgaaccatcaccggaaagccggttctaatagaagggatctttgggcaatccgttattgtcgctaaaaatatgggggggaaagccgtcttcgatatgaccaccccgtcaacagaactcggtcgggtgatagggtccgtgggaattgagtgggtcgtatcgggtgctgatattgatacgttaatccttggcccaaaggacgtggcgcagtatatgacctatttcctgcgttatttcatacacgggaattattgtcgtggagaaaaccgggttgaaagtgcttatagctttgcctgggattattcagctaatcgctggttccgtgtaggcgattgtgttggtgcgaatatatacgccaactgtattcaaggaaaatttgacatccagcaagacccggccagtcagatagaagaaacagcatttgaattcgacgccgctggtgccgttttatctgctcaggttcatgacaataacatcggtccagcaaaaacaggattgcgtgtacttaataatgttttcatgaaagcgcacgataatgacctgataggcacgctggatggcattgtatgggcagggtcatcacttttcaatgagccaaaaatccaccataacaatatcaacgcccagcggcacggcgtgtttgttgatgggcctgatagcctcagctttatggataacactattcgtcgccatcgccggggatggaaaggcggctcagcggcatggtatggcttcaggctgacgaacgtctctgaccttaaggtcgtgcataatacagttcagccagatgaaggtgatggcgtgttttctggtgctatgtatggctacaaccttaacgcctgctcactcgcgactgttgacgggaattttattggggttggatgcgaccagggaataacgttaagcgactgtacgggtgttaacgttgataataacgtgagcgcccaaaatgatgctgcaaatactctttttcgcttaactcagaactcaaggaaaataaccattggtcaattttctcttgtgtcatccttcgttggtacggtgttatctaaggattcaacaattgtttccgacgtgaccatgcttaaccgagactttgacctccagaacacgggtaatgttgtgatggagagaacaaggcagggtgctgctgttgattataaaaagtggcgagaaacagtcggcacgtctcagttaacaaaggccattgtcagcgatgctggggcttcaattaattatcagataatcacaagaaatgcggcgtcggtaatttctctgtatgaggtccgcgctgaccgtttcaggctgaataacggccccgaaattatcactggaactggcagcccagagggggttgtaacagccacaaaaggttctcaattctggaggacagattcggcggattctgcatccctctacgtcaaacaaaccacggcaggcaatacaggatggtcagcaaaatga

SEQ ID NO: 171008 - DNA, 3093 bp, Enterobacter cloacae
gtgacgatccgaatctatccgtcccggttgcccggcgaaccgctggaaacccaccatcatgaaaccctgacgatcagcgcctggtttgcacagaacgttgagggctggacgccggatcagcagcacccggttgcggttgaaatcgacggtgttccggtgccgccggctgagtgggcgttgtgtgccattcgccccgacagcgatgtaaggatgtatccggtgccgtacggtaccggtgcggaaatcgcgctgtgggtggccgtcagcgtggccgtcgcgtctgcagcgtactcgatttacatgatgagtacgatgcaaacgggcggggcctcccagccaggcaacggcgatcagcttgagctaaacccggcaaaagccaataccgctaagctcggcgatccgattcgggaaattctcgggcgctataaggtctggcctgactatatcatgcaacccatcagcaggtttgattcagctgacccgaaaaaattcagtaccagcatgtttttatgcgtcggcgtgggcgacatgaccatcccggcgtcctcggtacgcattggctcaacgccagtctctgcgttcggtgacgatgtctcatataccgtttacggccccggcgctaacgtatcgggtgacagtcgctcagagaactggttcaacaacggtgaggtgggaaataccacatccggcacatcaggccttgaccttggctctacggggccgcagaccgtcagtattacggcggacgcggtgctggtcagcgccaacaccatcacgctgattgaggccagtgccagcgacgacgaagccgaaatccctgcatcctgggtggtgggtagtgtcgttaccgtcattgcgccgaactcgtacaacgtagcgaatacgggcggctacagcgtgattttcggcgacgtcgatgaactggccccggtggtgggcatgccggttgtcgttaatttcaacgagtctgattacgacctgtttattgcgagctacgcccctggcgttccggcggtaccaggtgtgggcggtactgctgccagtgtaactgccagtgcagcgccgacgacctatgatttcagctcatcccccgggacgttcacgattggctgggatggtacgacctacgctgtatcactgatcaccaattacgtcacgatgtcagggctgacaaacacgatcaccagccagctgacaggctccggactgattgcccgtgataacagcggccgcctggaaatcgtcgaggaaaccagcccgtttgcagggggaagtatcagccatagtgtgttgccggtcgccgcatttggtagtgcgccggttgatgtcgtgggtgttgcgtccagcggtggtaccgcggctgtcgaggcacacattaccctggcctataccagcgcaacaggcagaccatttactgggatccccgatggcgttcagcgtatagcgatcgggtacggtgacggtcagtttcgtattactgacgtggatgaccagaccattaccgttgagcgcgtgctggtcacacaggatacggagggtaacgacgtcatcactgtcgatccgacctggccgggattcactgagcgcatgttgttggatgcacaggtcaccggtatcaatgacgattacgcctggctgggtccattcctggcctgtcctgatggcgagacgaccaccacgattgagaacaatttcattttccccaatggtcacatccagtacaactcgaagggaaacccaaagagccatagcgtgcgcgttctggttcagtaccgcaacgccgccaccgccggggcgtggattacccggacatacgatttcaagggcaaaacggctgacggccacggttacacccggcgcatcagcgggctggcggcggcgcagtatgaggttcgcgtgcgtcgcacaactaaaatcggcggttcaaatacggtgaacaatgtttactggcaggcgctgcgctcattactgagggcgcgtcccaccagttatgccggggtcaccacgatggggatcacggtgagaaccggtaaccgtctggccgcgcagtccgatcggcgtatcagcgtggttcccacccggatttacagtggtggacgcactgcacgcagcatcagcggggcgatgtatcacgtactggagtcgctgggattcgcctctaatcagataaaccacaatgctatcgatgaactggagtccacctactggacgccgagaggcgagacattcgattttgcaacgggagacagcacgtcagcaccggagatgctgcaaaagatcacctacgccgggatgggttactttcttctgaccgatggtcttgtgtcagcaggccgggagggcattaaaccctgggtagggatgatcaccccccaggaaaccaccgaagacctgcaaaccgcgttcaaagcacgcaatcaggacgattacgacggcgtggatgtcacctatatcaacggcacaacctgggccgaagaaacagtgcagtgccggttgacggggaatccgacgccgctgaaaatcgagagctacacactggatggcgttcttgacccggaccgcgcctaccgcatcggtatgcgccgactgctgggttaccagctgcagcgcctgcagcacaccacctcaactgagatggatgcactctgttatgagttcatggatcgcattgtcctggctgacgatattcccggcggccagacgctgagctgtctgataactgatgtctcctggaacagcagcgcaatcaccctgacactgagtgagcctcctgactggtcatttgaaagcccgctggtaattatccgcaatcaggaggggggcgcatcgttaaagttggcgcccacccgcattgacgaatacaccctctcaatcccatacaacgcagcgcttgacgttgaatcgtggataatggacgacccggccattgagccgctgcgtcttctcttttgctcttcaattcgcgtcccttatgacgcacttatcggcgaaatttcaccgggtagtgatggggcctgcggcgtgactgcagttcaatatcatcctggtaaatatgcgtatgacgacgccacctaccccggcgatgtcgcgtaa

SEQ ID NO: 171009 - DNA, 429 bp, Enterobacter cloacae
atgagcttatcaagcgcctcaataatgaattcatcctgcaaagacggtcggtttaaccctgataaataccgttctgtcgagtggcagaagggcggacgcgattaccccgcactggactgctttggcatcgtcaacgaaatcaggcgcgatcttggcctggctccgtggcctgatttcgccggagtcacaaaggatgatgacggcctcgaccgtgaggcgcgcgggctgatggctggcctgacgcgatgtgagcctgccccgggcgcgggtatcgcctgttattccggctctgtggtgacacacgttgccatcgtggtcgagattgacggccagctgcgcgccgcggagtgcaatccccgcactaacgtgactttcctgccgctggcgcggttcacgcgtcggtttattcgcgtggagtactatcagtga

SEQ ID NO: 171010 - DNA, 183 bp, Enterobacter cloacae
atggcaaaatacaacaccggcaacccgctggcgtcagcgcatcctcgcgatatccaccatgaatgccacaaccagcccgatctcatcacccgatcagaggcagataagatgattaaggagtcaaatgatgagcttatcaagcgcctcaataatgaattcatcctgcaaagacggtcggtttaa

SEQ ID NO: 171011 - DNA, 3282 bp, Enterobacter cloacae
atggcaaccctgcgtgagctaataattaaaatctctgctaactctcagtcattccagtcggagattgcgcgcgcctcgcgcatgggggctgattactacaaaaccatgcaaaatggcgggcgacaggccgcgtcagcttcgagagatacccgtcgtgcgctggcagaagtatcagcccagctcaatgaaacaaaatctgcagcgatgggcctgggtggggcttttgctggtgcgttcgcaacccaacagctgatcaactatgccgatacctggacgcaacttaatagccgcctgaaacttgcctcgggcagcgccgatgagttcactcagaaccagcgggtcctgatggatatcagccagcgcacgggaacgagcgttgaggcgaacaccaacatgttttcgcgtatgtcatcgtctttgcgtcaactgggctatacagcggcggacacagcgaaagtaactgagctggtggccacaacgctccgtctctctggcgctggtgcgagcgaggcctccgcggtgatcactcagtttggccagtccatggcttccggtgttctgcgcggcgatgagttcaactccatcatggaaaatggtgggcggttcgcccaggcgcttgctgatggccttggcgttaacgtcgggaagttacgcgcaatggcggaggccggacagcttacggcaaatactgttatgccagctctgctcggtcagctatccaaagtgcgagctgaaggtgctcagatgggcgctactgtcgcggcttccgctcagcgtgtggaaaacgccttcatggcctgggtcggtggtgccaaccaggcgagcggtgcaaccagttctcttgccggcggactcgattcactggctgaaaatatcgatgaggttgcaactgctgccggagcgctggtggctattggtgctgcgcgcttctttggcaatctcgtttctggtgccacctccgctacagttggcttggtcaatgccgcgcgaagtgaagttgcattggctgaggctcaactgcgagggacgcaggtctcaactgcgagggcgcgggcaacggtgtacagagctcaacaggcgcttgttgccgccagagctacagatgctcaggctgcagcagaaaaaagactcagcctggcacaggcatctttgtcaagaaaccttgctgcaagaacagctgcgcagacggctttgaactcggtcgcgtcaattggcggtcgtcttcttggtagtcttacgggattggttggaggtcctgttggagtggttcttacgctcgccgcaacatggtacacactgtatcaaaatcaggagcaagcgcgccgctctgcccaggaatacgcgaacaccattgatgaggttcgaagcaaaactagtggtatggcgctttctgatgcctcagataatgagggtaaaacccgccaggcactcgatgagcaaaatcgtctcgttagtgagcaagaaaaaaaaatcagaagcatcaaagaagaaattgctggttatcagtatgtgctagccaaccctggaccgacaaccagcggtggcttcatgatcaaccacttaacttctgtagaaacggctacacgggggttagaaaatgccaccgcggctctggcagttgagcaagagcgtttgggccagatgcaggcaaaatctcaggacattcaaagtgtgcttgagggtcttgaaaaccgcagggttgctttaattcgccagcaggccgccgagcaaaatgcagcctatcagtcacttctgattatgaatggccagcatactgaatttaaccgtttgctggggatgggtaatcaactcctaatggcccgtcaggggttggctaacgttccactcagacttcctcaggccgatctcgacaaaaagcaaaccgatgcccttgaaaagagccgccgggatctggagttgtcacgccttaaaggtgaggccaaagaacgtttacggctgagttatgccgcagacgatctgggtttaaccagtgaccctcaattccagacaggccgtcaggagttgattaataacggtcttgcggaatggcgaaataatgaggccaacaaacctcagaaaaaaatgcccaaatctgatgagcaaaagacatcggagaaactcgaggagtcttacaagcgcctcattagccagcagcaggaacagctcgcgcttgctggccagagtacggagctcgctaaaaccaaatatcaggtaacccagggtgagctgggggctttgtctgaaacgcagaagacagagcttctgcgcaactccgccgcgcttgatcatcttaatgctgtcgaacgccttaaatccctgaatcaagaactgctgaagcccgaggaggcgctgctaaataccactcgtgaacgcattaaactgctgcgagaggctgcacctgcgactgaagaataccgcaagacaatggagcggatatcaaaagcatcggttcaggaagctccgaagttcggtggtattgattcatctgtcggcggtgccagcggcgaacttattcgtgtggctgatgcgcaaaaagaactggaaaagtggcatgaaactcagcttgagatgcagaaagagttgctcgaccagaaggagattaatgagcaaacctacgctgaccgtgtcgctgaaattaacaagacaaatgcttcgcaattacaggatatacaggctggatacacatctgccagcctggctatgttctcagacctcgctggccagtcagcgcaactattacagagcatcgggcaggagggcagtcttgcctataagaccctgtttattgccagcaaggcggcagcaatggcgcaggccgtgatcaacaccgaactggcagcaaccaaggctatggcggaaggcggcctgattatggggatcccggcggccacagcaatccgcgccgtaggttacgcgtcagtggctttgatagccggacagtcgcttgccggtatggctcatgatggtattgaccgggtaccggaaacagggacctggttgttgcagaaaggggagcgagtggtaacagccagcacctctgccaagcttgatgcgactctggagagggtacaacagtcccggcaggcctcggctggtggaaccgttcatatccagaattcattcaccggaaaaccagatgacgcaacgctggaagctatcgaccagcgaaaccgtcaactggtgatatcgatccgtaaggaaatggcggctcaggtggtaaagccaactaatgagtttggcagggccttaaacggcttttatggccggaccaggaaggagtga

SEQ ID NO: 171012 - DNA, 603 bp, Enterobacter cloacae
atgaaaaaatgcatatgttttatggcagctttactgttggcaggttgctctgctggtcagcaaagagaagctaggctaaacaatatacctagtctaaaaactcagtataacgggcagcgtgagtatttgaaggaatactccgcaaaaataaaaaccaataaaactcctctggagaaagtaaagatatgcgttctccgaaatgtatctaatagagacgtgattttatctgatgcatccaaaagttttgttggcgcatatacaggtaattattacaatattggtagcaagacagttgttaatggcggtggtgttgttgaatctgtaggtgatgccggagctattattgttcaaggaaatacttcctactcatttgattcgggaattgttcaaataaaaagagttgttcgatttactcttgatgcaatacctcgatcagagcagattgatttgacattcagcaatatccagcaggcacaaactgaaacaggggcttttcccaacacaggattctttgatataggcacttgggagggggcggggccatatcaagcaattatgtcattggataatattgttagctctatctccgagtgcatcaaataa

SEQ ID NO: 171013 - DNA, 207 bp, Enterobacter cloacae
atgtggattgagttcgacaggcaaagtccggttggcgatattcgcggtgacattcaggccgcccagatagtctctgccgtttatggttctcagggggtaaaggtgcctctggaagatgcggtcattcaatgggcagccgaggtggacggaaatgacaagcaagacccattcgaggccttggaagaggcacttctaaacgctatttag

SEQ ID NO: 171014 - DNA, 474 bp, Enterobacter cloacae
atgtcaggaccgccgaaaaccccgacccacctacgtttggtgaggggtaacccatcaaagcgcccgatcaacaaaaacgagccacaacccatcaaaggggttcccccaacaccgaagcattttaacaagcaggaaaaatactggttcagggttttgggtgagcgcctcgacagcatcggtgtgataaccgtgcttgatggcatggcccttgaactgttggttggtgcttatatcgagtggcgacgtcaccgtgatgttatcgaacaggagggggattcctacaaaaccacctctgctgatggcagcataatgatccgtcctcatcctcaagtggcaatgatggctgacgcctggaagcgggtttgcaaaatgcaggctgagttcggcatgactccatccagtcgctcaaaagtaaacgcaggtaatccgggtgagagtgatcctcttgctgaatttcttaacgcgagggactga

SEQ ID NO: 171015 - DNA, 312 bp, Enterobacter cloacae
atggaccgtctcattcacgaaatgtcgtacctgttcaccaagcaacgctttatggaaattcaggaggcagcgagccagatcgctataagtaacagcgatctgccagagtgctttggtagcatcgctgagggcattgaagattttttagaagaaaaccccgatgacgagtggcgtgagcatgaaaaaatcctgatgcactatgtggcgatgcgagcgttaacgctatggggcaatggcgagaaagttaccagtgtcccgtggacacatcctggatggttcggaacggcggaaaagggggatacaatccaatga

SEQ ID NO: 171016 - DNA, 198 bp, Enterobacter cloacae
atgccagaagtatccacatccgtggccgatatcgaagtgctcgaccgcgattatcgcgatccgcgcggtgtgattgtgcatgtcaccggctggaatcgggataaacagcaggtgtacttcaccaggcagaattatccgcatgaatgcatgcagcctgtctggaagtttcaaaattatttcaggagggttggggagtga

SEQ ID NO: 171017 - DNA, 588 bp, Enterobacter cloacae
atgaaccataaattacccgtcgtggttggcattgagatcccgctcgatgagtccgggcgctataaccttaacgtgctgcataaggccagcggcgaaggaaaacataaatcgccgggtgagtggctacgtctgaaacaagccaacgaacttattgctgcacttgaagctaagttactgaaaaaaaatcaagacgggaattcacgtcttgctcagaaagtagtcgactctgttcacggtggttcaaacccaggaacttatgcacacgaacttatcgctgtgtcgtatgccgggtggatccgtgctgatttccagcttgatgttaaccaggcgtttatcgatttcaaatcaggtaagcggtccatcgatctttgcaacatgccatcccttgacgggttgaccggacgctttcaggaattacgcgacaagatagccctcgatgagcaggaggaggccgaactgctgactacatgtagcttgattatgaacgcccgcaagaagaccaaaggcaaacgtcagcggatgatcgaattgctggatgcggttgggcagggaaacctctatttctctccggatcattggggagtgtga

SEQ ID NO: 171018 - DNA, 165 bp, Enterobacter cloacae
atggagattctggttggctatctgagtctgcataattctcaagtgcatttatcccgctcagcagaaagccttttcattctgttaaataatgacttcagcttacgttttccgacgccggtgtggcagagatcgttatgtattttttcagaccagactcccgtttaa

SEQ ID NO: 171019 - DNA, 261 bp, Enterobacter cloacae
atggacacgttgcttttacccggccagaatccccgagcctgggcggaaactatgatcaatctggaggccagaaaactggttaatacggccaacacggtcgcggctatgcatcttcaggatggttttatccggattcagtttgtggatgagatcagggcattcatcatggcccagtttgaggccgcacgccgggcaaaaacggatgatgactgtatggcctgcctgcaggcgttgcgtgcagagaacaccagtctgctttaa

SEQ ID NO: 171020 - DNA, 795 bp, Enterobacter cloacae
atgagctttaaggataaagttgaagagaaaaaaatgcgccgtatggcccgtccccctgagttaacggtaaaggactggattagcctttatgatcttcttcgttcagccaaagctcaagactcagaagccatgtacgaagacttcgcctctgtgctgttaactaccctgtcggttgagcatcatccggaactataccgcctggacggaaacaaactaaacgctgttgccgatgaccattttgcctgggacctactatccgccccaatgaaagggaaaatgtcccctgaagaattggcgaagcgcccgaagaccctttcccaacttctttgtatctacgatgaagatatcagtaacgacgagtcacttcgtacacatggcttcttgcgtgacgctattgcccctatcctcgatttcgagcttctggatagcatcgaagatgagcctgactacaaagaaaaatatttcgagttgctagcagcgcaaaagcactcgactcccccgccactaagaggggaaagttatgctatcaaacgagaagagttgctgatcacagcccttgcggttatctctcaaaatcaaagagacgctaataaaaaggtcgtcccaacagttactgaacttctgaatcagatagaaaaacatgcctctgcgttctggcctcacagtaaacaacttccgatgtctcgtgagaatgcttctaaagagctaggcttcgccttacatcttttagaacaaccaaatcagaatattgaatttcttcgggaagccaaaaaagcaaaaagaaaaagtgcataa

SEQ ID NO: 171021 - DNA, 1317 bp, Enterobacter cloacae
atgagtaactctctgattaatcaagtaacaaagccctcacctggtcaggaactcacctcggtatttaatactattacgcccgataagcctggcaaccttgttgaatatcagccaaagggaacgtttgttttcaaagaagtgatgtggtctgtgctgccagagaaacgcaaccaggacacgaagatcatgaaaagaatcttcggggcagttgacaaggtatcagcgatgtctcgctttcttgcggtcagatatgattttcggctcccgacctacagtgcggataatcgcataatggatgatttccataatttacttttccgccagttaagtaagaactacccaaaatcgtttatcagctatctttgggtaagagagcagggctcaggggaagcacagcattatcactatttgttgatgctggatggcaactatatccgttatccaaataagctgaatacgattgtccgacattgctgggaacaggttgctggtggttcggtatggttcccggaaaacggttattactttgtgagcgaaaatgatctcaagacctataccgaattgatgctgagagttagctatctgggtaagcgccgtactaaagagtcaattgataaaggtatcaaactttttggctcaggcatgcgcaaaccgaaacctgtcgcgccttcacgccaaaagtctgcaataacaccctgcaagccaatcaaccaaaaagcggagacgaaaaccaacgatcaggatatgacgttgaaatccacctactcaggaatgttggacaaatattttctgggcaaagcccgattacccgccgttctgcgtaaacgttcatcctatgaactttatgacgaaaataaatggtggtgtaattcaccacgttggtccggccatcgtcataactacgtgttagaggctctgattactgggatcagcctttctgattacgcacgcaagtacaagttgaatccagtacgggtatatgcaaactgtcgccgtgttggggggcaaagccttaaaattattcactgggcatggcatcgctattgcttccagaaaagcaaatccacacaggatgactacattaacaatcaccggctgaatcataaaacagctaaaaagcagttacggcgtaaaccaatgagctctcactggagccagcactttgatcgatattatcaaaagtactggccgaaaggctggactgtggccgactactgccgtgaacacaatctggtcgccagcactgccagacgttatatagtcgattttccatttataggcctgatagacccgttcttgttgaaaccatggttatag

SEQ ID NO: 171022 - DNA, 648 bp, Enterobacter cloacae
atgacttataaagatttctatcatttaatgttggagtctttttcccaaccagttgaactgtctactggggcaaggaaggtaccttttacgctatatactgaagaacaaaagctgtttgttcgaaacggaaaagataaaaccagccgtatcgatccaaaagaagttgcagcatttgttgaacggtttgaagagaatgggagtttgttagctaaggactatcaggacgtgactttcaaagcttcctacttactggcagccatgaaatatattactgaacaaaatgttacctatacatcagtcgtacgcttccacagtgaagatgcactggctctggtcgagtatctgattgaacacgagccggaccatccgctggtggatattctggttgcgaaaatcggtcagtatgaagatgaagcgccggagtttgctgaatttaatagccgtattgcagcggtcccaacgggtgttgccttactgcgcgtactgatggatcagcacaaactgactcagagcgattttgaagaagagattggtaataaatctctggtgagtcgcatcctgaaaggggattgcacattaacactggatcacaagcgagcacttgcgcgccggtttaacctccccatcagtgtgtttgttgacccgtaa

SEQ ID NO: 171023 - DNA, 291 bp, Enterobacter cloacae
atggtactggatgccaaatggaagctgttagacagccgagctgataacagcctgagaaagtatgaaattaaccaggctgatctgtatcagatgttcgcttatgggcaaaaatatctgcaagggaaggggaatatgatgctgatatatccacgtcatcagttttttgatactccgttgccagtgttccattttgataaacatttatcgctctggtgtgtgcccttcgagcttgaatcaggggcattagtggaaggtgagtggcaatcgtccttccccctgttttccccgtaa

SEQ ID NO: 171024 - DNA, 741 bp, Enterobacter cloacae
atgaacgttacatttagaaaagtattttcatctgctgctatttgtgcagccctcgctatgtcaaatgcacacgctgcaaatgatgtgacattgaaagttgttggtaatattgttcctggttcctgcgtaccatcactgccaaacggtggggtggtagattatggcacaatgccagcttctaccatcaatccaaccggcacggcaaattcactggttcagttgggggctaaaagtatcactctcactattacctgtgacagcgataccagcgttggggtgacttctacggataaccgccatgatactcgcgtgggtctgggcagcaccgcttatatcgaaaatggattttacggtaatgttaacgctaccgctacaggaaactcatttggcttgggtaaaacgagtgcgggtgtgagtattggcgattacgtaattgcagcagatcccgttaatattacagttgatggtgttgccgctgatctgattggagccacaactaccggtacgtcaaattatacatggggtaaatccacctcgggtgcttttgcaccaattaacagtggcacagggcagatccgtgtctttacggctgctgcttcaggaaccactacaccaaaagcttttaaagttatgaatatgccgttacgcataacgactgcgcttcaggacaacacggtattgggtacaggcgatactatcacgcttgatggtaatgccacgctgagcattgtttatctctga

SEQ ID NO: 171025 - DNA, 954 bp, Enterobacter cloacae
atgacaaggaaaaacgatagccaaaatgatgtaaatgtatggaaacgtaacaatattcctgcattagaattttgcactctgccaagagccgcagagctgctcaattgccatctaaatgatttaattcattttattcaaattggcgctattgaaatttgtttatcacttcatgattttgaagcggcgctatttacacttggcccttgggaagaatcaaatgaatgggaggaaaagttccctcctaaactgatgacaaaatacacaaacaaatcacctttaagcctgtttatgccaaaagctgaatttgatatgaatccagcatcaaccgttcgagttaagcggttttatcaaaacaaagacattcctgggttaaagaaaccaattttatatctttccggactttgggcattatcaataggttacctgccttcttcatttttcggcgccttaaaaaataatgaagaaatctcattcacagctttcaacctctcatttaaagaagcagatgttccattaagcgctgatgattttgacagtgatgactacgtgattatggctcatccattaacagaacacctttactcatctggcttgctaaatgaggcagaagtcaaaccgattgcaaccatcacggcaaacgatatttttgttaccaagtgtcagattgaaaaaatatacaactctattgggagggatataccaaatctcataaatggaggggttagccaacctcaatcacctgaaacaatgatagagaaaccagtcagaacaacagcaaaacaggcagagcttattgtcgccttacttaaaggcattggcttaaccgatgatgatctagtcggcagcgtttcacagctgagagctaaagccaacaataaagttaatggactaccattcccggatgatgataagccgctgattgaatggttgcggagaggaggaatcagtcgataa

SEQ ID NO: 171026 - DNA, 138 bp, Enterobacter cloacae
atgactcacgctcacgacgacatcagcgtaggcacactgtgccttccgctggctaatgccatgggtgaagtggtcagcaatccattaaaggcgcagcggctcgctgaggaatatcgggaaaggcaggaggcggcatga

SEQ ID NO: 171027 - DNA, 213 bp, Enterobacter cloacae
atgcggaaggttgagtgcaaaataatcaactatgaatacaacggaggtatccgcaataagcgagaaaccgttgttaagggtgtatttcaccagtggggttctgattacgaagagtatgaaaatggtcccggcaactattcggtaggaatcgttgagcttgaagatggaagcgttcagcgattcattcccgagaatatcaagttcatcgaatag

SEQ ID NO: 171028 - DNA, 153 bp, Enterobacter cloacae
atgaaccacatcgaatttatcgagaagcatgtgcgcgatgaactgattaaacagggattcaccgtagcggtggctcagggggggggcattccaggccgtcgatatgtacaagcgtatgtcacaggccagtcgcaaggggaggattttcgatga

SEQ ID NO: 171029 - DNA, 156 bp, Enterobacter cloacae
atgtacaagcgtatgtcacaggccagtcgcaaggggaggattttcgatgacgtgttacgacacgcgaagctttgggcggagaagcagcaggtgccgtcagacaagttcgaaaagaagcgcgttaagcgtgtgcagcagcagccaggtctgctctga

SEQ ID NO: 171030 - DNA, 210 bp, Enterobacter cloacae
atgcaagacctgaagattgaataccgcgatggcaaactgctggagctgagcattgatggcatctgcttcatgtcagttaccgcgatcagtctcaaccatgaggcgggcaagacgctgccagtggtcaacctgaccatacctctcggcgtcggcaagcgattatcgccagccagtcccgaccctcaaaacctgcgcatcattgataagtga

SEQ ID NO: 171031 - DNA, 222 bp, Enterobacter cloacae
atgttctcgcattatcacctgggtacggtatcccagggcgaaacccgcgtggtgaagaaagaaactggcgaagcgctggtcaaactgcacctggccgaagaggttgagcccgaaaaggcgaaaacctccgaacctgagcagcctgcaaaagccaaaaccggaggtaaaggtggaaataagcgcggagcagatggcgctgataaagacgcatctgagggttga

SEQ ID NO: 171032 - DNA, 327 bp, Enterobacter cloacae
gtggaaataagcgcggagcagatggcgctgataaagacgcatctgagggttgatagcgacgccgaagattcgctcatcgcagcctacacatcagcggccgtcgattatgttgagcagttctgcgacggcgcgctggtggaaacattgacaccccgggtggaaggggaaacgccgccccgtgaagttctttttacttccggtatctgggcggcaatgcttttgctgattggccactggtatgcgaaccgcgaagcagcagcgcagaacctcacggaaatgccgttgggtgttgaggcgctgctgatacggcaccggaggtggcactga

SEQ ID NO: 171033 - DNA, 492 bp, Enterobacter cloacae
atgtctgtagtgactcagggcacgcagctctatgttctggcggatggcgcagtcagcgaagttgaatgcatcaccgcgtttagccctggcggcaatccagccgaccagatcgaagatacctgcttaagcgagcgcagcacgcgaacctataaaaaagggctgcgcacaccaggcgcggcaacggtgacgcttaacgcggatccggcgaacctcagtcacctgatgctgcaccgcatggcagagtccgacaaccaggaagatcttacctgggccgtgggctgggctgatggtgagtcagcgcctacggtcgggtcaggagctggtagcgtagatggcctccagcttccggaagaccgcacctggtttgtgttcaaaggcaaggtgaccgatttcccgttcgattttgcggctaacacagttgtggccacgtcggcatcggttcagcgttccggccctgcggtgtgggtgccgaaagtccaggctggtagctaa

SEQ ID NO: 171034 - DNA, 483 bp, Enterobacter cloacae
atgcaactgacgctcgataatctgaaaaaagccggggcgttcactggacgcccgattgaaaaagagatcacctggaagcagggaacagaggagctgaccgcaacggtgtttatccgcccggctggttaccacgctgctacccagggcattcaggccagtgccggaaaaattgatggcgtagctggttatatcgcggcggcgatttgtgatgaagccggtaacccgattttcaccgcgcaggatatcaccggcgaagcggatccggagcgtggcgcgcttgatggtgcgctgacggtggcgctgcttgttgcgattcaggaggtgaacgagctgggaaagatgagctcaccgctgaagatgaagtctggtgcgagctcgtcctcaacggtatcggcggaagaacgatcgccgaagcacaagaccgactcagcttcagagagttccagctctggctcctgtaccgcagccagtacggaggactga

SEQ ID NO: 171035 - DNA, 156 bp, Enterobacter cloacae
atgatgcggacggagtggggtgcggcgctgatcgcctccgtgctggcgaacgtcaacaaaggcaaggatactccctcattccgcatcagtgattttgcgcctcatattgacgagccgccggtatcgctggaagacgctatgaagacgtggggttag

SEQ ID NO: 171036 - DNA, 465 bp, Enterobacter cloacae
atgaaaaatcttggctggctgctttcgttaattggtattttgctcggtatatattctctattaatggatgtaaccgttccagtaggggatggaactaacgtagttaattttgggttgctttcattaaggcaaaatctaatcataatcgctgggtttttattcttgggtggtttaatagtttcagctctgagcaggaggaaacatgttcctttggttgatttcactgagctggataggattgacggcgaatactttgtcagtcgtaaaaatgaaaatgccaacatcgatatattagctattgacagagcaagtctaatgcttttacgtaaatatagtaaaagtagtgtttcggatattcttctgatgaatagcccacttattgataaatggttaacttcgatacctagcgagctacataaagacttcaagaaacaattagaggttaggttaaaagaaaacagttga

SEQ ID NO: 171037 - DNA, 2454 bp, Enterobacter cloacae
atggctggtaaatctcttggcaccctcacaatagatctcatagccaaggttggtgggtttgtggcagggatggacaaagcggaacgttcttctactaaatggcgtagacaggtagaggacaacgttaaagcagctaactctgcaatttcatcaattggcatcgtagctgctggggcagccgtcgcggccagtaccgctggcattgctttgctgaaaagcacatctgaacaaataaccgagactgaccgttgggctaaatccctacgcctgtcaacccaggaacttttagcgtggcagtttgccgccgaaaaagctggtgtttctggtgatcagatggcggatatcttcaaagacatcggcgataaaattggtgatgctgtactcaataaatctggggaagctgttgacgcacttaacgccttaggtttatcggcagataagctatcaaaaaccactccagataagcagcttttggctattggtgaggctttaagtaaagtctcaactaacgccggtaagatcactattcttgagagtcttggtaatgacttatcaaaactactcccgctatttgataataataatgaaaaattaaaatcattcattcagcaagcgaaagattttggtgttgctcccgatgccaagtctattaatgatttgttgaaagttaacgagctttttcaagatatagaagctcaagttaaagggctgaaaattgaaattgctagtggactcgcaaaagtagacttaactcaattaaataagtctctcagcgatgtaaaaaacatcttaaccgatccttctgttttgcaagggctggcttctcttgtgagccagattgctgggctggcgggatggatggcaaaggcagcatctgaggctggtaagcttgccgtagcgtcgggaaatagaatggccgccttaggcggtaatgtcgatatgtcaaatatcgatcagattaatgagcgtattgaatatctccagcgaaacctttctgggcggaacggattctattcccaaggcgagtctttcttcggctggctaacaggaggggatgacagcgtaaaaagcttgagcgaagagctaaaaggattgattgatcagcgtgaaaagttgtcgaagcaaaaaaatgctgtgactctcccgcccacaactcaagccactacagcgccaaagggttcatttgcgcttggagtgaatgaggttaacggcaagaacacggtagatgctggtgctaaaaaactggaaaacgcctttaaggcgaccgagcaggcataccagcgtcagatagcactgatcgacaccacaggtaaaaaggtggtcgaggtaacagagcttcagcgtcttcagttcgacattgcagacggcaagctggccggactcaacgagacgcagaaaacccgcctgtcgcaactggctaccgaaattgaccggctcaattctgttcgccgggcgaatgaagaaaacctcaaactggcagagttcaccgccgggctgcaggcgtccaaccagaacgagaaagcgtcgcttgatatcgatgtttctggtggctggctgggtgcgcaggagcgcgagcgtatgcgcgaccgtctgcagattcaggccgatttcctctctcgacaggcggatctccagaagcagtatcaggccggtgatataaccaaaacgctgtatgacagcgagacgcaggctctgaacgatgcgctggccgaacgcctgcagattcaggaggactactaccagcaggttgatgatctccaaaataacggtactgctggttttgtctcgggtctggccacgcaaatagaagcttccatggacctgtactccaacatgcagcaggttggcgcgcaggcattcagcagcctgaccgatatgattatcgagtgggctgaaacagggaagatgaacgtcaaggacttcgctgccacctttattcagtcgatgggcgcggcgctgctccagtatgcagctgcgcaggtagccatggctgcacttcaggcgtttaccagcatgatcggcgttccatacgtggggcctgctcttgccggttcagcggcgacagccgccgccgccggagcgggcgtgttaatgctgggcgtcagtacagccctcaaaggacaggctcatgacggcatcgactcagtacctgaaacggggacatggcttttacaaaaaggcgagcgggttactacagctaaaaccagcgcaaaactggacgccacccttgaccgtgttggcaggcaatcaactggcggccaggccccaaacatcaatatacccttggaaattcacggcgatcccgaccagcgcaccctgatgcttattgaaggtgcggtgatgcgtggagctaagttagggtaccagatgaccaccaacgatctggcgtctggagccggaaaggcgtccaaggcgcttaaaggcgggtggacggtaggaaggaaacaaggctga

SEQ ID NO: 171038 - DNA, 471 bp, Enterobacter cloacae
atggctatttcaacaagcataaactatccgcatgacgcactgcccgtaccgctacaggaagggtatgggctgcgccccgtaagtccaatagccagaacacaaatgaccagcgggcgagcgcggcaacgtaggcgttatacctcaaccccaactgtcgcaacggtttcctggttgctgactgatgctcaggctcaggcgtttgaggcatggtaccgcgatgctattaccgatggtgccgcttggttcaacatgaacttacgaacaccgggaggggaggcggcaaaagtttgccgctttacggatatctaccaaggcccagatctggagggcggcaacttctggcgctactcagccgagcttgaattatacgagcgccccttgcttccgcctggttggggaaatttcccggggctggttgctggctccgacattatcgatgtggcattaaacagggagtggcctgaagcatga

SEQ ID NO: 171039 - DNA, 483 bp, Enterobacter cloacae
atgacaatacttaaccggctttatgccagtggtggggatgaggtcatcattgatacgttgcagataactgtcggtggccacgactactggctgacgcggggatgggatgatgtaactgtcaccctggagaatggtgctcagtccacattcttggcatcagccatcgatgtggctttaccggcacgcaatgcagatggcacgcaggatctgaaattcgccatcagcaatattgagggagttgtttcaacagctatacgcgatgcgctggataatctcagcaatgcccggctgacctttcggcgctatttatctacagacctgtcatctccagcaaccccgccctttgctctcgcgataaaagaggggtactggacggcgacggaggtgcaaatcaccgctggctacatgaatattctcgatacggcgtggcctcgctaccgctacacgcttcccgtcttcccgggcctccgctacctccagtag

SEQ ID NO: 171040 - DNA, 381 bp, Enterobacter cloacae
atgttcaatcctgataaataccgttctgtcgagtggcagaagggcggacgcgcttaccccgcgctggactgctttggcatcgtcaacgaaatcaggcgcgatctgggcctggcgccatggcctgactttgccggagtcacgaaggatgataacggccttgaccgggaggcgcgcgggctaatggctggcctgacgcgatgtgaaccggtccccggcgcgggtatcgcctgttattccggctcgatagtgacgcatgttgctatcgtcgtggagatagatggggtgctccatgccgctgagtgtaatcctcgcaccaacgtaacctttctgccactggcgcggtttgcgcgccgatttatcagcgtggagtattatcagtga

SEQ ID NO: 171041 - DNA, 3093 bp, Enterobacter cloacae
gtgacgatccgaatttacccgtccagattaccgggccaaccgctggaaacacatcatcacgaaacccttacgctcagcagctggttcgcgcagaacgtaatcggctggacgccggaccatcagcacccggtcgcggtcgaaatcgacggtacttctgttacgccggatgaatggccgttatgtatcattggccctgacagtgatgtcagaatctatccagtgccctacggtaccggcgctgaaatagccctttgggttgcggtcagcgtcgcagtggcttcggcagcatactcgctctatatgatgagcaccatgcagacgggcggcgcatctcagcctggcaatggtgaccagcttgagctcaacccggcaaaagcgaacaccgcaaaacttggggatccgattcgggaagtcctcggacgctataaggtctggcctgattacgttgttcaacccatcagccggtttgactcaaccgacccaaaaaaattcagtaccagcatgtttttgtgtgtcggggtcggggatatgactatccccgcatcatcagtgcgtattggatccacgcctgtatctgcgttcggggatgatgtctcgtataccgtttatggtccaggtgctgacgtctccggcgacagccgctcagagaactggttcaacaatggcgaggtggggaacacaacgtcgggaacctcaggccttgacctgggttcgacaggaccgcagacagtcagcatcacggcagacgcagtactggtgagcggcaataccatcacccttatcgaagccagcgccagtgacgacgaaaccgaaatacctgcctcctgggttgtaggcactatcgttaacgtcattgcaccgaattcgtacaatgtggcgaatacgggaggctacagtgtgattttcggtgatgtagatgagctggcacccgtggtgggcatgccggtcaccgttaatttcaatgaatcggattatgacctgtttgttgcaagttacgctgctggcgttccggcggtgccgggcgtgggtgggtcgacagcaagtgtgactgcgagcgcagcgccgactacctatgatttcagctcatcacccgtgacgttcacgattagctgggatgggacgacctacgccgtatcgctgatcaccaattacgtcacgatgtctgggctggttaacaccgttacaaatcagctgacgggctccggcctggttgcccgtgacaatagcggtcgcctgcaaatcgtcgaggagaccagcccgtttgccggcggcagcatcagtcatagtgtgttaccggttgctgcattcgggagtgcgccggttgatgttgtgggtgtcgcatccagcggcggtaccgccgcagtcgaagcacatatcacgctggcctataacagcgctactggcaaaccttttacaggcatccctgacggcgttcagcgcatcggtattggctatggtgaaggtcagttccgtattacggcaattgatgatcaaaccatcactgtcgaacgtgttgtagtcactcaggatgccgcggggaatgatgtcatcactgtcgatgcgacctggccgggatttactgagcgcacgctgctggatgcgcaggtcaccggggtcaatgatgactacgcctggcttgggcctttccttgcctgccctgatggtgagacgacgaccacgattgagaacaatttcatttttcccaatggtcacattcagtacaactcaaagggcaacccaaagagccatagcgtgcgcgttctggttcagtaccgtaacgccgccaccgctggggcatggattacccggacatacgatttcaaaggaaaaacggctgatggacacggttacacgcgcaggataagcgggctggcggcggcgcaatatgaggtacgtgtacgccgtacaaccaaaatcggcggctcaaatacggtgaataatgtgtactggcaggcgctgcgctccttactgagggcgcgaccagccagttatgcaggggtcaccacaatggggatcactgttcgaaccggtaaccgtctggccgcgcaatccgatcggcgtatcagcgtggttcctacccgaatttacaactcagggcgcactgcacgtagcatcagcggtgcgctgtatcacgtactggaatctctggggttcaccgcagagcagatagacagcaacgctatagatgccctggagtcgacttactggacgccacgtggtgaggttttcgatttcgctacgggcgagagcacgtcagcgctggagatgctgcagaaaatctgctacgccgggatggggtattttttgctgactgatggactggtatcagctggacgggagggcataaaaccctgggtgggcatgatcacgccgcaggaaacaaccgaagagctacagacctcgtttaaagctccgtcgcaggatgattacgatggtgtggacgtcacctacatcaacggtacaacctgggctgaggaaaccgtgcaatgccgattacctggcaacatgacgccgatgaagattgagagttataaactggacggcgttctggatcaggaccgcgcgtatcgtatcggtatgcgccgtttgctcggttacacgctacagcgcctgcagcacaccacctcaacggaaatggatgcactttgctacgagtatatggacaggataatccttgctgatgatatccccggcagccagacactgagctgcctgattacggctgtctcatataacagcagtacgatcaccctgaccctgagtgaatcccctgactggtcgtttgaaagcccgagagtaattatcaggaatcaggaaggcagcgcctctttaatgcaggtacctacccgtattgatgattacaccatttctatcccgtacaacccatcgctggaggttgaaacatgggcgattaacgacccatacatagaacccccacgtcttttattttgttcttctgttcgcgtcccttatgacgcactaatcggcgaaatttccccgggtaacgatggaacaagcagcgtcgcagctgttcagtatcaccctggtaaatatgcgtatgacgacgccagctatcccggcgatgtcgcgtaa

SEQ ID NO: 171042 - DNA, 2049 bp, Enterobacter cloacae
atgacacaatacgccaccctgaatccgctggggtctaccagcccatacgatttattcgacaacgcgcagaattttgactttgctattaacgacattacgaacgccatctggcaggatcgcttcggtcgcactcggcagacctggtacgggcttgaacaactggccaaggcagccattgctgcgtttggctacatcaccatggactcgttccaggccggcgccacgctaaccctgcctaaccaggttctccgcgataccagtacgggtgagtattaccgctgggatggcgagctcccgaaaactgttcctccaggttcaacgccagcgagcgcaggcggcatcagtattggcgcatggttaagtgttggcgatgcggtattgcgcagtcaaatttcgaaccctgatggtgcaagcttatatcctgaactgcaaatggcccgctggcgtgatactggtgatgttcgagggtggggtgcagtaggtgatggcaccacggatagctcagatgcattccagttggccgcaacatatcttgacgctcatccgggtaaaaagttgacgataccgcagggtgctttcgttattacgcgaacgattaccggaaaaccatttctgattgagggtatttttggacaatcaacgatcgttgccagaaatatgtcaggattacctgtttttgatatgaccacaccctcaacagatattggccggaaaatcggatcagtaggaattgaatgggttgtcgatggggcaaatattgattgtgccattctaggaccaaaagactctgctcagtacgacacgtattttcttcgttacattatcaccgataactactgccgtgggaaaaaccgaaatttagccggatacagctttgcatggacaaacagcgccaccaggtggtttcgagttggggattgcgtcggagcgctgatttcgcataactgcattcagggtaaatttgatattaagctagacccttcagtgcaaatggaagagtgtggattcgagttcgatgctaactcagccattctttcagtcagaatgcatgataacaacatcggccccatcaaaaccggaattaacattcttaaccgcgtattcatgacgtttcatgacaacgacattattggttcactgaacggaattgtctggaacggaacaactaaatttaatgagccgaaaatccaccacaacaacattaacgcccagcaacacggggtagtggttgatggggccagttacattacatttaccgacaacactattcgccgacatagcgcgggatggaaaggcggttcatacgactggtatggctaccgaatcactaatggcacagatatcaaaatcctcaacagcaccgttcagccagacgaaagcgccggcgcattccctggaacgatgtttggttacgccctgactgattctgctaacggactggtaagtgggaactttgttggcgtgggctgcgaccagggcatcactcaggttaactgcgattcaattaatattgataacacgatgagcgcacaaagcgcctctgacgccatgctgtttcgtttcacatcaaacagccgccgctgcagcgtaggtcagtattcactggtttcttcttttaccggcaccgttctttcaaaagacgggacaatagtaaacgccatcagcatgctcaacgcgcaatacgatttacagagcaccgcaaacgttgttactgaaaaaacgcgcgtaaatgccgcggcggataacaaaaaatggcgagagaccgttggcacaactcagttaagtcaaagcatcgtttctgatagcggcactgctgtcccatatctaatccttaccaggaatggtgcaacgtcaatttctgtttatgaaattcgggcagaccgggttcgattaaacaatggccctgagattatcaccggcaccggaagcccggagggcgttgtcacagcagttaagggttctcagttcttaaggactgactcagtagaaacgaccgctatgtatatcaagcaaaccacgactggcaatacaggatggaaagcattatga

SEQ ID NO: 171043 - DNA, 219 bp, Enterobacter cloacae
atgacgatgatgaaggttattcgtgatgtgaatggaaaggttataaatattggtgactgggattaccgcattcacatcgaaccaatgccggacggaagtgaaatggaggttgaaggcaacccctaccctgaaggcgcaacagaaagtcaggaaaatgtcatcgtcggatggggtggtggtctgtatgttgagggagacccgagagctgaaggccattag

SEQ ID NO: 171044 - DNA, 438 bp, Enterobacter cloacae
atgcaaaccccatttcgtctgccgctgctgacggcgctgattctgacgaccaccgcagcctggtccgccgatgcgccggtcaaaggcggcacgctgatttatctggaacaacaggcgcacaccaacctctatccgcccgccggcggcttctacccgaacggcggcattctgaaccagatcaccgacaaactgacgtggcaaaatccaaagacgctgcaggtcgaaccgtgggtggccgaaagctggaccaccaacgccgataaaaccgaatacaccttcaaaattcgcccggggatcactttctccgacggcacgccgctggacgccaacgccgtagcaaaaaactttgatacctacggcttaggtaacaaggcgcagcgcctgccggtgtcagaagtgatcaatactacgatcgcagcgaagtggtcgacccgctga

SEQ ID NO: 171045 - DNA, 1011 bp, Enterobacter cloacae
atgcttaaatcaattcagtctcttagggggattgctgcgtggttggttgtcgttcatcacattcatcagatcatgcttccgtctggagtcggatataaatatgttgattctattatcctaaaatttgcctctggtgttgatctattttttgttatcagtggctttattatttataacagcataattggctcaagttcttccgcatttatctttctctctaaacgcttgtggcgcgttgttcctttatactggttttatacttttgtcgccgttatggcaaccatgttattgccagggatagttctgcaacctagtgtagaaattaacgaagtgatgaagagtttgcttttcataccatacatgaacacggagttcggggttcatcttccttttttaacagtaggctggaccctaaactatgaaatgtatttttatgtggcatcattctttgctttgttgatatcaagaaagaattatttgcttatcatctcttttttaataatctcaatatcttctattatcgcatgggtttccaatgatacttcattttacgctgacggagtagttaatgagtttttgataggtgtttttgtagggtggctttatcgctctggaataataaaaggaattaactcaaagttatgtttattgctgatattattggcattgggtttcatattagcttcgaatagctatcatgattatatatctgtaggaataccttgcggggttatagttctatgtttttctcttagcgagagcagattaaatggaagaaaggttattaaatatctttccatccttggtgattggtcttattcaacttacttatctcatgtcttagttatatgcatcgtgatgagggtttatgaggcttatagtttaaatataattgcatgcatgattgtttcagtgatagtgacagcttttgtttcttattatacattcaacgtcatagaatcaaagcggataccacattttaaaaaacaaacacaccacactgcaaaataa

SEQ ID NO: 171046 - DNA, 165 bp, Enterobacter cloacae
atggcaagtcaacaagacaacacacagcaggagtcgcaggaatcggctacagaatttacatctgtgagattctgcccgatttgcggcacacagatggttgttgagaccaaatacgaaatagaatgctgggtttgccctgaatgtgatttctgggatccggtatga

SEQ ID NO: 171047 - DNA, 1119 bp, Enterobacter cloacae
atggcactcacacttttagctgcaaacaatgcgcaaacagtgcttgcagcaggaattagcgcctccgctacatcaatgactgtaaacactggcacaggaaatttgttcccatctcctgtttctggggcaagtttctttaagttaactttaattgacgctgccacaggccaaataagcgagatcgtgcatgtaacaggtcgttcaggcgataatatgacaatcagccgagcgcaggagggtacgacagcaagggcgtggtcagcaaatgatattgcagcaaacatgatgacggcagggacgattagctacattatgtcaaacacacaaccgcttgacgcaatgttgacatccctggctagcctcaacactgttaacttgcagtttcctgtatttaacggaccgaaaagcatagggctgggtgcattaaccaatttatcattagactttctttcaaaatccacttcggctgatatgcttagtttgttgttggccgctccagttaatagccctacattcaccggcgatccaaaagctccaacccctgcagctggtgataatgatacgtccatagcgacgacagcctttgtcgctaaagcactgacaggttatcaacccaaaagcactcaattaaccgagtttgcaaacgttaccttggcaaactatacgttcccgttcagaaacggtagcggggttatgcagggtggagcgctttcagttttatcacttgattttctatcaagatcaactgcttcagatatgaggagtgtccttggccttggaagtgcatcccagagggatgtggggacatctagcggacagatccctgacatgggatcttttacctctgcaaaaagtcttattggttaccagagactgccaaatggagtcattttgcaatggggttcaggcaataccacaactagcggtgcgagcgttacatttccaatagcctttccaactacatgcacggcaatttgcgctaatgaaaggaacaatgccgtatctccagtagtggtcaatttctcaggcgttggcaccactggattcacaatccaggcatggaacactagcgccacaagagtagattcttatattagctggtatgcaatagggtattaa

SEQ ID NO: 171048 - DNA, 249 bp, Enterobacter cloacae
atgaatagaactattgtttctttttctaagtttcttttatcttcaattaacttgatagtaattttactatcaacactccttatttatttaattttcgacatgtggattcatgaaggaattccaccgttggaaaatttaaaattcagcattgcggcttttcttataataatactgttacttattataagtcattgcgttaagtatatcagcggtatatcgctatattgccaatgcgatattaaccgatga

SEQ ID NO: 171049 - DNA, 822 bp, Enterobacter cloacae
atgaagactttcacgcgcaccgtacgtgaggcggtgaagttctttctgcgcaatggctacacctcgcggcaggagctggagcaatggcaggccattatccggcaggcggccgaaagcgaaactgatgacgactacatgagcatggtgtcagatcggttgcgtaaggcctatgacctgcaggtgagcaaggctggagcgcttgagcgccacagggggctttcacgcttcacgctgaactacatggagccgaagttacgcagcgagctggatcgccgcatcatggctagcgctgacctgataaagctgaatcgcaagaaagccgttgacactactctgtcgcggtttagtggatgggccagcagcataccctctgccgacagcattgcgctgacaggcattcagggaacgatgagggagacagcggagcacattcagaaggccgccgagacggtggactacgaagcgcgccgcgtgatgattgaccagagccataagctgatcgccaatatcgacaacatcatcgcgacgagcaataacgcgattgctgccgaatggcatagccactggcgtcaggcagggtatgactaccgggaagaccacaaggaacgtgacaagctggtctatctcatccgcggaaactgggcgcagaaaaatggctatgtcaaagctggccccgccggctatctcgacgaaatcacacagcctggcgaagaggttttttgtcggtgctacgtcacctatctctacaacctccgcagcattcccgaggacatgctgacccagaagggccgcaagttcctggagtccatgaaagcagcatag

SEQ ID NO: 171050 - DNA, 192 bp, Enterobacter cloacae
atgaacagagcctcaccagttgatttgaggaaaagcctcgaaatcgccaaccatctggcgcatatcgggattcgcttcgtgccgatcccggtggcgaccgaggaagaattccagacgctggccgccgagttatcgcgacggcttgagcagatggcagtcgaagctgagaagaatgaaggcggtgcagcatga

SEQ ID NO: 171051 - DNA, 216 bp, Enterobacter cloacae
atggacatcatcgacacagcagcagagattgaagggcttcagcgtaacgctgccctttccgctcaccgcataaaccgcaacgccgtgtcagctgagcattgcgcggaatgcggcgaggatatcccagcgccgcgacgcgctgccgttcccggctgccaaacgtgtgcggagtgccagggtgttatcgagttaaagaataaacagagggggatgtga

SEQ ID NO: 171052 - DNA, 303 bp, Enterobacter cloacae
atggcttttgtatcacagcggaacatgaacgggtgggcaaaatcgccaagcgttagattccgaaaaactaaatcaggagcaggcggcgggagtgtcagcaagcaagttcctctgcgcggcaagcgaatcgacatccagattgacgaggaggcaaggcagttaaggctagggatagaccaaaaaggcgtctcctgcggagtaaacggctcattttcgtgctcgctgaatgtctttcgaatagtcggtgataaacggattgacctcactgacggcggggatggttggtggtacggaaaatactga

SEQ ID NO: 171053 - DNA, 1431 bp, Enterobacter cloacae
atggatagtattgataacaagtataatccacagttatgtaagatattattggctatttcagatttattttttttcaatgtagcgttgtggctatctttagggtgcgtatatttaatttttaatgaggttcatcgttttattccgcaagaacaattagactcgcgcttcttttcccatttcttactttcaatcgtctgtgtaggatggttttggatacgtttgcgtcattacacttatcgcaaaccattctggtatgaattaaaagaaattattcgaactattgtgatttttgccgtgtttgacttggcgcttattgcgtttacaaaatggcagttttctcgttatgtttgggtattttgctggtcgtttgcgctgattttggtaccctttttccgtgtactcacaaagcacttgctcaataaattaggcatctggaaaaaaacaaccgtcattcttggcagtggtgaaaatgcgatcggcgcatacaatgccttgcagagtgaagagatgatgggttttaatgttgtggctttctttgatgctgatgctgcaacgtctgaagtttgctctctacctgtaatacaagatgcagagaaaatttggagtttaaatcgcaccggagatattcattatatacttgcctatgaatataccgagcttgataaaacacaattatggcttcgtgagttatctaaacaccattgtcgttcagttacagttgtgccttctttccgcggattgcccttatataataccgatatgtccttcatttttagccatgaagtgatgttattgaggatacaaaacaatcttgccaaaaggacctctcgttttcttaagcgtactttcgatattgtttgctcttcattaatattgttagtcgcattaccactcatgatttacctgtggtacaaagtgacacgtgatggtgggccagccatttatggtcatcagcgcgtagggcgaaacggtaagttattcccgtgctacaaattccgctcaatggtgatgaattctcaggaagtgttaaaagagcttctggatagcgatccggaggcgagggctgagtgggaaaaagattttaaattaaagaatgatccacgtattactgctgtgggacgttttattcgtaaaaccagccttgatgaattaccgcaattatttaatgtgcttaaaggcgaaatgagccttgtcggcccacggcctattatttctgatgagttggagcggtactgtgatgatgttgactattatctcatggcgaagcctggcatgacgggcttatggcaggtgagtggccgtaatgatgttgattatgatacacgcgtctattttgatgcctggtacgtcaagaactggacactatggaatgacatagccattttgtttaagacggtgaaagttgtgttacatcgtgatggtgcatactga

SEQ ID NO: 171054 - DNA, 1431 bp, Enterobacter cloacae
atgaaccaggtttataatagtcgagatattatcaaaaattcaggcatcgcttttggaactagcggtgcccgtggtcttgttagcgattttacacctgaagtttgtgctgcttttactgtttcattcctgaccgtaatgcagcaacagttctcgttcgatacaatagcacttgcaattgataatagaccaagcagttaccaaatggctcaggcttgtgccgcggcgctaaagggcaaaggaattgatactgtattctatggggttgtacctactccagccttggcttatcaatctatgtcagattatgtgcctgcgatcatggtcacgggtagtcatatcccgtttgatcgcaatggcctaaagttttatagacctgacggtgaaattactaaagaggatgaaaatgctattgttcaagctgaagcttcgttcggatacattaagacagaagagttattgacttcctcgcttgccgctgaaaattatatcgcacgatatacctcgttattttcaacaccattcctgaaaaataaacgtattggcatttatgagcattcaagtgcgggccgggatctttataagcctttgtttaatgctttaggtgctactgttatcagtttagccagaagtgatgaatttgttcctattgatactgaagcagtaagtgaagatgatagtcgtaaggcaataaaatgggcaaaggaattacaactagatgcaatattttctactgatggagatggtgacagacctcttatctcagatgaaaatggaaattggttacgaggtgatgttttaggcttattatgttcactggaattaaccgcggatgctgtagcggttcctgtgagttgtaatagtatcatttcttcacataattactttaagcatgtgatgcgaaccaaaattggttctccttatgttattgctgcatttgctgagctagctgcaaattatgattgtgttgtaggttttgaagctaatggtggttttttattgggcagtgatgtctttattaaccagcacttgcttagagcgttaccaactcgtgatgcagtcctccctgctattatgctactttacagagcaaaagataatggcattggtgaacttgtttcacaactgccagcacgttatacccattccaatagattacagaatgtagattctgtaacaagcgtgtcattaattaatttgggactatcagaccccgttaagtttatggagtatatcggattaaatgattgtcagatattgaactcagatattactgatgggtttcgaattacattggacaataatagtattgtacacttgcgcccttcaggcaatgctcctgagctacgttgttatgcagaggctgacactcaagacgcagcatacaaacttgttgaaactgtccttgctaatatcgaaaagcaggttgggtaa

SEQ ID NO: 171055 - DNA, 1311 bp, Enterobacter cloacae
atgttacaaaataccatcagacggctgtctccacttttagctagtgatccagttgtcatctgtaacgacaaacatcgcttcctcgttgctgaacaacttcgtgcgcttgataaactagctaataatattattcttgagcctgttgggcgtaacacagcgcctgctattgcccttgccgccttttgtgctctccaaaattcagatgtggaagatccgctcttgctgattctggctgcggatcacgtcatccaggatgacaaagcctttatcggggctattaatcatgctgaatctctggctgctctcggtaagttagtcacgttcggtatagtcccaacacatgctgaaacgggttatggctatattcgtagaggtgatgcaattgggggcgatgcatttgctgtagcggaatttgttgaaaaaccagattatgatactgcacgtgattatattgaatcagggcaatattactggaatagcggaatgtttttattcagtgcaaaatcttatctgcatgaattaaaacatctatcacccgatatatatgatgcttgccagaaagctgtaggatatatcaacccggatctggattttattcgtatcgataaagaggcctttactgcatgcccaagtgattccatagactatgcagtcatggaacatacacagcatgcagcggttgtaccaatggatgccggctggtcagatgtcggatcgtggtcttcattatgggatatatcaaaaaaagatcagcaaaagaatgttttgcacggagatgtgtttgcacactgcagtgaaggtaactacatatattccgaaaacgcctttattagcacaattggtgtaaataacttagttattgttcagacctctgatgctttattggtagccaataaagattcagtacaagatgttaaaaaaattgttgattatctaaaagataataacagaaaagagcatgtacagcatttagaagtgtttcgcccgtggggcaaatatactgtaattgacaatggtgttaattacctggtccgacgtataaatgttaaaccgggtgaaaaatttgtcgcacaactgcataagcatagagcagaacactggatagtcgtgtcgggtaccgctcgtgttacaaaaggcgaaaagacttttttagtttcagaaaatgaatcaacgtttatacccgttaatactatccatgcacttgaaaacgctggcgtaatcccgttagagcttattgaaatccagtcaggaaattaccttggcgaggatgatattattcgcatggaaacgcgttttggatattcagagtga

SEQ ID NO: 171056 - DNA, 1155 bp, Enterobacter cloacae
  misc_feature (170)..(179): n is a, c, g, or t
atgaaactaaatgaggcgaaaatatctcttgttcatgaatggttattaagctacgcgggttctgaacaggtctcatcagcgatattacatgcttttcctgaagctgaacttttttcagttgttgatttcttaacagaagaacaaagaaagaattttctgggaaaacatgnnnnnnnnnntattcaaaagttaccaaaagctaaaaaatactatcagaaataccttccattgatgccattagctattgagcagttggatctttctgaagcagatattatcattagcagtgctcattctgttgcgaaaggagttattacagggccagatcaactacatattagctatgttcattctccaatcagatatgcatgggatttacagcatcaatatctgcgagagtctggtctgaatactggcgttaaagggtggttagctaaatggtttcttcacaaaatacggatttgggattatcgtacagctcatggagttgatcactttattgctaattcacaatacattgcacgtagaataaaaaaagtatacggacgagaagcttctgtaatatatccacctgtagatgttgaaaattttgaagtaaataacgaaaagcaggattattactttactgcctctcgtatggttccgtataagcgtattgatctcattgtcgaagctttcagccaaatgccagataagaaattgatagttattggtgatggacctgaaatgaagaaaatacaaagcaaggtaaaagataatataactttgcttggataccagccattttctgttttaaaagaacatatgcagaatgcgaaagcgtttgtgtttgcagcagaagaagattttggaataattcctgttgaagctcaggcctgtgggacaccagtcattgcatttggcaaaggtggtgctttggaaaccgttcgaccggtgggtatcgaaaatccaacaggtattttatttaagcaacagacagttacttcattgcaggacgcaatcgatgagtttgagaagacacaatcactattcacacctaatgcatgtagagaaaatgccgaaagattttcgcgtgcaagatttgatcaggaattcagaaactttgtagatgaaaagtggagtcttttcactacagagaaaattattaaacgttaa

SEQ ID NO: 171057 - DNA, 546 bp, Enterobacter cloacae
atggaacttggatatgaatatctattatgcattggaaataggaaaactcataagaatgagcaccgtataatttccgcttttgctaaagcagaaattaatccttctattaaactcgttttttcaggaaatccaagcgataatttagaaaaactaataatggagtgtgggttaggtgagcgtgttaattttttggggtttatttccgaccatgacttaccatcattatataaaggctcgaaagggttagttttcccttcattatatgaaggatttggattaccagtagttgaggctatggcttgtggtgtccccgtattaacttcaactacttcatccttgccagaggtcgcaggaaacgctgctatactggtagaacctacttcggtagatgctattacagatggcattacaaaattagttaatgattcgatactacgcgagcaattaatctctgaaggccttattcgtgcccaaaagtttacttggcaaaacgttataaataagatcgaaatggcatttaaagaggcatgcaatgaaactaaatga

SEQ ID NO: 171058 - DNA, 333 bp, Enterobacter cloacae
atgaattttaatgaacagcagtatgaaaggcatatgcagctatataatattttcggtggtgatgaaaataaatataatcctgtctttaagcctaataagccttggactgatgaagaactagcacagagggctattgatgaacatgcaaaggcacaggaactgattcacaagttcaagcagcatgaagctcagaaggagaaagtcagagcagagacagcagctaagatcacctctggtgaactgtctacattcaccttccatcagcctgagaagatgccatctagtaaaagctggttaggcaggaaccgaaggaagaagccaggcctagaatga

SEQ ID NO: 171059 - DNA, 768 bp, Enterobacter cloacae
atggaaagcgttaaagcagtaatcaagaaagctaacattaatgtagctgtaatgggtaacaaggcatttaaagatgctaaagatgctaaagaagctaacccaaagcttcaccatatgagcgcagagggtaaggctttgctgtgttcctttgaccagcgtaaagctgaggctgtgaagtttgccccattcattaaggtgaatgattcagcagaacaggaaccagcaattactaagagtgatgtggtgaagtggttcgagcaggaaggcctgtcactgaccatcaatgactttagcaagatgctggaaggaaccagagcagcagcagaaccacgcgctaaacgtggtgaagctaaagcggctaaagctgctccaatgtttcaggcggtggcgcagccagctacagagggtgtaaccatcaccaccgcacagcatgagtttttcaatgtgctgttagaactggttaagcgtgatgcaccagctattttaaccgccgcctatacagagattcagcgcaggaaaatagaagcagcacaagcgcgtattctggcagagttagaggctgagatgggcggcttagctgcgatgattccacagccagaacaagaggctagtaaatgggaatatgacgctgaaatcattgctaaggcacaggcggcattagacagagccacggcaggtgagaaagtaccagctaaaactattgctgtagctaagttggtattagcaggagcggctacagatgatgcacagcaagctttattaggctaa

SEQ ID NO: 171060 - DNA, 243 bp, Enterobacter cloacae
atgaaatacaatctaattctggcttgccttattgctaaccagctaaataaggctaatgactttgctttaataaatctcgtgcgtgagctgattaaagatactcaacctgacttcgataaagagtctgaaatgattgaatgtgtgctttatgccatgcgggatgcgggtattgtttgtgcatcggatgaaggtgtagaggctatgacagcaagcgtgatagacctcctgcatacaccagcttaa

SEQ ID NO: 171061 - DNA, 1023 bp, Enterobacter cloacae
atgcgcccttcctctcattttgttccggtcatactggctggatttgtcgccgttctggtgggttacgccagctcggccgccatcatctggcaggccgccgccgcggctggcgccagcgcgcagcagatcgcaggctggatgaccgcgctggggattgggatgggcgtcagcacgctggtgctttcctggtggtacaaagcgcccgtgctgaccgcctggtcaacgcccggcgcggcgctgctcgccggggtactgctgcagtttggcctgcacgcgtttgcgcatcttgaggggcactttctgctgtgcggcagcatgattgcggcatggctgatcgccaaagcgctgtcgccgcgctatgccatcgtggtcacgctgctggtgggcggtatcgtggcctgggccggtggtgacgttgtcacggataagctcacgctttcactggtgatgcccgaatttattgcgcccgccttcaccttcaccagcctggtgagtattggcttgcccttcttcctggtcaccatggcctcacaaaacgcgccggggttcgccacgatgaaagcctccggttacccgctggcggtctcaccgctcatcatcgtgacggggggactggcgctgctgttttctccgtttggcgtcttttctatctgcattgcggccattacagccgccatttgtcaaagcccggatgcacacccggacgcggataaacgctggctggcggccatcgcagccggcgggttttatctgctggcgggaattttcggtggatccattaccgggctgatggccgcgctgccgctcagctggatccagacgctggccggtctggcgctgctgggcaccatcagcgggagtttatatcaggcgctgagtcacgaagcggagcgcgacgcggctatcgtcacatttctgacgaccgcaagcggcgtcacgatcctgggcatcggttcggcgttctgggggctggtgctgggcggggtatgttacgccctgttttcacgcgctcgccgcgcgtag

SEQ ID NO: 171062 - DNA, 1524 bp, Enterobacter cloacae
atgttcaaaaaaatatctatactatatgcatctcaattatatcgagctgcatttccgttattgttagtacctttgattataggattattaggcacggagcgatatggaatagtttcattctttactatgcttataacacttatggggttgttagatgcaggtatcagtggaacatttgtgaaattaatagcgacaaataagtatcaactcgtaagtttcgctaaagtaattagtttgtttttgagagtcttttgtggctttgtttttattgcttgcatagttgcatttatttttaactatttctcactatttatagtaaatgattggttgaaaacaactttatctaacaacgaaacattattttgcataaaattgataggtataattttagcactattatatttgcgatcttatttacaaagtttcataaatggaatggaaaggcaagatctcatagccctatggggaatggtctatacaacttgtttttatggtggcggttatattgttcttgcctattactcgaattcattagctgctttctttaaagtattgctggctttatctgttttagacgtcatcgttacggcttattgtgtttactacgttatgcgcaaacataataagcaactggaagaaaaagacaataataatagcctatatgaagacgatgatctttcatttggaaaagtaataaagttttctctacaactttcaggcttatcaatgatatgggttatagcaagtcaagttgataagatagctttatcgacatatacaacattaacaaattacacacaataccaaatcggtggccaacttagtgcggtaatcttgactctagttattcccttgtcacaaattttattgccacgattgagtgcgttaataaaagaaaaaaacggaaagcaattcatatcattgttcagctatagttctatcgcatatgttcttctccttgcaccattagttccgtatatgaatgtgtttggtaatgaactgattgccttgtggcttaaaaacgatgagttaggcattaccgtaaatctttatgctaaatggctcgtgtcagctactttttttgccggtataatgaattttatattcattctgttatactctattggaaagttaaaatatcatttttatgcatatgctagttattcagcattaacaattccattgacaataattattgctaagtattttggtccacattggtctagtattttctatctaattcataccgttctatttcttcttatatggggtggttattgtcttcacaaagaaatgggctcttttgtgataacattgacccttctaacattctttatattattattttcaacgcttatttttgagagtataaagcgtttctctttattttctgattataaatatgcttacatatttgggtctccgctaataaattttgttgttttgtccgttggggtattggttctacgtaattatatttttcaagcgatagctaaagttaatttaaaaaatattaatatttaa

SEQ ID NO: 171063 - DNA, 1125 bp, Enterobacter cloacae
atgattccattcaataaaccctatttacatggggatgaattagtttatattgcacaagctgcaaaagacggaaagatttcaggggacggaaaatttactaagaaatgtcacgagttctttgaaaaaaaatacaattttaaaaaagtattacttactacttcttgtactgacgcacttgaaatggcagcaatattgctggacattaaaccaggagatgaagtaattgcaccttcgtatacatttgtatcgactgttaacgctttctcattaagaggagcaaaagttgtatttgctgatagctatactaacaatccaaatgttgatccagactcaatacgtgctttaattacaccacaaacaaaagcgatagtagtagttcattatgctggaattgcatgtgatatggataaattattggctatatctaagcaatataatattcctattgtcgaagatgctgctcaagcgattgattcatattataaggaacgcccactgggaagtattggagcatttggaacgttttcgtttcatgaaacaaaaaatataatttctggtgaaggcggcatgcttgttattaatgatgacaaatatgtcaaacgagccgaaataattcgtgaaaaggggactaacagatcttcatttttcagaggtgaggttaataaatatggctgggttgatattggttcttcatttctcccttctgatatcaacgctgcttatttatatgcacaactcgaaaatatggatgatattcagaacaaacgtaaagagctttggcaacgttatcaagaaaaattaacaccacttgcacagctaggacttatcaatctacctgtggttcctgagtatgccactaacaatgctcatatgttttatatcgtatgcagcaatatcaacgttcgtactgatttaattaaacatttgaaggataatggtatacatgctgttttccattatttatcattaaataaaagtgatttttatttatctactaacgaagatgtaaacttaaaaaatagcgatttgttcactgacaacttgctgcgccttcccttattttatgaattaactttagaacaagttgattatatatgctccaatataactgatttcttccgatag

SEQ ID NO: 171064 - DNA, 543 bp, Enterobacter cloacae
atgaatgttatcaaaacaaatattcctgacgtattattgattgagccaaaagtgtttagtgatgacagaggcttcttttatgaaagctacaatcatacgaaacttgaggcctgtgtcggtcgtacccttacgtttgttcaggataatcattccagatcaaaacgaggagtattgcgtggattacattatcagactgggcctcatgagcagggaaaattggtccgttgcattgtaggtgaagtttttgatgttgcagtagatatccggccggattcagaaacttatggtaagtgggttggcgttatattatctgcagaaaacaaacgacagttatggattcctgaaggtttcgcacacggttttgccgtattaagcgataatgcagagtttatatataagactactgactattatgcacccacagcagaaagaagtattgcgtggaacgatcccacgttaaatatcgagtggcctttagacgaaaatgaaataatactttctgtcaaagatatgaaagctggcagttttgcagatttaaaataa

SEQ ID NO: 171065 - DNA, 900 bp, Enterobacter cloacae
atgaatattctgttgttcgggaaaaatggtcaggtaggctgggagctacaacgggcactcgcgcccctgggaaatattatcgcccttgatgtgcattctaccgatttctgtggcgactttagtaatcctgaaggtgttgctgtaaccgtacgaaaaatacgtccagatgtggttgtgaacgctgctgcatacactgctgtggataaagctgaatccgaagtggactttgcacaattgcttaactccacaagcgtagaggctattgccaaagctgctgctgaaataggcgcgtgggttgtgcattactcaactgattacgtttttccgggtaccggtgatgcgccttggcttgaagaagatgccactgcaccattaaatgtttatggcaaaacgaaactggccggtgaaagagcattacaagagcattgtccaaagcaccttatttttcgtaccagttgggtttatgctggcaaaggcaataactttgcaaaaaccatgttacgtttggctaaagagaaaactgaactttccgtcattaacgatcagtttggtgcgcctaccggtgcagaattattggcggattgtaccgctcatgctattcggattgcacagaaaaatcaggaagttgctggcctttatcacctcgtagcgagtggtgtcactacatggtatgattatgctgcactggtattttccgaagccagaaaagctgatgttgcacttgcaatcaagcagttaaataaagtaccaaccagcgcttacccaacccctgcatgccgaccaaataactctcgtcttaataatgaaaaattccagcgtacctttgggcttgttcttcccaattgggagaaaggagttaaacgtatgctgaatgaattgtttgctgcgacagcaatctga

SEQ ID NO: 171066 - DNA, 1767 bp, Enterobacter cloacae
ttgttagtttgggggggcacaatgaaattagattggattcttcagaaaaaagagacacagcgtcgatattcaaatgcgacttgggtgccattacgtgcaactaaaaccaatgagcaaggttgtgtatataaaataggctatgaaagtgatttttttggatgcggatctattgccgttccagttgatttaaaagatcgtgctgaagaactgagctggaacgatttaggcattgtagaaaccaaaccatatgcctatagcgatggacgatattcccctgttgagcagtatgagtataatgataatgaaccattaggtattcacttggtttttgattatccacagccagttattgataagaatatttggatgttaattcctgatatgataattgctctacgtcttgtaaaagagggtaatgtttgggtaagacccgaagaaaattttgttgaggtggttcgggagtattttgatgataagggtgaaccaaatttaattgaaattaaacgtgaattcctaaatgattatttatccgcaagaaatttgtcccttcgattatcatattataaacaacgtattataaatattgcttcccttgagaatagtgaattcagtgagttaccagatcatttaaaagaacagagggatggcggtagttttcaactgagcgtttgttctaatgacgaagtctacggtggcagttgggctatgcttcgagcatggaggacagatattgatgaggaagatgacgctcctgttatggggccggaaaatgaaagtaatactgcctatgaaaaaaaggagggcaatcgtcggggatatgaaggtattcgcattgaaggggagttctggcgggaggagtggattgaacatccaggctttagtaaacgagtacgtggagatgaagatcctaacctgccaaattttattgttgaaactgatggaactcggctcgcttcatctaatttgaatagtgaagatgttggccgctggttatggtttcgttcaagcatcgtaaacgaacttttaagctttcgcggattttccattaaatggttttcagctgaaacaggtgctttaatttctgcttcgcgtaatcatgtccattttggattaaatgcagcagatttaattaccgtttacgcttgtgatattgctcgtctggatagctgggagcagcatgtctgggctgcacacaacgtcgttcctgatggtaaggtttcatctgaacttttgtctgcgcaggttagagcaatgcctgctaaaacttatgccgttgaatttttattttttgaagttatgaaaatgcttgaagatgtttttaaggaaaagtacggcgtttcactattttcacatgatattgacgttaatgaggctagtaatactatctcaagatttgctagcagagatcaagcatccttacttcggttggctaaagatattgtaaggctattttcagaacgattaaatatacgggaacttcgaaagatatctactcatgcggataaagagaaattaggttctaataagttgctgcaaaatattttagctcagaaaattggagaagaaaaagcgcgaaagttttttgggccgatagttggtgcgtatgatatgagactcggtgatgcacaccctacaagttcgaaaattggggaggctttgacacttgcaggaattgatgaagggatttcattcttacgtaagggtgagcaattaatatctaacgtgggtcagtctatctggtttattgggaagtatataaatgaataa

SEQ ID NO: 171067 - DNA, 753 bp, Enterobacter cloacae
atgaataaaataacaacacagaatgatgtggcggtaactattgacctatgtaaaccttttgagctcccacttgaatacatagagcgactaaatagcatcaaggagcttagtgtgtctactgaattttcagatgagttagtggagaacaataatgtccgagggttagtgagagatattaatgaatactgtatgcaaaacaagatagtcggtattcactatactagagctgaacctggaagcattttagataaagggttaacaataaggagtggtaaagaaataagagatgatttcttaaaagaacatggatacctttttacagatgctgaattaacgtacatgaaaagtgtttggtgtaaatattatagccatcagcaaagttcagttagagacgggagggtgtttttcaatttcactgaaacagcattgagtaatagaggtgcagattttttactagaaatgtatggcggagaacaagttaatatgtgtttcgaacctgatgaatctattggctcaaaattaaacttaattggcaagtcaatgattgtaaggtgttctttagatcctcataaagttaaaacatttattgaatatccttggggtaaaatacttatgtcctcatatcattcactattgaaccctgacgtttatcgaatcgatcaagatggttatcagttcgtaccagttcaacctgaagatatccttgatatcaaggtattaatccgtgaagatggcatttggaaaagtttgtaa

SEQ ID NO: 171068 - DNA, 474 bp, Enterobacter cloacae
atgcttaacatcgttttattcgaaccagaaattccgccgaataccggcaatattatccgcctgtgtgccaacaccggttttcgtctgcacattattgagccgatgggctttacgtgggacgacaaacgcctgcgtcgcgcagggctggattatcatgaatttaccgccgttattcgccaccacgattacgccgcgtttctggaagcagagcagccgcagcgcatgttcgccctgaccactaaaggcacgccagcgcacagcgccgtaagctatcaggcaggtgactatctgatgtttggcccggaaacccgcggcctgccggccacgattctggatgccctgcccgctgagcagaaaatccgtattccgatgatgccggacagccgcagcatgaacctgtcgaacgcggtgtcggtggtggtgtatgaagcatggcgccagctgggatatccgggcgccattctcagaagttaa

SEQ ID NO: 171069 - DNA, 2355 bp, Enterobacter cloacae
atgaaattgattgttaagcgcctagcagtacgtaattttaaagtctttaagaaattagatttaactcttgaaagtgagcatcttgttgttcttgacggcccaaatggtttcggaaaatcatctttttttgatgccttggagcttttgctgacaggaaaaattcggcgctatatcgagctcgaagaacttacagtagatagacgcagtttgaaagcgggatgtccttggctattcaaagaagcgaatgatgatgattggctctcaatccgtgccgagatcttagttgatggggtaagttattttcttgagagggctgtcagtaaatcagtgcttgatgaacataaaggtgttattgatttaaagcttcctttatatgaattagccgattttaattcggaacgaggagaggctatttcgcacgaggaaacatatctctctatcttgctaggggagcaatatcaacgtgattttgaattgttccattatgttgagcaagaagaaaacactcgcttactaaaacaaaaagaaaaagataggcagggccagattgctcatctattcgatattggcgatattcaagataaaattaataacattaatctggcttcaaccaagataggtaagctgtgtaatccgcagaaatatgccgagctgaaccagcttaaagataaatgggaactagctaaacaacaaatgttaccggcaggtagttcggtcgcatatgaaaaaattattaccattacagatcaaccatgggatcgtgatattgtggaggttgatgtacaacagttcgaacagtggttatctgcagatggagagttattccgcattcaacgttttattgaaaatttcgaacaatatgaaaattatttgtataacaatgcgttggtaaaaaaacttcttcctaaaaaggagttgcaacaaagatttttgatgtattatcgagttcttgataaaagggaacaatggcaggataatgttgcttgttttgaatctgttttgacactgagtgacgcatttaaagatattatcaaggctattagtgaaaatcgtttggtgctcactgctccgctagtcacactcctaacagaaatcctctccccggatgattttcaccaacaggtcgccgtgctcaaggcgcagttaaccaattcagataaggttcaggagtgttatgcggctatgctgcaatcgcgtgagcaaatggtaagtgctttcagagagcatcaagctcactatgatttaactaatatttgcccaacgtgtggtcattcttggccaacggcggatgctttactgcaaggaattgaaaaccaacgtataactcttgaaaatttagccgagcaacagaacgatcaattctcacaagcattaactaacttcaggcgtaattggcaagagccgattgaaattatactccataagtatattgagaaaaataaagaaagcattgaacgaaagcgccagttaacgaacctatcagaggagcaaattcattggttagaaaactatcataatttattgcgagatgaagggattgattttcaggatttactatgcgaaaaatttgagcctttaactcaacaatcacaagatgatttcgtccaacgtatttatgatagatttagaacagttgatgatagccttattcatgatgattttgagaagatttaccgtgaggttttcaataacgattctaatgcggttaaatatgtttccattccgaagatcgaacaaaaaaaagtatatttaatacaacaaaaatcaattgcatcgtccaaatatattttagagtgtgaagatgcttataaaaaggctgttttgtcttttaaaaaggccgaaaaactaaaagggcatcttaataaaattaaaaagatttatgagggtgagaagagagtatatctagagtcaatagttaaagaaattgagatattatttcatatctattctggtcgccttatgcaaagctatcagcaagggcttggtatcttcatagagaatgatggtaattcaatcgctttcaatgaaaaacctgggcaagagcatgatgccgtcttttccatgagttcgggtcagctttcagcactggtactttcctttactctagcattaaatcagcgatatgctaaacattcactgttgctcatagatgatcctgtacaaacattggatgaaattaacatagctggcttcgtcgacttactgagaacagaattcgcagggcgtcagattattatgtcaacgcatgaagaccgcatgtcagcttatttccgttataaatataaaaaatttggtatgtcggctggaagaatcaattttatggaggaggcacgttcagctattgttaatagatga

SEQ ID NO: 171070 - DNA, 705 bp, Enterobacter cloacae
atgtataatctgatagagcaattatttgaatcgcaaggactgacgcgaaaattccccacagatttagcgttatatgaatatagtgtttcaggaaagaaaaacttctggttagtagtctttggagaaccaataataacagctgaaatacaggcgagatggttgaatgaatgcaaagcagtgacatccgatcctgcgcttgaaaaaaatatcaatttattaattgtatggaacactgacagctcaaatgttctttcaagtgaaagaattcatcatgcggaagaagatagctttttcttcaagaaacacgtgcttccttatactaatgcagagcttgaagcattatatcagcagattgatattcagagaattgcggcggtatttcaagaattggtcacttctcctaacacatttgtagaatataaatctcattacctacaaggtggatggcaaagcctactatatagaattgctataaaactcccttttatcgctgttaatattttcgataactctaatttagcgagccttgaacgtagtataactgaaaagattcagcgaacagatgatccttctcttctaaaagcaatcgacaagggtattgacgctttagctgattacattgtgtcgcaggatgtattaccagaagagctattagttctcttggatgacaaattatctgaggcaggttatgaaattgattgttaa

SEQ ID NO: 171071 - DNA, 1308 bp, Enterobacter cloacae
atgacagtagctcctcaaccttttccacacacagctatatctacatggagtgggtttgtctatcaaggcaagctggcgctttaccattgtttgaagatgatgttcgcagattatgaagctaaccgggatttgagactgcaattagaaagccaggatgattttgcaatttttcgtcaacagcaatgcatgtcaatgcatcaggtcaaagcgtacaaggatacgcacttctccgcttatagagatggcatcagtgctcaacgggataatgcgagacagagaggagtacacttggcctatttccatgtgactcgagcagtaacgaacatcccggcaacatttgagaccgaatatggaccagtcagattttacacttatcctgttctgcaggctacagaagggaatgcaacacaatcattttgcccactgaatgaagtggacgcaatgattcgaaataaaatttccaatctaatttctaacgtcggcgctctccctgcttggaaaattaatgttgttgcaaatatccaaaatacacttgaggcaatagttaatgctaaagtcattttaactcataatctaatacacgattctttgcgcaatcagagggcaattgcagcaaacgaattcatagagttttctgaattgtatgatgtaatcgaagcagatgattatgctccgtttgaaaatgagtctttcttccttagtcgtctgcagatcgatattgggacatattaccaagagttttgtgagagccagaatgatctttcccaaaatgcatgtcaaaaattggatgactatctggctgctatcaatgctttggacattgaaggaatgaaggcattcctacgagcaactatgccgcataaaaccgggcggtttaagacccttaatgagtttaaggaccagtcactcgatcgtgatgcaatgcgacttgggatgtttacaattttctggaaactaattcatgcttcacaacatgaaggttctagcgtggcattttcttggcttgacaacgggcgtttctactatccaacaggcatccaccatgctacagagcatcaggatactatatgtcatgacatcatgaagcaggcaattagcgaagatgtggaatgtttatttgagtgcggtgtactcattaccagtgctatagacagaccctcaatatcagatgtgctcgtaagtattgacgctaccgagggagttgataccgatgaaaacgagttgatgagggaacaccgaatcggaaattataaaagggtagcaatggtttctttaaataatgtacctgagagtttgaaagatgtataa

SEQ ID NO: 171072 - DNA, 147 bp, Enterobacter cloacae; identical to SEQ ID NO: 99796

SEQ ID NO: 171073 - DNA, 462 bp, Enterobacter cloacae; identical to SEQ ID NO: 99802

SEQ ID NO: 171074 - DNA, 390 bp, Enterobacter cloacae; identical to SEQ ID NO: 99806

SEQ ID NO: 171075 - DNA, 417 bp, Enterobacter cloacae
atgttaaaggaaatttggaagtctattttttgctttatgatcgtgctttctagctttagtgcatctgctacttgcttaaaggaaggggataaagtaagtctgacaggagttgttagcgaaaaattatactacggccctcctggctggggggaggataaagcgaatgatgagaagctacatgagtggatattgcatttaaaacagccactcacgtgtgtaacagacgcagatactgacaaccaaaactggaatcaggacgttcagttgataatgcgtgatagtaatgactataaagcaaataaaagacttctaggaaaaagtgtcagtattgatggcgtaatatttcttgcagagaccggatatcacatgacgcctgttttattagatgatgccaagtttgaagttgcaggcaaatag

SEQ ID NO: 171076 - DNA, 1842 bp, Enterobacter cloacae
atgcgctttataaatgctatttatcatgcatcgacaaaaacggtagaatatgagtcatcaaatggcacaagattgttaaaaactgggggctcactgaattggcgattcaataacccaggaaaccttatttcggtaaaaaatcagaaaggaaaaatcggtattggagttgtctacaatccagacaaacattcattcgcaatattttctagcatagaagctggtgataatgccaaacgatctctgctcaaaagaaaatataaggattttactattccagaaatgatgaaaaaatatgctccggggaatgatggtaataaccctgaagcttatgccaattttatcatgtctgaaagtggggtcgctcagggggagaaagtaggagaacttgacgattcaaaattcagtaaggtaatcaaggcaattagcaaaaaggaaggtggcttgaagccgggcaccgaaaaatgggtgtatgtgacaaatgtgactgtttcagacggctcccgcccagttgctgatgtgccatttaaagtgacgctcggaagcactagctacgagtggaaaacagacgcttacggcaagctcaagacaatcattcatacgaaacaaggaatggctattgtcgtcaaatatactaattctgctggaaaagaggatgttgtttattcagcagttgctggggatgaaacgaagaatatactgctcacgcgaaatttttctcaattctctgcaaaaactcttgccgatactcccaaagttccacgtgcgaagagtactcaaaaaccgattgagtatacagtcatgtcaggcgacactctctcgaaaattgccgaacgttataagacaagcactgatgagattgccaaaaacaataatataaaagatgtgagtaagatcttccctggccagcatttgactatatatggtgtcaatgctaatgggccttcgaactataccgttgttccaggggacacgttggtgaagatcgcagaaaaaaatggtgtgtatgttgatgatattgcgcggcagaataatatatcagatcctaataaaatatacccgggacaatcaatttctatagacaaaagtggcaatgttacgtctggtcaaactgaaaagccagttgcaaatccgatagcctcaaaaccagctattaaaaaacctgaaaaaaatagtataaacaatgaaaataaaaaaacacttgattcagttggagggaaaaattctggtaatccgattgcgttactacctcatgatcagagagaggctccgtggatggcggttgcattcgaggagggagagactcgatggaaatgggggcgtgtaaaggaaggcgatggcggaataaactaccataagaagactggcattaatatgtcttccatggttggtaattctaatccgtggtgtgcttcttttataaattattgccttaaagagtcagggtattcgacatctggtagcgccagttctcaatctttctcgaaaaacaaaaattttataaaaatatctcaacctatatacggtgcaatagttgttttgcggaaaaaaggatcttggacagggcacgttgcttttatatactgtttttttgaagatggtgaaataggtgtgcttggcggaaatcagggagatagtgttactataaatccattgtatcaagtttatataaatgggcggttacattatgaattgatagggttctatgtacctaagccatattatgcttatgcacaaaaaacaataagttcaggtttgaggaaaacaacaatgtctaatattgcagagttgcgtgaaagccttggagccaatctaccctcgaatgaagatgaaagaacaaggtga

SEQ ID NO: 171077 - DNA, 495 bp, Enterobacter cloacae
atgaagtatcattatgttttagcgttgtcactttgttacagttcctctgtactggcagtagagtgtatggataaatcaaatatagattctctaagagaaattttcaaaacaaataacaagaaattgttgattgaaatggcttcaaaagaagtgaagcgatatattgaaagtgacttacttatcaaaaataaatacagtacacttgttaatgtatctgaggtttactatggttggggagtggacaaaaagtctaagtatcctgttaacacatcggcagttttcccaaatgaaaaagtgtgtgtatggaatgtatcttttgcactaccggagtctatgagaaaaaaatgtgatgatgatggtgcctatgggtattttattgaatttaagaaagttaatggggaaacagttctatataagtttacctctttgtttgactcacttcctgacggaactttagcttgcaaaactgcaaataagtttatgctacaaaaatag

SEQ ID NO: 171078 - DNA, 558 bp, Enterobacter cloacae
atgaattgttattcggcacttttgctgctgtttaggttgagttgcatattatttttgtacccagtgagctctacttttgctaaagatctaacccctaaagtaaggtggaaagacaattctggtgagcatttactggtgataaaaaaggagattaaccagaataacattggagaacatttgtcagtaaaacaggtgacgaagggaaaggatgattggattctaaatgattatgttaatgactgtgaagtggatattaatctgaatttgataaaagaatcaattgaagtaaacaatagttttgccgatggcgaaggcactgttttatttgcttataaaattggatgtattggtgggatagacccagttactgtaaagtatttcgcgtataaaaatggagtaaaatattccctacgaggggaagagcatatcatagttgaaaacggtgggtatggtggagaaagccctccggttccagattacaatctaaaaaacgataagcaacggctaaattacatgctgaagaaatggaggtctatttcaacgaccaaattaaattga

SEQ ID NO: 171079 - DNA, 1143 bp, Enterobacter cloacae
atgccaacagaaggtttttatctggtgcagggtgacaaaacgacctgcggcgggagaattacctcgggcgccgaggatcacactctgtttgataaactggttgcgcgtgagcaggacagcgtgacctgtggaaaatatcccgggctttacaggatagccggtggcatcgacaacgataccatacacggcaggcgaatggccggaacactcgatagctacagtacctgtccatgtaaggctaagtttattccgtcgatgatgaatgatacgtatgagaagagttcggctggtgcaatttcagatgcaggaggagctggaaagacatcgtttctggctggctcacaggctgatacgatgtttgctccgggaattgattgtagccagtctggtcaatatgaccttgcgggagagtgtattgcagaaacgaatgaactgagtgatggcgttttcctctggacagaaacccaaggtgcaggacatgctttcgtttcaatacactttaaaaatatgatctatgtgttcacctatggacgatatgatcaggaaggatttagtcctgtaggtgaaggcgtgttgattaaatattccagcgaaagagcggtaaggttttacgcaaaagaactttatcgaatgagggcgtcagtttttaaaatactggacgtcgatgaatccaacacgctatcaatatttaatgctttatggtcatccagcagcgttcaccctgatggaaaaaataccagtgcggaaataaaagaagatgggtgcgttattgatagatataacctggcagttaacaactgtactacaacgtcagtaacgggacttaaaaaagcaggtacaggaatatttgacgtgagactgctagactctttgggttacagtgaagactttgcgatcccatcgtctttgaatgcttatctggaggatttagctctaaatccagctgatatgcgaataattaaaatgactgacgaatttaagggcagctatcataacgcttcagattataaagaaattgatggtgtaggcagcggtaatgaaactgccggggcaataggcaaaggaagtgggctcaccggaaaaggctcgagcggttatgcccctacaacattcagccaatcccagggaattgagaatgattaa

SEQ ID NO: 171080 - DNA, 252 bp, Enterobacter cloacae
atgattaagcgtatactgctagcttttgtgcctgtagccttgtttttactggtcagtacaacaattctttccctttcactcatggatatcaaatacacttttgaatccgtgttaattggaacaactctggattatttggttgacgaaacctactccattgtttggctgttttatggttcttcgaatattgcttttgttgttatttatattgtctctcttatggtgtttaagcgagtaagcaagaaatattag

SEQ ID NO: 171081 - DNA, 540 bp, Enterobacter cloacae
atgaacgagattaaaaatttttcagagcaaaatctaaggaaaatccctgattttttaacctatgagcctgataccggtgcattcaccagggttaagtcaaccaataaccgctcgaaagtaggtgaggttgcggggacggttaataagcagggttatgtgcgtatcgcgctattcggcatgtgttttcaggcgcacagattagctttctttttcatgacaggaaaattacctcctgccagtttggaggtcgaccatatcaatggcgatcgagcggacaacagatgggtaaatcttcgcctggtttctcatgcggtaaatatgcagaactccagaataccaaagcacaacaccagcggacatcccggagtcttgtatgtcaaggctaatcgtaaatgggccgctcgaatttcagtgaatgggaggatggttcagctgggagaattcattgaaaaacaggacgcaattgaatgctatctggaagccaaaagaacaaggcatgaaggatttattgggattgaagggaaagccgcggtgctgtaa

SEQ ID NO: 171082 - DNA, 372 bp, Enterobacter cloacae
atgagcactattaccaaagagcaggcgcagaaaatcattgaagcagccgatgaggttattaccgctctggccggaacaaacgaggatgttcaccccgaaagcgacagcatgctccgtttatgggatgacttgaatgatcgttacgcaccgccggaagttgtgcgagagctggcgcgtatcgcgctggcatcgctcgaagcggagccggtggcgtatatcattcaggacgctgacgcccgtagtcgcggagagaaaggcatactccgctatttcgcaaatatcagtgatgaggatataaacgagtaccaaattaccgtaacgccgctatacaccgcgccgccatgcttcagggaggtaaatcatgaccattaa

SEQ ID NO: 171083 - DNA, 342 bp, Enterobacter cloacae
atgaaaatgcataacgatccccactcctggacggagtttatcgaactactccacagttggtggcgtggcgaaacgccgatgggtgccgtattgctatcggttgtcatggccgccatgcgaatcgcttacggcggtggcggctggaagaaaatgctccttgagggggcaatctgcggagctctaacccttaccgctgtgtcagctcttgattactttaaccttccacagtctctgtcgatagctatcggcggcgcgctagggtttgttggcgtagagcaggttaaggttatggcttcccgggtgtttaattctcgctttggaggcggtgatgcaaaccagtga

SEQ ID NO: 171084 - DNA, 258 bp, Enterobacter cloacae
atgcctgatatttcaaccccaaatctggactatgggaacatggtcgaggcgtgggatatcaacgatgccctgatgggcggcacgctgtatatgcgccagctgggcgagtcctatctccagcgctggccgaaagaaaacaaagaggactacaaaaaacgcctcgctgtggccacgcttttgcccgcctacgaagagaccattaagcaaaacatcgggcgcgtatttgccgagcccattaagcttgccgagaatgggtaa

SEQ ID NO: 171085 - DNA, 261 bp, Enterobacter cloacae
atgggtggcgctttgcttgtcatcgactcgtcactcaccccctgcgacgggtcactgctgatttgcagctttgatggtgagctgaggattaagcgataccgaactcatccctatccgcacctggtgaatatccagaacgggcggcgagagcaattgccagacgcgagcagtcatggtgtcgagtcgccggtgttcggggtgatcacctatagcatcaacgatgctcgctctggcgagttcgacgactgcccggtgatgtga

SEQ ID NO: 171086 - DNA, 1215 bp, Enterobacter cloacae
atgcctaagtataatatttatacaaaaattgaatcgaatgtttcagcagtcgaccttttttatgatctcaatgtgtatagaactgatgccaataataaaaaacatatgctactgtcagtggcgcaacaaccagtaaccccaaattatcaaactcagtcccatgaaacgaatgaaactgaggatgatctgtctgtaatctacattatggaaatgaacttgtatcgcaagcacggcggtaagttggtttctgtgctttcatcgcctgcgaaaaaaatgtacacacttggtgaaatggcatcagggcaagcgtactctaaaaataaacgcgaaaacgtctgctattttgagactaaagcgcagacaaagccggttaatgataacgaagatgacaatatccatagcgtacagataacttgtctggaaagagcatttatagcaaaagaacatcctatcggtagtgctgatgatccattcgatagaaaaaagatcgagagccagattgcatcaagaatgaattatgtcagttatcctaatcaaggggggactagcttgtgcggacctgcatcatttttttattgtctgcagatggataggccggatgtttataaacaagcagctattgaactttggttgcatgggaaaacaaaaataagcgcattggagatcttgccaggagacggatgtaggcatcccaaaggtagtttttatgatgattacggtagagagacagtatcaggcctggactggattacattggctagcttgagggattctgaaaattcactaatgagttatgatgaagtgaatgatcaggtcgcaggaataactatgtgggggaaattgagtgaatggtttgagaaagcaggatatgagaaaatattcgacaatataagtctctcgcattcaaatctaaaagatattataaatatgaataactttattggcaaaggatataaagttgtaagcttaatctctgctggcatgctatcggattttcctggtgatagctcatcaaagaatcattggatagtttggactgaacaagtgaagtgcagtaatggagtagttatatctgaacgcacctccagtgaagatgttgtggatttaaatctattctcgtgggggactgttggaagtcaactgaagaataacattagtttggattcttttataaaacatacatttggagggttggtttttagaccaattaaataa

SEQ ID NO: 171087 - DNA, 732 bp, Enterobacter cloacae; identical to SEQ ID NO: 141112

SEQ ID NO: 171088 - DNA, 318 bp, Enterobacter cloacae
atggtcaggcaaaagtgtagcggtattaggcgcagctatttagaagatattattaaaaattacagaaaaggtaaaagtgaagagagtgtaaaaggagagcttagaaagttattcaaggcttttgctcaaaatgataaaatccgtacgcttttaactggcccagtaagtaagaatccgttcaggtattggattaaccaaaatccggagctaaaacttgaatttaagaaaaaatttgaagcttgcttaattaatgccctaattagtggttttggtattgattccggcaaagtgtatggttaccttcaaatcgataactga

SEQ ID NO: 171089 - DNA, 972 bp, Enterobacter cloacae
atgttgtcatccagtaaaagcagcgaagcccagaagtgcactaacactctgggcctcttatcgaacaaatccgacaaggaatctatcgacatgacaagtttaacactgacccaacagaactgcactatcaacgttccgtttcacggtgctgagctgtatgtcgtgaaccataacggtgaggcgtacacaccaatgcgcccgatcatcgatggtatgggtatggattgggcatcacagttcacaaagctgaaatcacgttttgctaaaggggttgtggaaatcacaatacccacctcaggcggtattcagaagatgctatgcctagccctccgcaagctggcggcttggctgaacaccatcagcccgaacaaggttaagcctgagatccgcgagcgcgtcattcgctaccaggaagagtgtgacgatgtgctctacgaatactggaccaaaggccaggcaattaacccacgcaagaccagcaccgacgagcgcactccgttacgcgacgcaatcaacatgctggtgggtaaacgcggcatcatgtacccggaagcgtatagctatgtacaccagcgctttaatgtctctcatatcgacgaattgccagcggaagaactgccggtggtcattgagtatgttcatcgcctggctctcgaaggtgaattgatgccacgtgaaacattaccgacgccaacttcccggcaattcaccgatgaggaactttgctctctggcttatctgtggcgttctgccgcggttatgtatgaggcgtgtcgtgaggttcaccccttgctgctggtggctgagcaccgtctggttccacgctttagctccattggtactaattacagcaggggtatcaacaaagctcgcgaaattcttaagcgggaaactaaccacataacagaacaaccatggggagacagtgactggaaaaacgtcttctcatacgggaaaggaattttgcagtga

SEQ ID NO: 171090 - DNA, 258 bp, Enterobacter cloacae
ttgtatggatatgaagatgaaatgacctttaagcagtatttcaccgatctattccaggtcacgcttaaagctttgaataaaaactatggcgaccttgttttgaacaaaggtgatggctctgttttagctaccgctgtttacgccgaggtggatctaattcagagccagacgctattgcatggcgtctatcagcaagttgttaaaaaagctgattatccaagccttagtaaagtatctgatagcattaaaaaaaaataa

SEQ ID NO: 171091 - DNA, 951 bp, Enterobacter cloacae
ttgagttgttcttcacctgcctacaaacaatattttccatcaaaaagctttagaaggctttttgtaacaattagcagactaattattggtatgctcatattttgtgcgccgagcgctctggttgctatagccaggggcggtagcgtgtcattagacatcaaggttagatcccctatggcgagaagtggtttagaagttcaacaggcagcggtaaaggctctgttcttacgtgagatcaaaacacgttttggtaaatacaagcttggttacttatgggccatccttgaacccgcagcacacctgctgattttactaacgatgtttggatttatcatgcatcgaacattgcctgatatttcttatccagtgtttctattaaatggcttgattccatactttttgttaaaaaatatagctatgcgctcgatcggggctattgaggccaattccgggttgttcaattatcggccgataaaaccctttgatacaatcgttgctagagcacagcttgagatattaattcatgggattgtttatgtgattctcatgatatttgtcggcatcgcaggcgaagagtttgaagttacaaatataatcactctggttataagttggttattattagcaatattaggttgtggagtcggtttaattttcatggtgattggtaagctcttacctgacacggtgaaatttttgcctattctcatccgaccgttgtattttctatcatgtattatgtatccacttcattcaataccaaaagattattggccgtatcttttgtggaaccccataatccacgccgttgagattagtcgtgagtcagtagtcccggggtatataagtgaggggacaagtattacttatttagctactagttctttattaatattttttataggtatttctttgtatcgtgtatgtgaagagagaatgttaacctcatga

SEQ ID NO: 171092 - DNA, 669 bp, Enterobacter cloacae
atgataagaatagaaaatctaacaaaatcttataagacatcaaaaggcagacattacgtcttcaaagatctaacaatcgaacttccatccggtaaaaatatagcaataataggccgtaatggtgccggcaaatccacactgctacgaataattggaggcattgatcgccctgattatggaacggtcactacagataaaaccatctcatggccagttggtttatctggtggctttcagggaagtttaacaggtagagataacgttaaattcgttgccagattatatgctaaaaaagatgagttaaagagcaaaatagcgtttgttgaagaattcgcagaattaggcaaatactttgacatgccaataaaaacttactcttctggcatgaaatctcgattgggctttggattaagcatggcttttgacttcgaatattacttagtggatgaagttacagctgtcggggacgaaagatttaagagaaaatgcgcaaagcttttcaatgataaatatgacaagtcaaattttattatggtttcccatagcctcacttttttaaaaaattactgcgacgttgctctttttatcgatgaaggaaatgaggtgacttatttttcagatgtaaaagatgctattgaaaaatatcgcagtacaataaaagctaattga

SEQ ID NO: 171093 - DNA, 2445 bp, Enterobacter cloacae
atgtctaaagttagtaagttaatgaaaagccccaaactattttttgtggatatggttaataaaagaacggggcgtggtactgcaaataattcaaagcctaaagatgttgttatcacaactgtagctacaaataaagctaataacgcaacgacggtagctaaaactcgcgcaaaaaaagttgttaaacctgcgccacagccttcggaattaatacctagaatatttaattttagtaatattatagaaactgaaggcaataaacctattttcttatattttccttggattcaagaacacggcaacgaacttgttaaacgcataaacgctagtttagatgcagagtttcatgttgttccttttaatattgcaagagatatctctgatcgtgataatagaagagctatcaatcgatttgctcgcgaaaacccagatatttataaaaaaataattgctagaaatttaatggggttacaggataaagtcaaaggatttatatttaccttagactggaatccagcgatgcgcttgatcgtggatgtatgtcgtgattataatatccccacaatcttgattcctcatgagtctatttttattaatcaagatgcttattatacagatattacagcatatgcttctgttcctaaaactgatatgattttgagctgggggggattgcagacaaaaatcttctctggtcgtggttatccacgtgaaagaatttttgaagttggtacgcctaaattcgatgcttataaagaatataaacctttgctcacacgagcaatgttttgtaaaaactttggattagatagcagtaaaaaaatcgtccttttctctgcgcaacctttagattcccaattggatcaaaaagttgcacgcgctagtcaggagaaggcgatacaagatctatttacctttacgaaagaacgcaatatccagcttattctgcgcatgccaccttctaaagatgatattttaggtaaggatcttaaagccgagtttgagacttgcgagcatgctgttatcgatgatgctaatttttaccttgtcccaccagaagaggctatctatcacagcgattttattacctctataaacagcactatgctttttgaaggggtgttaatgcagaaacctgcattctcaatgaaatatgttgaatttgaacaaatttgggaaaaagcaggcattccagctgttaaaaattatgctgaacttcaaagcttaatggatattatgcttgaaggtacatggcaacatccaccggaaggaattgagtgggccgcaaatgaatttagtattggtaaatttgatggcttagctacacaacgaattgttgataaactcaatcaatttattgatccttcgcgctcagatgcctttgaaattatgccatcggctaaagagcgttttctcaataaagaacgtattgatctggttgctattccaagtagttctgaaacgctagctaatattcaattgtatctctataaattacttaatgctaataaattactaagttcacatggtaaagatgttagcttgatgaatttagcttctgttgatatttttttccaatggggcatctccccgagtcagactaagaaaaatcaacgtaaaaaagcaaaacagcttggtcgcccagtttttatcatagaagatggctttattcgttcagtaaaaattggactttctggaacgccaactctttcaatcattactgatgatacaactgcttattatgatgcaacaaaacagtctcgtttggaaaggttattacagtctggtccagaattgagcgttgagcaaaaagaaagagcacgtaatgccattaataaaattgtgagtaatcgagtctctaaatataatgattcgattaatgtctcattgcctatcggtcgaaacgatgttgataaaatattattaatcgatcagcgcaatggggatcaatctgttccttctgcacttgcagacgaaaaatcattcgagtcaatgttggctaatgcaataaacaacaaccctgatgctgatattatagtgaaacagcatcccgatgcgattaaaggtggtaaatcaagctatttcaataatgagctaattgaaaaataccgtcaaattttccccaatatttataccatcacaatcgatataaatccttatgcgatgtttgagcatgttaaggaggtttatgtggtttcgtctggtgttggttttgaggctttgatggctggtaaaaaggttcattgctatggcatgccatattatgcgggatggggattgacagaagataaattacatttggaacgtagaaatcgtaaaagatctcttgaagaagttttccattatgcctttatagaatgcagtcgttattacaatccagatgaagagcgagttgttgaagttgaaaatatcgtggattacattgttaaacatcgtgctccataa

SEQ ID NO: 171094 - DNA, 1080 bp, Enterobacter cloacae
atgcggtatctttgctgtttcttgtgtctgcttgtcagtgcatgtgtttatgcaaagcaaacctcactctccaaagaatgtgctctgccggttcaatttttagataagggaagcaaaaccattgatttagatggaagctgtatatataaaaattcattggttataacaaaaagtgatacaattttaaattgtaatggcgctacactagatggttttggggtattaaaaactggaatattgataacaggaaatcaggttaaaaacatagctataaagaattgccgtatccaaaatttttcacaaactggcataatggttaaatcaaaagccaagtatgacgtaaataagtcacctgatttctactacaaaatggctcccagcaatatcgtcttgactcataacgccattgataatagcggaggcaccggtataacccttaatgcgtatgttacgcatgttaaagtgaataattcaaaaattacaaactctaactctgttgggatttatttaagtcagagtagtagagaaaatgaaatttataataatgaaattgctaacaacggaaaccgcaaaaaaagcaagcgagagggtttggctgttgattcatctgcttataatgtaatcaaagataatgttttctcaaacaacggtgctggtggaatttttctttataaaaactgcggcgaacatgcagataaaaaagaatcgccaataagatggcaacatagcgattataataaaattattggtaacgttttttcaaatgaaagaaaagggatatggattgcctcacgacaaagcatgaacttaaaaaagtggggatgtggcgatcaatctgttgatgataaaggtatttattataaagattacgccaataataattatattagtggtaatagattttgctctacacagaaaggcattgtagtagaaggcgataacaattctatttcagataatttttttgatagtgatattcattcttttgttctggaaccatacaaaagtaaagtgaaacctgatgggacatctacgactggcaataaatttagcaataataggtaccaaatttgtcagtaa

SEQ ID NO: 171095 - DNA, 603 bp, Enterobacter cloacae
atgaaactgttgtttcaggatgaaaaaaacaatcgagtttatatacccgatggggagaaagaagcgccgacgggagactataaattcctatttaagagcggtaattccacaataacaattggaagtaacgtgaagtttttagcatgtaattttgtactcaatgaaagttgtgagattagcattggggataattgtctgataagaggaaagttatttgctgatcatactaactctaaaattattatcgggcatacaacaaaatttaatgcaccttgcaggatacatgctgcggaagggaagaccatatctattggcaaccagtgtttattttctaatgtgagatttcgtacatcggattcgcattcgatcattagcttagaaacgaacactcgtataaatcatgccaaagatataattattgaagataaggtatggattgctgaggatgtcaatatctataaaggtgtgactatcggctctggcagcatagttggagcaagagccacggttacaaaaaacctgcccggtaacgctttatgcgttggctctccagctgtagcagtcaaacatcaggtagcgaggaatgaaaagttggtaaaataa

SEQ ID NO: 171096 - DNA, 252 bp, Enterobacter cloacae
atggtcgtagtaaaagagaacggcaaactggccgggatcattaccgatggcgacctgcgccgctatatggaaaaatgcgaagacttcgttaacggcaccgctcagtcgatgatgacccgcaatccgatcaccatgccgcttgatagcgtgatcatcgacgcggaagagaagatgactaagcaccgcatttccacgctgttgatcactgatagcacccaggatgtcattggtttagttcgtattttcgactag

SEQ ID NO: 171097 - DNA, 537 bp, Enterobacter cloacae
atgtcatttgcatttccatccattccattagtcaaacgtggaaccattcacccggttcagtttggtcaacgtctttctgacttctgcagccgcttaaagcaacagaatgaacactggctggttcaacaattcctcaataatgagcagagcaataatcagccgatggttgctcaggaataccgcgaggttattgcactttcagaagatgagaaagaacaaacagaagcacagtcaaaggatgtgttaacactggctggcgcttggaatatgtacaaaaaagagaaggccctgaactggacgaaggcaatctcgcaggccaatgagcgctttatggagatcctgttgattgtcttgggttcatcaactgatgtaaccacgattacaaagcaggacattaagcaggtgatggaagttgtagaaaacctgcctaggcgtgttgtgcagccttatcggccgatgacggttcatcaactcatcgggtgtgatgatgttccgtcagaagatttggttggcgctgagttatccacaagcatttga

SEQ ID NO: 171098 - DNA, 1077 bp, Enterobacter cloacae
atggttgataaagttaccgaagctgccgttgtgggtggcgtggatacacataaagatttgcacgttgccgctgtcgtagatcagaacaataaagtccttgggactcagtatttctccacaacacgacaaggttaccggcagatgctggcatggatgacctcgtttgggacattaaagcgaattggtgttgagtgcacaggtacctatggttccggtttgcttcgttattttcagaacgccgggttagaagttcttgaggtgactgctccagaccggatggagcgacgcaaacggggtaaaagtgacacaattgatgctgaatgtgccgctcatgcagcattctcaggcatcaggacagttactcccaaaacgcgtgatggcatgattgagtccctgcgggtattaaaaacttgccgaaaaacagcaatatcagcccgcagagtcgctctccagattatccattcaaatattatctctgccccggatgaattacgtgaacagctcagaaatatgacgcgcatgcagctcatcaggaccctgggttcctggagacctgatgccagtgaataccgcaatgtaaccaacgtttatcgcatttcattaaagtcccttgcccgacgctatctcgagttacatgacgaaatcgctgatctggatgtcatgattgcggcaattgtcgacgagttggcacctgagctgattaaacgtaatgctatcggatacgaaagcgcttcacagttgctgatcactgccggagacaatcctcaacggttaagatcagaatcaggatttgcggcactgtgtggtgtcagcccggtccccgtttcttctggaaaaacgaaccgttaccgacttaatcgtggtggagatcgtgctgcaaatagtgcacttcacatcatcgccatcggacgcttacgaactgacgcaaaaacaaaggaatatgtcgccaggcgtgtagccgaaggacatacaaaaatggacgcgatacgctgtctaaagcgatatatctcccgcgaagtttacacgttactgcgcaatcaaaacaggcggatcaacagtatcccgataacagcttga

SEQ ID NO: 171099 - DNA, 2145 bp, Enterobacter cloacae
gtggctgatggaaaccgggttaccggcggtgctctggcctgcaacggtcacggtgaccgtacctgctgccaggtcacccacatccgcagccgggatggccgcacgccaggtgccgtcggccagcacggtggccgggtaggttttgccgtttacggtgacggtcaaggtggtacctgcggtcaggccatcgctggatccggtcacaatcagattctgcccgtgctcgatgctgttgatcacgtcgtcgcccgccacggtatccacgcgcaggcccggcaggttagcatcgatcgtgatatcgcgctcagcggatccgctgttgccgacgccgttggtcacgctggcggtcaccgtcaaatcgccgttgcccagggcggtcaggacagattccggcacatcgacggaccaggtgagatcgttctgcaccgttgcggtgtagcggttgccgccaatggtcacggtcacggtgttgcccgcttcggcattcaccaccttaccgctgatggtctggccggcagccagctcggcggcgttaatcacgtcgtcgcccgctatggtgttgataatcacgcccggcagaacggactccacgtttaccgtgtgcgacgcgcgggtgctgttgccgacgctgtccgtcgccgaggcggtgacggtataaagcgcctcgcccagctgaccgacctcactcgccggaacggtggtggtccattttccgttatcgtccacctgcgcactgtacgctttgccgttgagcatcacggtcactaccgcgcctgccgccaggccggacgccgtaccggagatcgtcagatcctgggttttctcggtgctgttgatcacatcgtcaccggaaacggtgtcaatggtcagccccggcgcggtcaggttcaccgccacaccgtgcgtggcgctgttgctgttgcccgctttatcggtcagcgccgcggtaatagtgtaatccccggcggccagcgcggtaacgtctgccgcaggcacgcccacgctccagttgccggaggcatccagggtggcggtgtacgatttgccgttgagggtgacggtgaccacgtcgcccgccgccgcgccggtcacggagcccgtgacaatcaatgcctgcgcgtgctcggcgctgttgatcacgtcgtcgtcggacacggtgtgaatggtcagctgcgggacggtggtatcgaccagcacgtcgcgatccgcagaggccgggttgcccgccttatcggagaccgccgcgctaatggtgtagttaccgtcggtaatcgcgccgacatccgcggaaggcacggtcacgctccagctgccgtttgcctgcacggtggtggtgtagtccacgccgttcagggtcacggtgacggtctggcccgcttcggcgttggttacaccattaacgaccagatcctgctgcgcctcggccgcattgatgatgttattgtcgctgacaatctcgatagacaccgtcggcgcggtggcgtccacgctgtactcgcggcctgccgacgcgctgttgccgttcacgttggtgacgctcacctgcacgctggcatcgccgtccttcaggctgcccaaatcggcagacggcacggtggccgtccagttgccgtcggcatccaccgtcgcggtgtacgatttgccgccgaaggtgatggtaacggtctggttttcttccacgttggtggtggagccggacagcaccaggtccgcgcctttctccgccgcgttaatcacgtcgtcagaggcaatcgggttaatgctgatggcgactgtcgccagatccaccttcacgtcatggctgatggaaaccgggttgcccgccgcgctatgaccttcaaccttcacggtaaccgtgcccgcgccgagcgcgctgacgtcggccgccggaatggccgccgtccaggtgccgtccgccagtacggtggccgcgtaggttttgccgttgacggtgacggtcagcgccgcgcccgttgccagaccgtcgctggaaccggtgataatcagattttgagcgtgttcaatgctattgatcacatcgtcgcccgccacggtatcgacgcgcaggcccggcaggttggcatcaatggtgatgtcgcgctcgccggtgccggtgttgccgtggccgttagtgacgctggctga

SEQ ID NO: 171100 - DNA, 564 bp, Enterobacter cloacae
atggtgttgatggtcaccgtcggcgcggtggtgtcgacgctgaatgcctgcgccgaagacgcggcgttgccgttcacgttggtgacgctgacctgcacgctggcgtcgccgtctttcaggccgctcagatcggcagccggaacggtccaggtccagtcgccgttgacatccaccgtcgtggtgtacgtttttcctgcgaaggtaatgatgacggtctggcccgcttcaacgttggacgtggtgccggacagcaccagatcctggcctttttccgctgcgttaaggacgttgtcgtcggtcacgctgctgatggtgatggcaaccggcgcgagatcgacgtccacgacggtcccgatagccaccgggttgccggaggcatcctgcgcgcttgccttgatatccagcgagccatctgcccactgggacacgtccgccgccggtaccgccgcctgccaggtgccgtccgccagcaccgttgcggaatacgcttttccgttgatggtcacggtgacggcgctgcccgccgccagatcggtgctggtgccggacacaatcaggttctga

SEQ ID NO: 171101 - DNA, 285 bp, Enterobacter cloacae
atgggcgagctggttaacggtattggtgtcggtgacgaagtggttgatggtcacctgcggcacggtcgcgtccaccagacccacgcggtcggcgctgctgctgttgcccgccacgtcgcttacggtggccgtcacggtcacgatgccatcgttgagggcaccgacgtcagccgccggtacgatcagctgccaggttccgtccgtctgaaccgtggtctgatacgttttgccgttcagcgtcacggtgaccgtctggcccggttccgcagtactggtgccgcttaa

SEQ ID NO: 171102 - DNA, 918 bp, Enterobacter cloacae
atgttagaggaagtctataatttattttacttctcccccgatggtaaaactatcagccatgtaggaatcgctactcataatttatcggggagcgacgatgagaaactttctttcttgaaaaagaatattaattctgacttatgctcgtgtgaatactttgacgtcagtccgcagtgccttggaactaataaaaccttatctgtggggcgttacatggctttagctagaagaggaattgcgacgttagtttatgaacttgccctgcaagccaaaagggcaacagataatccattagttatatgcactgctgttgttaatggacaaataaaggtggatggaaatattgacgtcaataaagaactaagaagagatgactttccctctaactcaataccgggagtgagagatatgcctgactatttagacaaatacatagttgatgggcatttttatattaaagatttgttagtagatgatcatgtcaaagcgatacatcttctttttaataataaacattatctttcaagtattaaattgttaatgtcatttatcgatactgtggcttttttagaatttggcgatgtaaataaagcctttccagtttggcttgataaatattgtgaactatcgacgctaaaaataacatcaaacgaactttatgagttaaggcattcacttcttcatatgacaaaccttaactcccgtaaagtaatacagggtgttgaaaggcgtataagctatagtattggcccagtcggtacacccacaagagagcatgatgggatagtgttttttaattatttagattttataccgttatttgaaagtgctatggataaatggttagcaacgtatgatggcgagaaaataataacttttattgaacggtatgaccaagttgtccgcgaaaattattag

SEQ ID NO: 171103 - DNA, 1137 bp, Enterobacter cloacae
atgaaaaataatatactagcagatgccttgttgcaggctgtggataaaattgggcctgaaaactctatttctaatattgttaactcaagtaagcaagcgaaggagttaaaaagaaaagcctatgcgcagtcgatgacattaaatgagttacttcgagttaaagatgaatacctcaaaatagtaaatgatcctattacttctaaagaaaagaaacaagagcttttagagatgataaggtctttaaattatgaaattaaaatcaaaggaaaggttggtagaaaaccctttctgattaatgaaagcctggtcgacgttaccttagctaaaggaaatatcgatactgctcagttacgtcaatttaaaagaacaaagccacctcataaattagtgccgccctcatcagaaaacaagtttttaccctataaccaagagtttgttgagcgagatagaatacgcaaggaattgattgctattgaagccaaagctgaactggagagaatggccattctttctcgtgtcacatacactaaaataaatctagccgacacaacaaaaaagaaaaatacttctttagaaaagcatgaggttaaatctccttctgcatcagtcaaggaggaagtaacaaaagaattttactttaacaaagaattgtatagtgttttaattagaacaatgcctgtttcgcaagcttataagatagctaaaagtcgtgagttagcattgcagtactatgatagtagaattattcccggagagtattattactttaatgcccttacatatctcctcgctatgaggaagaaaaacaaaactgaggctctctgtgttgcacgcaatcagcagcaatctgaagaatttctctataatttgatcacggttggttatcgtgttcagaagcgactcgctaatataatggcgttacctgaaaaggaaaaatatgttaaaaaaccaacctctcttgaggggatagatttaaagttaatttcaagtaatgtcgaacgtactatccagttacgaagaattagtgatcagcaaagtttccgtagaagagtggaactgaatttcaaaggtaaatgtgcggttacagggcagtcagcacaaacacttcttcaagcttgccatggctttgttgaataa

SEQ ID NO: 171104 - DNA, 234 bp, Enterobacter cloacae
atgctccgcatcatcgtggagtttctcacaaaggtcggcctcagcatcgagatcaagctcgttaagcttctccagcaggagcagagactgattctggatgaatttagccatgttcagcgctgttttctgttatttcgtcataagggacctcagagcatcagtgctcagtgtaaaaccggtaagggggtcggatgtacgaatggttcagagaacggatctgaggtaatcctgtag

SEQ ID NO: 171105 - DNA, 444 bp, Enterobacter cloacae
atgatagcagtatcacttcctgacgaattactgcaaaaactagataacgctgtagctaaaacaggcaaaaaacgctcttatttaatcagggaatcaatacagatgtatttgaatcaaatagaaaatacacatgaaaaaaaagagattatcctgaacacctcaaaaccgttctatgagatcctaattgaggaatttcaagttgaaaaagaactgatgactgaggccagaaagactgagttcacgatgtttagtgataacggaaaactctatgtggtaaattcgaaaggaaatacacgcaagttagaagccgtctacgtaaataatttctttgaagagtataagaaaacaggaagcatgagcccatccagctatcaagatataaccttcaactcatcttatcttttagcagcgctaaagtacctgatagaaaaagaactgatttaa

SEQ ID NO: 171106 - DNA, 633 bp, Enterobacter cloacae
gtgaaaatatattacgcattaaaaagaatagcgtatattgcaggtgctttatctattggttgcggctcactaccaatgattttcagcaaaacacccgctcttcaatactgggtgctcggggcttttttaattttcattgggtattgcgtatcaaagcttgagttcgataagtctaaatacatcaagtatctaaatgaaaagaacgatgggatttatatttattatgcaaaatttggtggcgaagagcacgaaataaaaatcaacacaaaaaacaaaacaatcgaactaaagtcagggaaaaattccgccacactaaactttgataacatcaaatcatggagatataacgtatctggcattagcaaggttaatgtcattggttccactaacagcgtaatgggtaatttcacagctttatctcaagccagtgcaatcaacaaccaagcagggtacagcgcgtgggataataatggattctttattcacacagatgcattggcaaatcctgtctggcatataaagataataccaaaagatgtcgcaataaaccttaagtctgacaagttttggaaaagtgtcgctggcgaatgcgaagtctggatgaacgtaatgaaccgagccattaataaatag

SEQ ID NO: 171107 - DNA, 1722 bp, Enterobacter cloacae
gtgttcggaaaactgttgttaaactacatgcccggtttacaaaatttgttagcctacgataaaagctggctaaaacatgatgttaaagccgggttatccgttgcggccgtagcgctccctgttgcgattgcttacgctgagctggcgggggtgggggcaattgtagggctctattcctgcgttttaccgatgatagcttacgcactgtttggctcttcacgccagcttattgtgggccctgatgccacaacctgcgcggtgattgcggccgtcgtatttccgctttctgcaggaaaccccgaactgcactggcagctgacgatcatcatgacattgatgatgggcgggtggtgtttgcttgccagtaaatttcggctgggcgcgctcgccgatctgctttctcatcccattcttaccggtttacttaatggcgtagccgtgacgattattgtcgggcaattaggcaaggtgttggggattaagcttgatgaagcgcaggttattgaaaaaataatcgccttgccaggtcgactttcagatagccatttattaaccgtaggaatatccctttttacgttaattattttaatggtgatcaaaacgtatcgcagccagtggccagcacctttaatcgccattgtgataacaacggcactggtatgggtgacctctgcgcaacagtacggcattgccacgattgggggagaaggcttccagcctggtttaccggtcgttcactggggggcgttccagccggggccgatgcgtgatttggtgatcccggcgctgaacctggcgttggtcagttttgtcagtctgatgctgaccgcccgcagtttcgccgcaaaaaatggctacgaaattaatgcggatgcagagttccgggctttgggtattgcgaacattatgtcggggttatctcaggggtttgctatcagtggcgccgattcccggactgcggtgaatgattcggttggggggaaaagccagctggtttccgtggtcgccgccttgatcatcggtctcgtcgtagtatttttcactcagccattacaattcattccggtatctgcgttagggattgttctaatgtacgcatcgtggtcattgattgatttacgtgggctatggaacctgaggcgcagaaataaacaggcctttcgcctggccttcttcacgtttggctgtgtgttaattatcggcgttatccaggggattggccttgcggtgttgcttgggttattacaattccttcgtacggtgtttcgcccctctgagcacctgctgggcactgacgaagagggaatgattcactcgttagggaataccaccgatataaaaatggtcccgggcgtgctgatgtatcgatttaactcaccgttgacctattttaatgtggcttattttaaacgtcgggtattgaacctggttgatggagcagccatacagcctaaatgggtggtcattgatgccgttgcctgcttcacctattcagacatcagtgtcctggcaaccattaatgagttaaagcgcgatctgaaaggtcgacagattaaattaattcttgcgggcaggaaaacggagttaacacgctggtttaaagacagtcggccaacaatgaatgatgatgacatgattctggcgccagacctctacctggcacttcggttcattcaaagcaaagagagtgcgagtgagggggaatcagtcggtgatacataa

SEQ ID NO: 171108 - DNA, 633 bp, Enterobacter cloacae
atgtatacactagcaaatgcaaaaataaccggagtctggggatggaacaatattgagactaacttctatgaagatgtaagcattttcattggggcaaacggcacagggaaaacgacattcataaatattcttgttgcaattttaagagtagatgtggctgcactagaggaattatggttcgacagtgccacattgattttcgaaggttatttcgacggtaaaaagaagagaagaacattaactattacaagacaatcagagaataaacacagtgacgaatctgtttcttataaaatcagtagagttgtatatgaccttccatttttaaatggaagaaatgttcgttcaattcacgttcaaaggcgaatactacctgtagtggaactaattaaaggtaaactacaagaaattatatctttttcaagtttatctgttagtcgtgcaggcattagcgatattgatgatctagagtatttagattcaagaaaggatctaaatcaagtgaactccatcgatagtattcttacagaattattaaacaagctaaaagtttatcagctaaagaaagctcaagaatcaaaagaaattgctagagagtttcaagaagaggttttaatttcagtgctttactga

SEQ ID NO: 171109 - DNA, 408 bp, Enterobacter cloacae
atgaataagtggctgatagcgggcgttattgcggcggctgccggtggctttctgctctggcagtacctgacgccggttgatattgtggcagtacatgatggcgatacgatactggtcaggcattttccgtacctgaaaagccgccagatagcctggtgggaagccaacaaggatatgattcaggaaaaatacggtataccgaataaaggcgaagattattattactacatatctattatggattttgggaatggatatcgtaccgagccgaatgaaagcttgcttgggtttattgatgaggtttcttgcttcaatgacatacagacagagaagcggtgtattgatagaaagccacttttggatgtacgatatagccagaattatgggcttaaatatgagtcgtattaa

SEQ ID NO: 171110 - DNA, 1236 bp, Enterobacter cloacae
atggcgctggaaggttattttcttttccagggagatcgtaccgtctgtggcggcaaaattatcaccggtgctgaagacacccaatttttcgggcgaccacaggcgcgggagtccgataaagtgacctgcggaaaacatcccgggatctaccgtatctgtggtggcatgggcgacatgtacgaagtgggcggagtaaaccgccagctagccggctccatcgaaagttacagttcctgtccgtgtcgggcgaaattcattccgcaggatctggacaacacctacgaatataactgcaatgccgggctggcagccgagcgtgatgaaactgcccggaagaaaaaactggctgaagagaaagaaaaaaaacctgagccaatgccccttcccgcgcggatttataccacacagcgcatgatggatgattatggcgctaaagacatgcaccacggcgatctgagcgaggaagcgctgaaagggcgctttggcctgacggacgtctcggcgaaagtgaacccgtatacgctgaccctttcgccgcgggttgtagccagtccgtatgatggattttattcgggcagcctgacggagagtgcgccggttgtagtcagccgggaggaaagcgcgcgactgatgtttgatgagtttcgtgaactggcgaaggtgttctcctttcacggtccgtataagaacatcatcactgagatgatcaaccacatgcagaagaacagcggcacaccgtacagcagcccgctactggataaggcgctgaaagagcagatcctgaatgaccgttctgggaaaagttcgttgctgagaatccaaaatgttctaaaagcagcaattaactacgagtatggatttattcctctcgataagaaggacaagttgtttgacgaaaagggaaactttaaggagttaagtggggctgttctgccaaagtttgaccatcttatcgaccgtactaacgggctggtgataaccgtccatgatacctggtcgacgcatatcacgctgcagtcgctggaggtgacgggcaacagctaccgggcgaaggtgcattaccggattcaagatcacttcggacttgatgatgcagacattctgaaccctgtttttcatcagggacgaattttccggacctggtttgtgctgcagcgttatgtgaaatacggctacaggccgtttatcaccgagatgaatacgaccgtggaaatcagcgggaggcgggatgaataa

SEQ ID NO: 171111 - DNA, 477 bp, Enterobacter cloacae
atgtcacagcaatacaccaatgaactgacccctgatgtgctggaacggctgcgtcagccgtggctgaccgatgagtttctggcaggagttgatccgcagacgcgtcagtcgctcgtcgcagaaatggaatcagtgttacagcgcgctgttctccatattttccggggggcaacggctggcagcctgacccgtcatggtggcgtgatccgtgaggtatccggcaaaagtacccttggcgggcattatgccgcgcgggtcggggataaagtggtgtattcggacgggcgcgaggcgaccattatttgtggagccggtaaaggccaaatgacgcagggggaatcgatggcgctcgtgggcagcatgctggataacggcgatgaaattatttccacgcctcagggtagtcagatgtgtgttttccgtgagggcgatacactgcctgatggctttttaacggtgccgggaggtaaacactga

SEQ ID NO: 171112 - DNA, 795 bp, Enterobacter cloacae
atgtcgattgcattgcgtccgagacgatcaagtttgctgacaatcaacacattgccattttccatgcgatcaaacagcttggtaaaaacagggcgttcactggcggcaaccgaaccgctgatatgctcttcactcattcgttggggtttgatggtaaaaccagccgcttcagtttcacaacgctggttttctgttgtctgttcaagagtggataccgcaggcttcactgagcatgttttcgcgctaatgcatctgctcggattcgcttttgcgtcaagtatccgggatcttcatgacaaacggttgtttattcatgggaaagctgagttgtatccggggcttcagtcaatcatatccttaaccagtctgaatcttaaggaaattgaagcactctggcatgaggtactgcgtctggcaaaggcattaagggagattggccgcatcgaaaggtcattgtttatgctggactggttccgggatccttcattgcgtcgccgggtgcaggcagggttgaataaaggtgaggcccgcgatgccctggcgcgagctgtctttatgcatcgactgtgggaaatcagagatcgggggctggaaaataagagctaccgggccagtaatctgacattgctgactgcggcgatctcgctgtggaatacggtatatatagaaagagccatagattctctgaagcggaaaggactcccgctaaatgaacagcatattgcgcatctttccccgccaggatgtgagcacataaatctcagcggggactacgtctggcgaacaaacctctag

SEQ ID NO: 171113 - DNA, 1485 bp, Enterobacter cloacae; identical to SEQ ID NO: 95322

SEQ ID NO: 171114 - DNA, 1485 bp, Enterobacter cloacae; identical to SEQ ID NO: 95322

SEQ ID NO: 171115 - DNA, 1341 bp, Enterobacter cloacae
atggataatgaaatcaataaggattgcaataaagcgcatcatgcagaacctacacaacaggatgaatacatcttctcgcactgccaaaatataaacactctaattaatgaaagaaattacaatgaggctagaaacaatctaatttcattattagactatcataaaaaaaacaaccttcattacaatcctcttgttaatcatcttattagaacgttagggttatatccataccttcaaacagacacctctgaatggcatgacaggttggtctatgacctgtttaaagttgatgtaggattagctaatcctattacccttcatcgagaacaatcattaattttaaaaagactattgagcggagaaaacctagcaattagtgcccctactagcttcgggaaaagctttattattgatgctttcatatcattaaaaaaacctaataacgtattaataattgtaccaacgatatccctgactgatgaaactcgcagaagattgcatagaaaattctcctcacaatataaaataatcaccactgcagatgttgacctctcagaaaaaaatatttttgtgtttcctcaagagagggctataagctatcttgaaaaaattgatgatttagatcttttcattattgacgaattttataaagccagtgagaagcatgatagagacagagcgccagccttgatcaaagcaataatgaaatttactaaaatcgcaaaacagcgatattatttagctcctaacattagtgagatcacaaataacccattcactaaaggaatggagtttgtaaaaatagattttaatactgtttttttggaaaaacatgatctttctaaagaaattaatgaagatgacactaaaaaatctaaagcattattaaagattctttcgaatactaacggaaagactttaatatatgctggaacatataaaaacattgaaaagatatcaaaccttgttttaaaaacacaatttgaagatgaaccatatcttttgaaagaattttcaaattggttaaaaattaactactctcaaaattggaaactagccaaacttattgagaaagggatgggtatacataatggtcgattacaccgttcgatcagtcagttacaaataaaactcttcgaggaaacgcatggcatcaaaaacatcgtttcgacgtcttccattgtggaaggagtaaatacatcggctgaaaacgttgtaatttggcaatgtaaaaatggcaaaagtaaccttaaggattttacatacaagaatattattggtagaagtgggcggatgttcaaacactttatggctttgttgaataaatcagatttcgggtaa

SEQ ID NO: 171116 - DNA, 918 bp, Enterobacter cloacae
atggattttgatattcttattgatcaaagcctttcatctttcgttaccggaggcgggccaagccaaatatcaaataacagcctcctttctattattaatgatttcgaagatgggagttggagatatcaaaaatttcacagattcatatgggataatattttacaaacagctctttcaaaccaagaaagagaagccctaatcgatggcccattcacctcacttgctcttgcatcaaaaaatcttaggctaactgatagcgatcaggacataagtaaaggaagtgaacttgcggaaatatttttgtatggaataatgcgacatcacttcaaagcattaccagtcgtgcccaaaatattctataaacaaaatagtcaagataacgcaaaaggtgctgatagtgtacatgttgtcattgtagataataatactttctcattatggtttggtgaagccaagttctacaacagtatcgaagatggccgttttgacactataatcacctctgtacgaaattcaatcacaacagagaaactaagaaaagagaacagtataatattaaacacccaagatctttatgcattagtacaagatgaaaaattaaaacttaaaatatctgataccttatcttctaataattcaatggataatattaaacctttactcaacataccgattttcattttgcatgagtgtcctataacagaaaactcaaatagtttatctgatagttataaatcctccattactaaattgcacaaagagagagctcaagctttttttaaaaaacaccaagagaagattaaagatatttatgatcatgataaaattaaatttcatttaatactcttccctgtaccaaaaaaagaagtaataattgataaatttgtaagtactgtacgataccataaggagcaataa

SEQ ID NO: 171117 - DNA, 651 bp, Enterobacter cloacae
gtgggcccactttacatatcctgcccggatgttgccgttgtacagctgtgcagggaaaagtggaaaacggcaggaaagcgttgcaccagagtgtgtaatcagagaggaaagtggtgtaccgagcgatacgagccctgttcagcattacagacattacgcttcctcggtcattcactcacttcgttcggtcatgacgctgcggcgagcgttaccagctcaggcagaaagccatgtaaaaggtctgtaggattgccggttttccataggcttcgccctcctgacgaacatcacagaaatctggcgatttccggtgctcaagtcagaaggggcgaaacccgacaggacttaaagatccccaccgtttccgatgggtcgctccctcgtgcgctctcctgttcccaccctgaggtttacccgttgcagaccgccgtaaggtggcgttttctcattcctacccgtgcaactgggttccttttaggtggttcgctccaagctgggctgtatgcacgaactccccgttcaacccgactaccacgactttcaggtaactgtactcttgaatccaaccctgaaaggcacgacgaatcgccactggcggtagccattggtgacaggtttacggagcggagcagtgtatataagtacacatag

SEQ ID NO: 171118 - DNA, 285 bp, Enterobacter cloacae
atggatactaaatttcatttcaggcttgatgagaacgtcaagatgagagcccagaaagcggcagaagcccgcggcaaaactctaagtgaagcttgcagagattttgctgagcaattggcaagagaggttgagcctcttagtcagcatgaaaaatggctgaagaagcaggtagagctggctgttgcaaaagctaattctggagacggtagattcacttccaatgaggaagtgaagcgagttatggcttcaagaaaagacgagataagagctaagtacaagcgctag

SEQ ID NO: 171119 - DNA, 405 bp, Enterobacter cloacae
atgggattcataagccagctttcaaaaacaaaaatatcaacacgccggggatctgctagtcagataacagtgacccaatcattcaagccttcaacgtcagcagaagagctttccatcaggatctcgactgaatgcctcaacaacataagcttgaaaatcggagataaggttgacgtactttatgatgcagatagcgatacatggatgataaaaaaagaggcggaaggctataaaatatccggaaaaccggatgctccgacaggactgatccgctacacactgaaagaaggccacaagaaatttaccagtacccgggaatcacttccggttaaaaaagatagtaatgacgacaccatcgtattcatgggtgacaagatgacgtttaagctgaaggaaagcgaatga

SEQ ID NO: 171120 - DNA, 297 bp, Enterobacter cloacae
atgatggcaagcaatctcatttgggaagaagaagctattgatgatcgggctgactacttcgaatggctttatcagcagaatccaaaagctgctgaagatgcagatcagtacatagaagacacagttgacttactaatagagaatccatttctcggcaaagatagtgaaatagtgtctggcgtgagagttctcatcatcaagggcctatcgttaaatgtgtactatcaagaaggccatggaacagtaaaagttctacgagttctccatcaatcacgaaacatagcaaaactcatttaa

SEQ ID NO: 171121 - DNA, 336 bp, Enterobacter cloacae
ttggatttaaccattcctgaatcccttgtgggaggaattgacgagattgagtataaaaatgatttaacgcctgagcaaatctcagctatcattgcgtataaagaagaaatgagtgctattttagggtatgaaacctttaataaacttttaaaggaaggagccttcaaatccagtgattatttattaataagagatatagccattgatatagcaagcaaaccaaatgaatgggcaaatattgcatatctcaactcaaacactcccgatgaatgggactattacttatataaaataattaatctacaaccggccggatgggggggggagatactctaa

SEQ ID NO: 171122 - DNA, 351 bp, Enterobacter cloacae
atgtctggaacctattacgggcagatgcaagccaacattgcacagcgtcaatatgagaggtgtgaaacagcctttgatgttgtggatagtgccagaggctcacaggtggcttctcagcctgttcagcgttcatatccacagcctacagagaaagatagtcagtttattggcctgaagggtgagcaggtggctttcactagcaatggtgaactggtggttatatctactagtcagtcttatcagtttgttaaggctagccctgtaatgagtgctcctaaggatgataaagacactggagttaaacagggtgattctgttcagatggagttatttgctaataacgctcggtga

SEQ ID NO: 171123 - DNA, 660 bp, Enterobacter cloacae
atgctaattgttagcttggttatttttactgcaatctgtatgaccctaacaagaggggctatccttgttgcggttatcatctatgctttttacattatttcaaatcgaaagatgctactaagcggtattacgttatttgtgatctttatacctattctggtcgtgtccacaaatatctttgacaattatattgataccttagtgggcaggtttacagactcctcgcagagttctcgtggatcgacacagggacgaatagatatggcgataaattcattgagttatctttcagagcatccatcaggtataggcttaggcacacaaggttctggaaatatgctttcagaaaaagataatagactgaatactgataactactttttctggatggcactcgaaactggtattgttggtttatttataaatatgttctatatggcaagccaattttattcttcggtttttttggataaaaaatatggttcacatcgaaactatactcatttaagaatctattttttgcttggagtcgctttctttataagtgctgcgttaagttctgccccttcatcatcaactttttcaattttttattggtcggttcttgcattaataccttttcttaacctaaccaacaacaggttcaatactaatgaataa

SEQ ID NO: 171124 - DNA, 141 bp, Enterobacter cloacae; identical to SEQ ID NO: 131154

SEQ ID NO: 171125 - DNA, 141 bp, Enterobacter cloacae; identical to SEQ ID NO: 36145

SEQ ID NO: 171126 - DNA, 210 bp, Enterobacter cloacae
atggaaaacaacaatcgcttaatgccccatataaggcggacaacacatatcatgatgtttgcccaccgaaactgctttgacttacaggttatcctgaaataccttattttacaggccattgcctgtgaagtcgtgcgctcattccacttaattcagactcatctgcaaccgggcggactgaatttcaatcatcaaaaagcaatttactga

SEQ ID NO: 171127 - DNA, 555 bp, Enterobacter cloacae
gtggaagataaaattaattttctatatcagtccttgaacgacacacaagcaacaattaaagctattgatgtaaaaattgggttcctctttgtaattgcatttatgcctatcactgtattacaaacattgaatagcaccgtgatgacaatatggtctgcaaatgcaatttataaattatgcttgatttcaatatgtgtaagttggctattatctgtagtatatctttttctggctttaacaagtatctcagatcctaacaaacacatgcatggagctaaaccaagcggattattttatggcaaaggtattttcaagattgaaacggaaaattttggttttaaagtaaaagtaacatctaatcttacagtagatgaggtagttagcaatttacctgaccagaatggaatccttaaagaattaacatatgagaaaatgaaaataacatatattagagaaattaagttaggatattattctagatctactaaacttatgtctttttggctactactaagtacagccatttatttaataaataatttcattaagatctaa

SEQ ID NO: 171128 - DNA, 129 bp, Enterobacter cloacae
atgtcgaagcatctcaggctaaacaaaattctgctggtgctggtgctggtgctggtgctggtgctggtgctggtgctggtgctggtgctggtgctggtgctggtgctggtgctcatcacaatgcaatga

SEQ ID NO: 171129 - DNA, 1239 bp, Enterobacter cloacae; identical to SEQ ID NO: 151384

SEQ ID NO: 171130 - DNA, 870 bp, Enterobacter cloacae
gtggtggttcgcgataaggagcatcagacgcaggacgtggcggacctgagccgcgacacggcgaatgcaaacggcagcatcgacgccatcttcgataaggagaaagagcagcgcaggatggaggaggcgcagcttatcggggaaatcggcagccaggtggcggatatcgcccgcacgcagggtgaaatcgcgaaacaggaggccatgaacgacccggcagcgctccgcgccgcagaggagaagctgagggctgaaggcaagagcaaccctacccctcaggagatagccgaccaggccggacgcacggcaattgaacagtacggcacgggcagcgacatgcagcgcgccatccaggcggctaccgctgccgctcagggtctggcgggcggcgacatgaccgccgcgctggccggagccgccgcaccgtacgtggcggaggttatcggccaccgttccgggctggacgacgggatggaaaaagccgccgcccacgcggtggcgaatgcggtgctggccgcgatgcaggggaaagacgcgcttgcgggtgcggcgggtgccgccgccggggagctggcgggcggaattgcgctggagatgtacgggaaggatgttgctgcactgagtgaaagtgaaaaacagaccatcagcgcgctggcgactcttgccgcagggatagcaggcggcgtagcgggagacggcacggcaagcgccattgcgggggcgcagtccgggaagacaacggtggagaataacacgctgagtctgccgaaagggatgatggactatggcatggcagcaacgtcctggaatcagtatgcagagtggattggcccctatatttccatacactttttatcacttaacccatga

SEQ ID NO: 171131 - DNA, 339 bp, Enterobacter cloacae
atgattattgagccgcacctgatcgggccaggcctgctgaataagtcctttaatcatcagctcaatggcgcgaacctgcttgtgcgcctgctgttgctgcagttcgctacccgttgccagctccgtgctgtaagtcagcaacggttgctgcaaacgaagatgttccagcgtggtcacaaagcgcatcgccgcaatcagctggttttcgctgacatcctgcccgctttcatactgtggaacgcgctgctgcagcaggcgcagctgcagcgtaaattccgacatctcggcatcattcagattgagggtcttcgcaacggctgcccatcccccgagcgctaa

SEQ ID NO: 171132 - DNA, 996 bp, Enterobacter cloacae
atggttacatctaaaaagctatacgttgcaggagatgttttccaaaatattttcatgccaataaatgataatgtaaatcgagccgatatcgttcttaaaaaatgctatcgtacagatcccaagaacttgatgttttcccatgcattagggatggggctttatgaagaacctgttttaagatggttaaaagaggctgaatgggattcctgtggatacaaatatcataaagtagataatagagtagagttatccagagatcctcttagacgttttgaggatattccaaaggattataaaagcacaactcttcatctattagaagggacagataatggaccggaaaaaataattgaaataataaaagatataaagtctaggaatccctctttagaagaaggggatattgctgttatatttcttgactcaggtggttatatttatgattacattcagactttaaaaataaaggttaagcagcaacttggctgggattcgaatatctcacatgaaacaaaatctaaacaagatggcaagctatttatttcgaatataaataatgcgaaaggtttagagtttccttttgtaatttgcttcgctatgaagttggtgaagaaatccaatttccgaaatgcgctgtatacaatgatggctcgatctttccttgagagtcacttggttttgaataatgacaaagaaaatccatcgatgcctactattcttcagggcttagacttcctgaataataacaattacatgaatgtaaggctgccatctgatcaagaaataataaatcaaaaagacttcattgttttggatgaatctatctcaatatctaaattggttaagagttattgctcagataaaaagtcgactccactgttaattgcaaaaataattgataaagtcgaaaggtatatttcagaagaggatgatgttgatggggagtatataaaaagtctgattgaaatagaatatcaaaggaataaaaaaagatga

SEQ ID NO: 171133 - DNA, 468 bp, Enterobacter cloacae
atgtggggaacatccaatgctccggttggctggttggaattaaacggacaggcttttgataagagcaaaaatccaacattggcaactctatatccttctggtgtggttccagatatacgagggcaatttgtcagagcttgggatcatggtgctggcgttgattctgaatcaaatagagcaatactatcttcgcaaagtgatgctataaggaacataactggtagtttatttttcggtttggatggtgatgtctcgataagtagtctaccttcaaatcttcaatcaggagctacatattatgataccagtgttgtaaatagagattttggtaataatttaactttgattaatcataatgaagcaaatagatggattcctcagaagttggatgcttcaagacaagtgccaacagcagcagaaaacagaccaaaaaacgtagtgctaatgtatataattaaaaaaggttaa

SEQ ID NO: 171134 - DNA, 279 bp, Enterobacter cloacae
atgcgtatcgtcagattggatcgttccttcaacatcagtaagcagtttttgctcaagaattgtctcggcatttcgactctggctaaagtatcttaccgtttcggcaaagtcccaattctcatctgcaagcaggcgcggctggaaagaatgacagtagattgcagctatatctttacccataaagtcaaaatcagaaatcaattcgcaaattttcatatcacgtgcaaattcgatctgtgggccatgcaaggtttcatatccaatatgaattattgttga

SEQ ID NO: 171135 - DNA, 651 bp, Enterobacter cloacae
atgaataacagacttaatcagctatacatcaaaaacaatgatattattaatgaatataggaaaaaacattcagataaaaatcttcatggaccacttcttttaaatatcagtaattattcatctcagaagataaaattgatggttgtagggcaagagacgttcggctggaataaatctctctcaatagtagaacagcgaaccacttatcaagatttcaattttggatcatcatactacagtagtgctttttggaatgtaattaggaaagttgaaagatcactaagtattgagccatatgctattgcgtggtctaatcttaatagatttgatgttgattgcggctcacctgatcgtacagaacttgcacaagatattgcttcgctagactatctagttaaagaggaaattagtattcttaaacccgatgtatgtatattttttacgaatcacaagtatgataaaagactgagagacttataccaagatttagtttttgataatattcatggattgccaaagaaacactttacaaaattaaatcacccagatcttccgaagcatacacttagagcgccgcatcctagaacaattagaacgcaacgatgggaagatgattttattatggctgtctcacaatttaaaaatagttga

SEQ ID NO: 171136 - DNA, 543 bp, Enterobacter cloacae
gtgaagtatataggcattacagaccatgcaaggcttagagtcaaacaacgtacagtactttctacagatgatgtaatgtcattactttatagcagttcctatgtgaatttgggttctaagccgggaattcaaaaagcgcatttgttgatatacagtaatatcgaaaatgcttggtttgttgtagttcgggatgttttgaatggtgatgtgattacgtttttgacagaggattatcacgttaatctattcggaaaaataagtgatgtcgataaaaaggaagcatatgaaaaagcaacaagacattcatctcaaagtaatgggggagagtcgaaaaatataaatatctctttgagttttgtcgattgctatggggcagtaaaaacaaaaaaaataaaatcctttccttatgatggaaaaaatatatcaaaggatgcttttttgttgtctaaggattttaaaacgttagttaaacaagttaagagtggtgttgaaagtggggaggttgtgacctgctccccgttgattagtacaccccgatgttag

SEQ ID NO: 171137 - DNA, 1182 bp, Enterobacter cloacae
gtgaaaaattacaaagttattacgccactttttccaacctatgcgcagattcaggcaatgatgaaagccgtctccggctattcggtgaattctgtaagtaacatgatcaatgcaattcaggaacaaaccggcacgccgcaaaacccggttgactggtccgaacctgatatgtggatcaacgaacgcctgaaaggcgaagatgctgagatcgcgctgcggatctggaatcaggataaccacatcctcaatccgcgccatagttacggtagctatttgtttctaaactcttcggtcttcgaactgatggaaacgacgccgaaagatacctgggtacccaccgagagcgggcagcaatttctgaataatgatgatgccacattacgcacgctggacgacaaagaagggttactgcatcttcttgaactgctggctggacgtgaaatgtcccgtcgtgctgacttactcccggaatggcaggcttttttacaccagcattcaaaattcgcttctaccagctccatcaaaagcacgctctactcgcgcctctataacctgatcgatcgcgatatggtcgcccgggaagggatgagctactacatcaccgataagggccgcgcatggttagcgaatgccttaccggcccgcaaagccgatccgcgaaaagaacttctggacgcggtgaagcgttacaaccaacagcaaaaagagcagctacgcgaacagatcagcaccatgaatccctacaagtttgagcatctgattggtcaacttctggaggcgatgggttatgaacaggtggaagtgaccaaagcgtcgggcgataagggtgtcgatgtcgtcggcagagtacaggtgggcattaccaccatcacggaagtggtgcaggttaagcgtatgcagagcaatattacccgccctgttatcgaccagttacgtggcgcgttgccttatcacagcgcgatccggggcacactcatcaccacggggcgttttgccgggaattgtgaaaaagcggctctgcatcccggtgccgcaccgattaccttgatagatggtgaccggctgttagaactgctgattgagaataatgtcggcattcgacgcagtaatgcggtggagttgctggatgtggatttacagctttttgatgaactggaagagggattaaaaggcgaaatttaa

SEQ ID NO: 171138 - DNA, 213 bp, Enterobacter cloacae; identical to SEQ ID NO: 145396

SEQ ID NO: 171139 - DNA, 246 bp, Enterobacter cloacae
atgtctcgttatatagctattgttgtaaaatacgaaaaaatagaagattctgaactaatcaagccgatagaatgggctatctacgatctattagatgaaaagatgcttccagagcgttatacacgcctttgtgatgctgaagaagaaataattgccctcgataaagttgctatacaaaatgaaaaaaatgaaattaataaaatagaaaaaaagagatcacgcaagaattctttttctaaatcttga

SEQ ID NO: 171140 - DNA, 450 bp, Enterobacter cloacae; identical to SEQ ID NO: 19854

SEQ ID NO: 171141 - DNA, 408 bp, Enterobacter cloacae
atgtctatgcctgacgaactattttatcccgtaggtgtgattacatgtatcatggtatttagtgcaggcactagtcatgccaaaagtggtaaaaaaacatggtttggttactggaaagacgatggtttcaccaagacaaagcacaaaggccgaatagatattaatgaattatggccaagcattcgagatcgttggatagaacagtaccgaaacaaagaggtccatcctggacagagcgtttcggaatatgtaactgctgcagatgagtggtgtgccgaagcttatatggaaaccgactactcaaaaattactgtggcagattttgaatctactgtgaaaaattatgcaatatttcagttgttaggatctgctctttctaataaggaggaggatagtgcagatgattaa

SEQ ID NO: 171142 - DNA, 1047 bp, Enterobacter cloacae
atgattaaagtcgaagatctatttgaagttagatatggacattcacttcaattaaataggctaactgtcacttcacagacatctggcattgcatttgtctctagaaaaatgggtgataacggaattgcagcatatgtggagcctatccctggggttgagccagctccggctggagaattaacttgtgctttgagtggtaatggcgttttatcaactttcattcaagataagccattttatactgcttttcatgttgcttgccttaagccaaagattgacatgagcagaatggaattattatattattgtgcttgcattaaagctaatagatatagatacagttatgggcggcaggctaatcgtactttaaaggaccttttaatacctgctttgtgcgaagtgccacaatgggttaatgaatttaatccttcaatttatgatggagccagtgcttccgcaagtgaagagtctattgaacttggtgatccttcggaatggaaaccctatcgatatgatgaaatatttaatatccgtaaagggtattataataaaaaaccgccaacggtagaaaatcccagcccgtttgatataccttttataggtgcttctgaaaaaaataatggcataacatcttttgtcagtttggatgacctgcagaaatattcgagagatggcagaatttatccagaagaagatattaatcgcaaaatatttcctggcggggctattaccgtccctaataatggagcctctgttggcgaggctttttatcaaaaaagggcttttacatgcacgcatgatgtaaatccgttatatttgaaagatgataaaataattctaaatgaagcaattggattatttcttgctgctgtgataagagctgagaaatatagatggagttatggtagaaaatggcgtcctataagaatgccaaactcaatcatccgattgccatcaaccgaacagggagagcctgattggtcatttatggaaaaatttattatgactttaccttatagttcaaaaatttttcttaatgaacgttag

SEQ ID NO: 171143 - DNA, 1668 bp, Enterobacter cloacae
atgcctccttacagcgttacttactgtaacccactgtgtaaccctctcagggcatacagacatatgattcagctatcaagtagtcacaaattcccaaccgtctcctatctctaccagcgtaacggcgtctactatttccgtcttcgggtcaggcaaccaaacaatgatagaatgacctcagtatcactacggactaaggacagacgtaccgctatggctcactctcggcacatcaaggcagcactcaaggcaatacatgcagacaaccctaacgcaacctatgaggaaatgagagagcacctcaaggacatcgctgaatgggaactatcgacgggccgctctgacctcttcgagcctgacatgagggaaacatatagcgggctttattcagaactcggtgggaaccttgttgatgcactagcctgtgaaccccttagcattgaccagcatcgttacattcacgaggctttgggagtgcttaaggcctgtatgaagcgtatcgatgcgggagacagtaagccactcatagattatatcgatggttttagttgtattgattggcaagatgaccaagcctctgtgtccttatctgttagtgctccagaagcaaaaccagaagtcacgcccagcgtcaccgtagcgagcctctttgagcaatacgaagcggagaacgctcagaactggaagccagccaccttaagagaaaacaaagcgtcccacgcagcgttaatcgaaatattcgactatctgggtctcaatgctgaagccagtagagcagacatgctcagagttcgtgatgtgctccagcagttacctaggaaccgtaagcagcgctttaaggatgccccacttgctgacctgttgagccgtgaagataagacagattgtctggatgtcgttaccatcaacaacaagtatcttattaagatggcggctgtctttaagtgggctatgcgcaatgacttgattaaaaagaacatgactgaaggtctggagcttaaggtccctcagcgtaaagcctcagaggcccgtaacgccttctctacggagcaggtggggcaattactggtcgccgctaaggcatactctcagaagacctctggtaagccctatcactattacgttacagctttggctgctatcactggggcaaggcttaatgaggtggctcagcttcaggtcaaagacattaggaccactgagtctggagttgtctatatccatatcaatgaagacgataacagcctgcagggtaagagcatcaagaacgctcacagtgatcgctgtgtgcctttggtcgatggtgcctatggttttgtattggctgactttatggcgcttgtagagacccgtagaggctctggtggtgatgacgctatggtatttgatggtttgcgcttaatgaagaacggttacggtgagcaggtgagtaaatggtttaaccgtacgctgttacccaaggttcttactgatcgtgaaggcttagcgtttcactcgtttagacacacagttgcgactcaattaaaacaacatggtgttgaattagcgtatgctcaggcgattatggggcatagctcagggtctattacctatgaccgctacgctaaagaggttgaggtggataggctggttagtgtgatggtaggtatttataaggaggtaaaataa

SEQ ID NO: 171144 - DNA, 291 bp, Enterobacter cloacae
atgttgaaaggtatcgggtcatttgttgggatggctttattattactggctgctggttgcatggctggttacatttatggtggggtgcagtggtcaacatatcggacgcttgctagagcagtgagcgccttttggtgggcctccggggttttgttcttgttgggtatcgtgtaccgcattgtcttcaatagattatcgtcggtttgtggtgttctctttactgccgcaatcaccattgctttggtgctaactggtcttcactttgcggtcggtgggggctggtggcgctag

SEQ ID NO: 171145 - DNA, 738 bp, Enterobacter cloacae
atgacgcagaccgctattattcccgactaccttaaaccctcgatagaacgcctcgaaacggccagagaagcgcatctcaccaatgcccgacgtatggacgaaaccacgacggcaatccgccaggtgcaaacccaaaaaaatgagctggagcaggaaaacggcactgattccggcgcatggcgtaccgcctttcgtgccggaggtgctgtcattaccgatgagctgaaacaacgccatatagagcgcgtgacacggcgtgaactggcgcaggaatgtgacaacatggctgaggtgctttctttcgagctggatagcctccggggagcctgtgaccgcacggccagagcataccgtcaggcacatcacggtgccctcagtcagtatgcagagcatgaactcgatgttgccctgcgtgaaagctgcagtgccctcgtcagagcaatgaaactcagcattctggttaaagaaaatccgcttgccaacaccatcggtcatcagggctatgtcgagccagagcatgccgttatgcagcaggtgaaaacgtggcttgagcaggcggtgaggggctgcaatatccgtctgactgatgaacccgtgctgtttaaaacaggtctgtcggcctccaccctgccgcatatggagcatgacgttgcgaccacgcccggccagcgcaaagtctggcaggaaaaaatgcgggaacgtgaggccgacctgaaagcacggggattactgtcatga

SEQ ID NO: 171146 - DNA, 1677 bp, Enterobacter cloacae
atgtctaaacccatagaatcaaaaatgactaagcttagcaattttgttgatgttattgctggtttagaatcatcaaacttaaatcaaattctagggcaaacccaacaaatatctaaaaagaccattgcagatgagccgttatctgaaaaggtaaatattgcaattattattggtatttcagattatgggtcaacagagtcaaatttacctcagtgtaaaaatgatatggagttaacgtctgaaattgtatccagaattaagaagccgctacatactctcaaactctctggaaaggcaagcggaagggaagcgtcagataaactaataaacttttttaaagaaataaaagaaaaaagtttaaacgtcgatgagcttttcttttattttacaggccatggtctttcacatgatacaggtggagctggtagtgaatcacgattggttttttctgattactctcagaacagaataaatgaaacaactatttcatctgattttattgacgatttggcaagagatatttctcctgtaacatatgttaaaattatagatgcatgctttagcggaagtaaattaataaagaatgcaattgaccaaagagataaattcctagaagttgtatcaaaggacaaaaaacattacgaaaatagcggttttaacaacgtgtatgtaatggcttcatcaagaaatgatcaactgtctttcgctaatacaaaatatagtgatttttcggagtcaatatttcaagcactatttgagttagaaggagagataaaatatcgccacttagttaatagacttgcggatgatttttcaaaaaaagaacagcgccctgtttttgtaatgcaaggttcttttgatgaaggttttggtgagatagatgctgacacgaaacagtttatttatggtaacttaatatcagagtatgccagcggaatagagataaagaatagcgataaaacatctgaaaatgatgatgcattcctgaaagatctggaagcgaagttaaaagaaaaaacaaaagaaaatatttttaattcagaatctttaaaaaaatacatagcctcaatagacacaaatatagaatcattatcaaaaaaaatatctgcattttacacatattcagttaatgcaagcgagaaaaaaccgctaccaaatgaagtggtgataggggagtggttaaaaaataacaaacacacctattttgccacgccgagatatagaagaagcgttacaaatccattggcctcaaacagctcacaatctgtcacgaacccgacgattcctcccactcagaacaacaataatgaagatctccagccactcattggtttcttatttcaaacaatgactgataacgacactgaaagtagaattcggcaagtaacgtttactccgaaagatgatttcagaattttggattccatatctatcaatctagcccttatgcactcaaacgagaaaataactttattctcatctattgagtcatgcccacttatagattggggttcttattcaagagcaaaatgtagaaactggaagattaatgaaatctcatcacccggaaaggcagtggctacaaaaaaagaaattgacgatatatttaaagaattcaattcatttatattaaattatttaaagagtaagggttcttcagcagaatcagtttcataa

SEQ ID NO: 171147 - DNA, 153 bp, Enterobacter cloacae
atgatgatctcatatcaggaacttgttcgcaccttccctagctataaaggagtattttttattttcccctggctgcaaatcaaccaatttgagtgcgtcattatttttatcctcagctttcaaatttttagctcaaagttaggaataatctga

SEQ ID NO: 171148 - DNA, 2121 bp, Enterobacter cloacae
atgacggtatcaaccgtagttaaccacaacgagtacaccgggaacggcgttaccatatccttcccgtatactttccgtatttttaagaagacagatctggctgtttcggttatcgacctgagcgaaaatataacggttctggtgctggataccgattacacagtcaccaacgccggtggctataatggcgggaatgttgttctaacctctccgctggcgaacggttggcaaatctctattgcccgcgagttggagccgacgcaggagactgacctgcgcaaccagggtaaattcttcgctgaggtacatgaagacgcgttcgataagttgacgatgttgatccagcaggtaagcagtctgtttcgactggccctgcgcaagccatccagcatcgcaaactggtacgatgcgctgaacaactacatacgaaacctgaaagacccccgcgacccgcaggatgcggcaaccaaaaattacacagataatcttgttggttcgaacttcaatcgaacgctgagagtacctgaaagctctataccacaattgccagctgcaaatttaagggcaaacatgatccagggctttgatagcgctggtaatcctgtgatgctggtaccgcaaagcggcagtgcagctgacgttctgttgcaacttgcaagcactgatcctggaaagggcgatgcgctgattgcggtaaaacagccatatacgaactctgtcgcaaggacgcagcacgatgtcaacgcagactatgtttccgttaaagattttggcgctcttggcgatggtgtgactgatgatactgcagcgtttaataaggcgtacgcttcaggtggagcaatctatatacccggaggtagaaagtatgtaatcacagggcaagtagggtctctaactgataacaaacctgttaaatggatatctgatggggcaaagttattactttccggcgctggtggcttactcattaatggtcaaggatgggtagttgaagggattgattttattccagtgggagtagtcccttttgccataaagactgggacgacaggtgacaaccatcgatctgtaatcaacaattgtaatttctacaccaccactgaagactcatctaactacttctctgtgtgtgttgacctgtacgcttgctggtacatgactttaagtaattgttatttgcgcaattatggttcggttaattttggtaatacaaccgctgggattggtattcgtactagttattgcgtaaatgttaatatcactggatgcacaattggatgctttaagcagggttattttgataccggggacgcagtaaacagtcacaagtcagagggcgtatcacttacatcaaacttattcgtgaaaaacgataatcacatagatattagtgatggtctcttctttaatatttcaaataatgtaatagacttgcctaggcctggtggctatcctattcgcgcagctgcagctactactgtaattagcggaaactggatagcagttgactactacccggttttaattgttaatggcgcacagtatggaggtgacagggtaattattactgataatattattactggtggtaattcatattcagggtccttgattgtagtacaaaactcaaactatggagtaatgtcaaacaaccaatttacatggggtgggaatgccttttcatttaattcaaattgcggctactggaatatttcagataacaatattgttaacccttcatcaaatgcgtatgatgtaggtttcaccaataatttttctcttagtggaaataaggtaagtggtatttcagcgaagattatatcaaactctacgcatttgcgccccaaatcgtgggttaaagaaacttcgttcagtacctccggtgttgcagcaggggggcttattaacgtaaatattccagttcctagtggaatattctcaacagccccagaatatgcagacttggtcacatctggaagccttcaggttatagccaggtattctaagtctgcaagttcagcaacatcgctgtcattctcattagtagcgaccggagctgccataccatccggtactttcccttgcttcgttacatccagtagctctacagatgcctattag

SEQ ID NO: 171149 - DNA, 309 bp, Enterobacter cloacae
atgaaaaagattggccttgtttttattttgattcctttttttgcgcaggcagatctttctgcaagttcgtattacaggtgcattaaagacaatgtggtcaaatacagtaagaccaacgaatcagctgattccattgcttctgcagctgttacttcctgcggtagtgttttgggagaagtgctaaaaagtagcgccccattcatgaacgcaagcgctgaagcaaaatctaaattcattgctgatatgaaagctcaaggcaaagaggctggaataaagtacgcgatggatgaaaagttaagcaagggatag

SEQ ID NO: 171150 - DNA, 1806 bp, Enterobacter cloacae
atgagttactttggtctcaacgcggttaaccagaatcagcaactggatgaggctgcatccaacccgatcggaagccctaaaaacgatgtcggatttttcgatggcacggtcagcggtgccgcatcaggtctttattccggcctcgttgcaaagcctgaccagtttttgtgggctggcgttgatgccgtcgtttcccccatcgctcagtttgttaatgacaacacatcgtttcgtgacacgtcacctgaatacattgcgcggcagagagagcttgctgcagcacaggttaagcgcctgacgccggatgccgccactaccggcaccgctgggcaggtgctgtacggtcttttcgatatggggtcgcaggcagtagtcagtacgctggctgctggtcctgctggcgccgctgctgctgtgaccagcctgcaggggttctccgagtttgaacgcctacgcggtgagggtgtcgattacagcaccgctcaggaggtagcgctggtgcacggccttaccgctggtgccggtacagttataccgatgagcatcggcctgcgtgccggcggcgcactggctgaaggtgtcggcgctcagttatcacgaacggcgcttggcaacgcagctggtaccgttgcgcgcgctgcgcctgatatcgcttatgcggcggggacgaacgtcgccttcggtatggctatgcgcggcagcacagcctctatcctgcgtaataatggctatgaggatatggcctcgcagtatgacgtgttcgataagcaggctatggcgatcgatgccgttctcggcctggcgttcggcggcgtagggcgcttcgttaactcccgcggggaaaatgtccggccgcctgattttatgccttccgacgtcgatgcagcgctggcggccaatgctgctcatcatgctgagtttgatatcgctcctggcattccggttaatgtgctgtcacgcgatgcgcatgctcaggcattacggcaggcgatgcaggatgtcagcgcaggccgatcggttgatgtggctagcattgttgagcctgcggcattcaccaacataccggcacggcgcagcattatatcgcaggcactggatgagatgctttctcaggcagatgagggagcgacatccagggctcttgaaatgcggacgcttgaggatcaggctgcgcaaattcttccgcgtggcgaccgcaaggtttaccagtctgaaatagccaacagcgaacgcattatcaccaacctcactgagcagcgtaaccagatactggcagagcagccggctggcagcggcaaagcgctgtcccgtgcccgcgccgacaagcaggaaagactgagagatgtagatcagcgcatcagcgaggcacagggtcggctggaattctctcgtaactccctagccccgcatgagcctggtggtgagttcttcgaggcaagagcagagatcgcccgcaggcagcaagcagaggccgaacttgatgctcaggcgctttcatttttccgcacggcagaagtgcgatccgccgatgaagtcgcaccgctggagccgaacgtggccctccgggatatggaaagcgtgccagcgccaagaccggcagagaaccagcaggacatcgacgtgatggctgctgaagaatcgctggcagaatctccagacatgatgatcaccgtgcttgatgaagatggcaatccacagtcaagaagcgcgcgtgaggtactcgatgacgctgcacgggaaaatgaacaggccgtgcaggactccagactttttgatttcgctgttgcgtgtttcttaagaggataa

SEQ ID NO: 171151 - DNA, 540 bp, Enterobacter cloacae
atgtgtgagccagcaactatcgccgcaggtgcgacacttgttataggcgcaatgtctgcctacaaccagaatcagcaatcaaaataccaatccgcagtagcaagtcagaatgccgatattgcagaagcacaggcgcaagactctattaaccgcggtaatgcgcaggctgatgaggttcgccgtcgtaaccgtcaggccgccggtactcagacggccacaatgggggcaatgggcacagatctcagcaccggcgtatcgctggatatcttgggcgacacggcgcaattcggagcccttgatgctctgacgacggtcaacaacgcccagcgagaagcatacggctaccaggttcaatcaaccaactatgaagctcaatctaaaggtgttcgaagcgctggcaaagctaatgcaactacgacacttttaactgctccgctgagtgcgtatggcgcatataaaacctttggtggaacctggaatccattcagtcaggatgctgctccaatatctgcagctgtgggcacaaaaacagggcgataa

SEQ ID NO: 171152 - DNA, 198 bp, Enterobacter cloacae
atggtcacggtaaaccgggaatcactgatcgcccgtatcgaggaactggagtcgaggccgcgctcgatgaaggatgactaccagttgtgcgcattcaggactttgctcagctacatgcgtacttgccctcacacatacgggcgtatttataccaccaactgctgtgcaatgtgcggggagaaactaagcaatggctaa

SEQ ID NO: 171153 - DNA, 462 bp, Enterobacter cloacae
atgagcaacatcgacaaacaggtgctgcgtgaagcggcggaaaaggctacagcgctcaatctggataccgctcaggtgaagcgtggaaatgatgggtatcttgaatgcccatgctgtgagggcgctggatacgtcgaagaggaggccgacttctgcaatatcgatggcgtagctcttggcgttcaattttacggcattggtgagcatcatggacttgctgaagcatatttccgcgcagccaaccccgctaccgtgctggctctgctggatgagctggaagccgcagacaagcggattactgagctgtcagccagccacggaaaactacgtgaggcaatggctggcattcacaacacaatcagtggtggaggtgcttacacgccgctggcggccattctgaatgcatccaagcgcgcatacgaagagtcggacgccgcagccggtaaaggggaggaatcatga

SEQ ID NO: 171154 - DNA, 948 bp, Enterobacter cloacae
atgagtaacgacatcgcaaacatcaatgcgccagtagacacagcaatcgctggaactgctgcaacaattttcagcccagagggcttaaaccaactgatgaaattcgccgaagtaatggcgcaaagccgcgtaacggttccggctcacctcgccggtaagccagctgattgcatggctgtggcaatgcaggctgcgcaatggggaatgaacccgttcgccgtcgcgcagaaaacccatgttgtgagcggcacgctcggctatgaagcccaattagtaaacgcagttatctcaaccatgtcgccaacaaaagatcgcatcaactacgagtggttcggtccttgggaacgcgtgatcggaaagtttgttgagaaaacatccaaaaacggcaacccatatatcgcaccaggctggaccctcaaagacgaagaaggctgcggtgttcgcgtatgggcaaccatgaagggagaggatcagcctcgagtgcttgagttaatgctgtctcaggctcaggtaagaaactcaacgctttgggcaagcgacccgaaacaacaactcgcatacctggcgacaaagcgctggtcacgcttgcattgcccagacgtaatcatgggcgtgtacacccctgacgaattgcaggaggcggcaccgcgagttgagcgcgatatcactccagcaccagccaccgcatccggcatgaacaagctgatcaactccaagcctgagcaaaagcaggaagagcatgatgctggccgtaaaaaagacgaccgcagccctgaaaaattgctctctgatttttctgcttatgcaggcggtgcagtcaccgttgaagaacttgattcagcttatacagccgtggccaagcgtttatcagcaaatcaggatctgcttgacaaggctaccgatgtatacagcatccgccgcgatgagctgaacgaagtaccaatgtaa

SEQ ID NO: 171155 - DNA, 192 bp, Enterobacter cloacae
atgaacagagcctcaccagttgatttgagaaagtcgattgagatggcgaatagccttgcgcaaatcggcatccgctttgtgcctatcccagtcgccacagaagaagagtttcaggctctggtagctcgagtacataacaagctggagcagctggctgttgaagcagagaaaactgaaggcggtgcagcatga

SEQ ID NO: 171156 - DNA, 186 bp, Enterobacter cloacae
atgagtaaagatgctcaggaccatagagagggtttctattgcccatattgtcagcggatgataaagcctgaagttggcgatgatggagaaattatcgcgctcaacgatggcatggatacgttttatgtttatgtccatgatgacgttgagcatgacaatgacttttcatttacaccgatacattag

SEQ ID NO: 171157 - DNA, 210 bp, Enterobacter cloacae
atgtacacatcatttctaaagtatcgggcagtcatcttcccctgccctattcacgaaataagttacttttccgattaccagaacatcttccagtgcctcgccttcaattgcctcgccatcttccgtaataaacgcctgccccatcagtttcgcaaactgcagttcgccagccaggcggataagcaggacgcttccttgcgtcacttttaa

SEQ ID NO: 171158 - DNA, 1398 bp, Enterobacter cloacae
atggcaggtgatgttaattattatacaggtgaagtggttgagtcccataagggtactgtaagattaggtgacgaatattatgtcgctgtgctgatgattgaaaaaaacaatatatcaataacaataatggattttaatggaacgttacagaaaaattacacaaccatgttttcattaaaaaacatagtctttaaatctaatgctaataactttttgttgttcggattgactttgaatgaaacttatcatttaagagttgagcgagacagagtctttaatgactattcatattcagcacaagggtttctttatggtaaaaatggtctgcatttgaatgatcgttttaaaagcattagtatttatggagagaaaattaagaaatggtccggttttacacaaaaattggaccgtattttaacttgtggtttgataaaccaccttccagtcgagggtgattgcattgaatttgaaaaaaacttaaaaggattaggtcgtctgggtctttattactcctatacatctggtggcatagagggtttgcatacggtgggcatgtctgtcaatccacatataacgataaccttcgaaaaaagcgttcaccttgatgaactcatcgaacaatatactgatttatacatgttcctgaggtttttgattggttcttcattaaatatctcgcaagttgaaatcggaaatgatctttgggaacgtaatacggctcaattttatctcgctgaaaaatatgaaaaaataaataaactaaggaacggcgttttcatgccgttttcaactatttatcgtgattattcagaaaaccactttccattaattgtctgggaccattattatgattccgagcgcaaagatgtaaaagaactattaaaaaaatatgtttcatatactatggtggatagtaatgaagaaaaatttttagggttctacagattaatagaaacaatgacaatgaaaaaatcatcttacgttgatgaagaagtgttaactgaaacacttaaaactggaaagcgttttttagctaaacggttccccggtgcttcgattagtgatttttctcgtgctattaaaagagctaacaaaaccaaacacaatacagagagttgcattcatcattttattaatagctttcctcaacctatggttggaagtttgaatcttaataagattatcataagtgaaatatgcaggtctcgcaatcagattattcatcagcctttattttctgagtctcgtgatgtcatatataaatttaaggagataacagaagtgctagcaatattagctttaatggtgaagcttggtattcccaatgataaaattgaagggattgcaattaataatggcttccagaatacgtttagcttgcaacggcaggagtgctaa

SEQ ID NO: 171159 - DNA, 147 bp, Enterobacter cloacae
atgatgatctcatatcaggaacttgttcgcaccttccctaagatttttcctaattcgacgcaaactctactcgtcagttttgacacatacaatccagccatcctcaaatttaaaaaaaatgtgatctacgtcacacaatttaagtga

SEQ ID NO: 171160 - DNA, 300 bp, Enterobacter cloacae
atgccgcagggacttcaatgttgggattcagcaggtcgcatagttgtcgacctgtctgatttctccattcgttatattggtagtgcgagcgtaacttttgccaccggcgaaagttcgaaaaatatccctttctccggagtctctcaggatggttcattcattaccattgtcactcaggggctggacgtgaatgagtttttttgtcgcgcttttaacggcggttttactgccatgtatcttccggttaatggggtaccatttccaagaacacttaatgtggagatttataatttccaatga

SEQ ID NO: 171161 - DNA, 1761 bp, Enterobacter cloacae
atgagcatgcaaaccacaacaatacaactgagcggagaagacctcctccaaacagcaagatgtgaggatttgttatacgaccaaattaagatggtatctgtattaggtgattttgaacggcgcattattgactcgttaaaagggagtggggccaacctgcttgaaggtgctcgaggtgttggaaaatccatgcttctccgcatggctgaaattgagttagacaaagaattttctgtagataaaaaacttggcgtatatgtaaattttaaaaccagcactttacttgaaggtgttaaagctgatgaacgagatgcttttcagatttgggtaaatataaaaattttagaagcattgcatgagaaaatgcttgcattaaatctaattgcaaaaactggagtagcggacccttatcagcgagtttttggagtatcttcagtacttgaaacaaaagcaatgctcgaggagaaaatccatttacttcaaaaattggcttttagtcgaaattcacatgccgaaattcttgaccaaataggtgaagattttctagcaaaagcccaagataccagcttcctagtaaacataataaaagatatagcgaatttattttcacttaaaaaaataattttcttttttgacgaggcagcacacactttcatccctacccaacagaatattttcttcgaaatattcaagctgttacatgggggtatggttgcctgcaaagctgcagtttatccaacagtcactaattacggtcgcaattttgaagttggtcaggatgcgatagttttaccagtagttagattcgatcccggtgaatctgggcgtcgtgagaatcgtttgcattttcgctcgattcttgaaaaacgattaccgaaaacaagcaatttaagaaagaagatatttacaagaggggcagaacttgatctttgtattgatctttcaaatggtaacccgagagcattactgcacatattaaatagcgcgctatctagtaatacttccctttcagaacgctctgtaggattggcagtccagaactatgtcgatcaagcattaattccgtatcatcagagcctttctaaaagacttcctaagtattcatcgcatattagagttgggctagaattactgagaggttatattattccagaagtaaggactaaaaatcataggaagacaaaaagtgagtatcagtcagtgttttttactctacaacgcgatatgtcacctaatttgaagcttgctttagatattctgagctattcaggcatggtatctcagcttgggactgttaaaatagctagcggaacagggccacgttatatgatcaatctagctataatggctactgaaaaaggatttgatactccaaaaacttcagatgctatagctcgattaagccttactgactaccgtgaattctcatcatcagactcacaaataaaaacctatctggattcacttttgttgccgaccgagacctgttcacaatgtaatgctccactacaacaaaatgcaaagttttgtagtgaatgtggcaacaaaattgtggaagtttccatagttagtactttgcttgaagagcccataagtggattgtccataagtgaacgcttgaaagagagaatccgaccacgattttctaccgttgggtcggtggttcaagcaaaaagaaatgaacttatgacaattccttatattaaggatgttcgttcgaggatcataaagaacgcagcggatgagttcatttctggctag

SEQ ID NO: 171162 - DNA, 714 bp, Enterobacter cloacae
ttggcagaagacatccatgctcctcggcaacctttacaagacctcctcggcgcgttacatggtaagtttggtgacaacttagaagaggctgttaatgcttcaacagcacctcttttagatacgatagatcttaattctagaataattagcacgtttaaagctgaactaatagaaaaatataaagaagatgctcataaaactgggtgtgctgagatacttgatgaggttttcagtgactttgcgattgcaatgtaccttaattcaatcggccttattgttccggcacgaatgtccataaggagagcatttgagcttggactttctgtcatatacatgtgggatatgccacaggaatattggggatggaaaaaatgtgatcaggatttaagcttctctgctatggttacacacttgaactcttctggttataacgagtatatgaagcaattaaggggggagtcggaaaattcatgcttttgcgatcaggtaaattttcaaagactttacagaatcctaagtaacaccgttcatggaaaaattgccgatctacctgcattagcaccggagagattttctaccattacaaatgggctattagaacatctacaactaattatcgatactcaaaactctgttatatgcctactgtttggacgtttctcagagcttgagcaaacgatttgcactatatttcctcaaatcaaaaggacttaa

SEQ ID NO: 171163 - DNA, 468 bp, Enterobacter cloacae
atgcacagcgaaaccccggtagtcagtgttattcgacgttcctcgcgcctgatggtgcgagagttaggttttatgggttctaccctggcctcaacgaattattcgccttcggccgtccatactctggtcgaaattgccctacgaaaagagatgacggcgagccagctggtacagctgctgggcctggaaaagtccagcgtcagccggatgctggctcgcctgattgccgcaggtgaactcgaggaggtcatttctaccgaggatgcgagagcaaagagcctcaggctgaccgcgaaaggtcacgagacggtcaataaaattaataccttcagcaatgagcgcgtggtcacagcaataaaacgtcttgctcctgcccagcagcagaccatttctgaggggctctcctttatgccaacgcgctgctggcgtgtcgggaggcgggcaatgatatgcagcccgatgagctga

SEQ ID NO: 171164 - DNA, 375 bp, Enterobacter cloacae
atggaagaaaccgagttttacagaaatgggaatgttagcattactaatgcaaggtttatcgtaggttcaacaacatatgcaatgaatggtgtgacatcagttaaacgtggtcaaacagatccttcaaaggttggaccaatcattttggtattgattggtatcgcaatggtattcatcgccgcatctttattgacgaaagcaattggtgtggtcattgtggtggttgctattgcatggtttaaagcaatcaagcctgattatattgtttacctgaatagttcctctggagagtcacaggcactgaccagtcaagataaacaatatattgacgatgtgattaattccttgaacaacgccataattcatcgcggttaa

SEQ ID NO: 171165 - DNA, 834 bp, Enterobacter cloacae
gtgctgcaacatgaaaatcatagttcttcactatggtcattaataagttgtctttacagaaacaaaaatgttatttttgagatgagtaaaagggatattgtaagtcgttataaaggatcatttattggtatattctggtctctgataaatcctatatttatgctaacagtctatacatttgtattttctgttgtttttaaggctcgatggggacatggtgcggcagatgaacctaagacccaattcgcattaatactatttgttggaatgatcattcatggctttctggctgagaatttaatgcgtgcgcctggtctaattttacaacatgcaaattacgttaaaaaagtaatctttccattagaaatattgccggtcgtaactttattgtctgtactttttcatactttcattagtttcgccgtattgattttggcttttacgatctttaacggtataccacattggactgtattactggcaccacttattttccttcctatgattatctttactgttgctgcttcatggttcttatcagcacttggtgtttatcttcgcgatatagggcaaattattggcattatcactacgttattgctgttccttgctcctgtgttttatccgttgtctgctttaccaccggtgttccaacatattgtaatgattaacccactaacttttattattgaggaatcacggaaggtaattatttggggagggacgccagactttaaaggtttagctatttatactgtagcatcaatagtttgcctatggttaagttatatctggttccagaaaacaagaaaaggattcgcagatgtcatctga

SEQ ID NO: 171166 - DNA, 987 bp, Enterobacter cloacae
atgagcagggtttgcctttatctaaagcagagttgtatctctaactgtatgatatccgataacaatattgccgtcttaatatgtacgtttaatggcagcaaattccttcgtaagcaacttgattcgattatttctcaaacgtatacatcttgggaaatttttgcttcagatgatggttctactgatgacactctcgatattcttaaggaatatcaggctcgtctgggaaagaacaaattgcatatcattaaagggccaggcaagggatttgcctggaattttctcacgctactacagaaatgtggtggggcgtatgattattatgctttcagcgatcaagatgatgaatggctaagtgataagctggaacggagtttaggaaaaataagctctttagaaatagacaatacaaaggtcccagcattacattgcggcaggacaatgcttgttaatgaaaaagatgaatgcatcggatactccccattattttgtaaaaagccttctttccgtaatgcgctgatacaaagtatagctggcggtaatacgatgttatttaatcaggctgcacgtaatattataaacttaactcctcaggattttaagattgtttcgcacgattggtgggtttatattttaatttcgggctgcaatggtattattgtttatgatgaagtaccaacaataaaatatcgtcaacatactaataatataataggctctaatcttggatggcgtgcacgcttgcgaagaatcaatggattattcgatggccattttcgtgactggatacaatgcaatttaaatgcgttaaatgcaatgccgttgcaattatcaaaagaaagtcgttgggtattagaaaatttcattgaagccagatcatcacatctcattactcgcataataaaattcagtaaaattaaactatatagacaaacttctttcggtacaattgcattcttaatagcggttcttttcaagaagatttga

SEQ ID NO: 171167 - DNA, 474 bp, Enterobacter cloacae; identical to SEQ ID NO: 99300

SEQ ID NO: 171168 - DNA, 330 bp, Enterobacter cloacae
gtgaataaagatgagttagttgtgagatcattacttgccgagcttttaggcgatacgctaaattattatattgataatctatctgatttatccaagtcaaatggtgatgaagatccttattcgcgggcaagaagtgtaattcataaactatccccagaagaacaggagaaaattttcaatttccttaggttggtcattgtagatacaacttttactgttctcggaacaatcgatggttcacgtttccctccaaatattgatggggattttaaacttgaatatgacggcgatgaagtacaaggctccttacaagatgaattaatttcatga

SEQ ID NO: 171169 - DNA, 489 bp, Enterobacter cloacae
atgcgtggctttatttttgggttatctttgttgatttcttctttttatgccctagctaaaaccgacatagtacaagggccatttaagttagatgctaatgatagtgtttatattaagaaggaggatgatgttaattatccattagctctttatttcgaaactaatggtaatagtatcaaagtggagtcttatgaggtcgatggtagtgaacctcatgtggaaacagttttttttactaaaataaataataaaaaaaatgtaattgtattaatttcatgggagcaacggcactctgcggaaaagataaatggaactgcgtatcaagtttatggttataactattcccttaatagcctttctataaatccttctataaaaaaagaccagaatcttaatggccttaatggagagtttaatggtgaagagttacatttcaaatataaaaatgcagcagaaatcaagacgtatctacaatcccattataaataa

SEQ ID NO: 171170 - DNA, 2388 bp, Enterobacter cloacae
atgaaaatcagttacccgctcagggacaccagcggcaaagaatttcgctcagtagaagatgttatgcggcttatcgacggggaagcgcacgggacatggctgctgggtgcgaacggcctgtggcatggcgggatccatatcagtgaaatttctaatcccttttcagccctgaaccctgatgcgatcaataccggggaacctgtgccgctccagtttatggcagacggtattattgtggcgtaccggttaaacaatgaatatctgaccgctccgtactgtggacaacaactgcgttacagcagcagctttgtgctggtgaaatcgcagtgcaaacctgacccgcaaaaggaaaagagctggctggagttttacagcctgtatatgcatctggctccggtcgctgattacccgaaatctctctgctataaagtcagggacggtcacagtggtatacggttacgccagtataaaaacgggcaacacgggttaccggaggggacgccggacaagggtgaggccgggacatatcccgctccggcgaaaacggaaaagagcctgaaggcaggcgaccgttttgtatcctcccggacggggcgtttttacgtcacgaagaatggcaaagctaccctgacaacctttggcctggtccgtttactgaaagagaatattccgggcaaagaacagtactgggtaacgctggatccggagctggtggagccggatggcgaaatacaagcgctgatgccggaatggatgcagaaggcaaaacaaaaaggtgcttttgactccgtggaactgacggaaggaatggaagaatggaaggtcagcgccggaacgcctgttggatttatgggatgtatggaatcgcccggtgagggaaataatctcctggataaagagtggcttgtgcatctggaggtgctgagtacagattcaaacatgccgggatttttagctaatcctgaaaaagtgcaaggtgataaacggtccgtcctggcagcaaagggaagcgccctgtttacccggcaggatgttacgggactgcccgtgtttacagcgacatcagcgcgactgggcgcacagtgccgtctcccccgtgagtcagcaacgcctgtcgcggatgaagctcaaaaatggtggtataaggtcaacggaagcggctggctaccggagagtgatgtggaggaagttaaccagtacgatttagagaaactcgggtttcaggcgctggaggaaagcagcggcggcgatgtgatgaacagcccgtatgacagctgggtacctcaggcgtttggggcgataagccggaccgctgaacagggcgcggggtatcagtacggtctggtaccgcaattttatcgtgacctgatggcggagatggacagcaaccgtgacgggaaagtgactgcagaggaaatcaggcaggcgctggcagtgcgcgatccgctggtgaagaatgtggtcaaccggctggtggtcaaacatcacagcgagtggtgtgatggccgttcgacaggccgctgggaagggttttataaggatctggactcgctggaagtgaagtactgtgagaagtggcaggcagacctggagtggatgagcaaggtgccgccgtttgataaggatgaggcggtgtggcattttcatccggtggtttttttgaatgaattattatcttcaaaacttattacactggaaatggttcttgcggcaaatctaaatgaaaataaaattcaatgtgaaagggttctaccttatctcaataaatatgcaagagcctataagatggaagataaaaaagaaattgcacacttcctgtctcaaattgggcatgaaagtggttttagtataacagaggaaaatctaaattatagtgctaaagggatgcgaaggatttttgggtgcattaaaggtcctgcccaatataataaaaatactgatgattgcaacttgggacgtttaagagacaaactctggactcaggaatctttgtatgcgcataacccaaaaaatttggctaattatgtttatgccagtcgaatgggtaacgatggagaatcttctggggatggttataaatacagggggcgagggatgattcagttgactggtaaagatggctacagattttttactaataaacataatgaaatgaatccggatgataagagagactttgtcgaacaacctgatctagtgataagtgatactgaatatggtgtagagtcagcgttttccttttgggtaagtaaaggactaaacaaaactgccagagcattgagtgtgcaagaagtcacgcaaatagttaatggtggccagaatggttaccctgatcgcttacagaggtttaatgcagtggccccattattaagagtcgataaggagtga

SEQ ID NO: 171171 - DNA, 216 bp, Enterobacter cloacae
atgctgccagcgctggcggtaaccgtcttcccagtcccggttggtatccagaacctggccgtgcccatcggcaaacgtttcgcccttctgcttgaagtagcgaaaccggtccaaaaacttgctcatcgggtatctcctgtatggagcctgtggctctctaaatcgacattgctgatttgcagcgaaggtaacgccctgaaagagagggagaattga

SEQ ID NO: 171172 - DNA, 1053 bp, Enterobacter cloacae
gtggcgtgccggacgctgccagtcaagggcaaacgccagcggctgccagccggtctgcggacgcagtttttcctgacccacgtagtgcgcccagccgccgccgctctggccgacgcagccgcagaagatcagcatgttgatcagaccacggtagttcatatcgaggtgataccagtggttaagacccgcaccgacgatgatcatggaacgaccgtgggtcttgtcggcgttttccgcaaactctcgggcgatacgcacgatctgcgcgcgtggaacgccggtgatctgctccgcccatgccggggtataagccttcacgtcgtcatagccggttgcgcagttttcatcacccagaccgcgttccaggccgtagttcgccatggtcaggtcatagacggtggtgaccagcgcggtagtcccgtcggccagctgcaggcgtttcaccggcagcttgtgcatcagcacgtttttcagctcaaccttgttgaagtgctcggaaccttcgccgccaaagtacgggaagcccacctcagcaatctcgtcctggctacccagcatgctcagacgcagttccgtctcttcgccggtcgtgccgttacgctgctcaaggttccacttgcccttctcgccccagcggaagccgatagagccgtttggcgccaccagctcaccgttgctgttataggcgacggttttccactctgggttattttcctggcccagcgcgtccaccagatcggcggcgcgcagcgtacggcctgcggcgtagtagccgtcacgctcttcgagcatcaccagcatcggcatgtcggtgtagcgacggacgtagtcggtgaagtactggcttggtttatccaggtggaactcgcgcagcatgacgtggcccatcgccatcgccatcgcggcatcggtaccctgtttcggtgccagccacaggtcgcacagcttggcgatttcggcgtagtccggggtcaccgccacggttttggtgcctttgtaacgcacctcggtaaagaagtgcgcgtccggcgtacgggtctgcggcacgtttga

SEQ ID NO: 171173 - DNA, 615 bp, Enterobacter cloacae
atggatagaatctcaaagaatgtttttacagctctattaattctgctcttaatatgcttatcgttaattgctcactttggaaatgataatacttattttgtagggaatttaattccggaattcattggggtatgtgtagatcttattattattcttaaggttttcgaagtttggcaacaaagagatgaacgaagaaaactgattaaagttgaaagacgtttaagagagtttttaatttttttcttaaatcatacatgccaagattttccagtagcaagtagacctggaagattctacggcaccgactacgagcaaaatcaaaaatcgttgactgcgttaatttcccatatcaaagatagtggcttaagcgaagaaaatgtgttaaagattcaagcgtactgtaaaagtcaacatgatatcattaataatatgatccctgtttcttctgaattagaaaatgatcatttcaaatcatgggtacggatagcttattttatgaatgctgtggcaattggccaagagaaaacgagtcatgcattgataaaaatattagaaaatattaagcgattcgataaagaatcgcatgataagaaattgtatgttggggccgattaa

SEQ ID NO: 171174 - DNA, 375 bp, Enterobacter cloacae
atgcattcacgcggagatgtgatccccgctggcgacattttcctgcgcgtcgggcgtcacaccgggccaaatagggggtttggtgtccgccacatatgggcagagcatgaaagggagctgagcgagcggggatacacgactgtggacgacgtcgcccggtttgttcgtgacatcatccagccaggcgcaccgatttattgcgagttcagcaacccagccggtcgtcacagagtggctgtcctgagatcggctctgggtatcgtctttttggagccgagagaggcaccggataccgcgtcagggtggatttacgtcgtggtgacggcattcaccagaagaaccgcacacggcgtgctggtcgggagagttcagtaa

SEQ ID NO: 171175 - DNA, 1470 bp, Enterobacter cloacae
gtgtcaaaaactgaacaaaaaactgccaccgtgacgccgcttgacggcttttcgtggatagcacctgaaaatcggactttttcggttaacccgttgcttgatagggctaaggcttcatttcgcgctaacgccctgagcgcctactacggcgcggcgtatgtatccagtgatgacgccagaaacatccatgtctttgacggctctgtgtgggagctgttccctactgcccgcatcgagtatgacgcggcggcgctgctggagtacgccggggcagacttcgacccgcaggaaatcctgggcattgtccgggtgatgagaatgaaaaacccgcgcatggggaacgagtcaccagacctgatcagtttcgacaacggcgtgctcgacatctcgacgggggtatttcggcctcactcaccgttcgactggctgacaacgaagaatggcgtggtgtgggtgcctggctccgacgatgagacgctggagactcatgcgcctagcttcaacaagtggctggttcatgccagtcgtggcgacaaaacgcgtgcaacggcgattatggcggcgttctacatggtgctgacctgccgccatgactgggagatgtatctgtccgtctctggcccaggcgggtctggtaagtccaccatgcagcgcgtctgcaccatgctggctggtgagcacaatacctccgcgttctccctgacggggatctgcggcgactttggtcttgagcacctcatgggtaagcggttcctcgttaactccgaatcagagagcaagtggccagctcgcgctgttagcctggtgaaagcaattaccggcggtgacttgctgccggtgaaccggaagggtgagaaggtggtaagcgccacgctgaaagcgatcatgatgttcgtgggtaacgtagcccgttccgctgatgaaaacgacaacggtggactcgcccgccgcgagatccctttccacttccctgacgtggtcgccgatgccgacaaagacacggcgctgaccgaaaaaatccgcgctgaactccctgtcatcattcgccgactgctggctcgcttccctgaggccaacatggcgaaggctgcactcctgaagcagcgagacggggctgacgccaaggcgatcaagctcgagtgctcaccgcttgaacggttcctctcctcgctggaaattgacccactggccactctgacaggttctggtggtatgcaatggaacgatacggggctgaactctgcaggtaccgtgcgttatgagcggcggttcgtgatgcacgcctacctgtcattctgcgggtatgagggtatcaagccgtccatgaccaagtccgagctggttagggcgatcaagttccgcttcggttccgcgctgaaaactggcaaaggggcgaaaaaccgcacgctggttaaccttcgggtgcgtgaggatgccgagtacctggctggggttaccgatgctgaataa

SEQ ID NO: 171176 - DNA, 471 bp, Enterobacter cloacae
gtgggttactttgtgggttacttttttttgtgcgggttactttttcgatccccggagatcatttcgcgccacgcagctgcaccctgcgggatgcactttgtggtcgctctccccggtgcgtggtttgcacctgccggatctccagctaaaaaagcccggagggaaatgggggcagtttccagtgctggcgggggttggcgggtggtttatgcacggtggatcgtggttggcaccgtgcattggtgtttggcggcaatcgccgcgcctaccggttcgccaaatcctgccccaactttcagggggtacaggggcttaaatggggtgctgtcgtgtcgttgggttggttcggggttgaggcgcttagaatggctctggtgcgttctggtgggggcgtgctttctaaccggtaggggcgcagctgtcgccgcgctcctggttggggttagcgccagcgttcgagccggtacctga

SEQ ID NO: 171177 - DNA, 555 bp, Enterobacter cloacae
gtgggctactttgactgcgtaaagctgaccgacgcggagtggcctgatcacatggttgaggggcgggatgccgcccttcgccaggccatgcgtggtggcgtctcccaatggttccgggacaaggttgtccagcttctccctgtgctgcggtgcccccggggcgagtggcgtgatgccgagctgaaacgtgtagacgagcttgctgatgccctggggctggacgatatggggctgtttgcctacggcgctatgatcgtgaagcggcgggcttacgttgctggtagtctctcccgggctaaaccgcccgagccgctggctgttgtcctcgatgatggcgagcatcgttgtactgtctatgcaatgccccatccgacgctcggcgtgccggagatctccgaacgcggcgaggatggatattggactatctccgctggcggttgcgcatggatcaaggctcgcgtctcgctcggggagggagtcaggctctggaacgagctggttaattgcgcccggtaccctgatgcgccggtcctgacgcgggggatgctggaatga

SEQ ID NO: 171178 - DNA, 279 bp, Enterobacter cloacae
gtggatgtggactggctgatcgccgagcgtcccggcagggtaaaaaccttgaagcagcatccgcgcaagaacaaaacggccatcaacatcgaatacatgaaagccagcatccgtgccagggtggagcacccgtttcgcatcatcaagcggcagttcggcttcgtgaaagccagatacagggggctgctgaaaaacgataaccaactggcgatgttattcaccctggccaacctgtttcgggtggaccaaatgatacgtcagtgggagagatctcagtaa

SEQ ID NO: 171179 - DNA, 279 bp, Enterobacter cloacae; identical to SEQ ID NO: 171178

SEQ ID NO: 171180 - DNA, 2670 bp, Enterobacter cloacae
  misc_feature (73)..(82): n is a, c, g, or t
atgaacctttttatcaaggtgaaagtttatggcgtgaagttgttcgtattgttaacctgcgtgattggacagnnnnnnnnnncaccaagtgatgatgtaattccatcctttgagaatacaatctctaacgattattttgatgcacttccatttaatattattaacgacggaaatggtggctacactatttttgatagggaatgggacaacggtaaaactagcaaatttggtctgattgcctggcgtggagtattccactcgctctttcgaattaaatcatacgaatcatcttcttcagtatttgccaaaacttattttgatctggcttcccaggtattgcagcatatttggcctgacattccttctaccgcttttcttgaatgggctgaagaagaagcacgtttttctgtggaagtaacggggagagacaattatcaatcactccttgatgtagccttaaactcaacgataagctatcgagttaatgtaaccacgctgaagcagcagattactatacaagaaaatgagcttctggcgacaaaggttcatgtcgataatttaacaacacaacttgattggcaagccaatgaactagatagattgcaaaatgaattatcacatcaggcaaaatctgcaacggtattagcagaatctttgaaaaaaattgaggaagaaaaagcattaatgtttaattccttaagttggaagttaactaagccgttacgttttacaaagcgtgttgctttggcactttctcggcgtggaacacctaaaaatatgcatttaaaaaataaactatcacgtctgaacaaggttcttaacttgaaaaagaatcagctaggaggctatacacagttagcgctttggtcatatcaacgttatcgttcgtatggttataccggttttataagcaagctcaaacgtgcaatgaatccagttcctgtatcatccaatgcggtaccggtttacgaatatgaacaatggatcgagaagcatgaaaatattgacagcgtaaagttgacggccttttcctcccggctagcttcatttgagcatttgccaacgataagtattgttatgccatgctataacgcacctgtaaaatatttatgcgaagctatagaatcagttcgcaatcaaatttatagccgctgggaactgtgtattgccgacgatgcttcaacttcggaagaaaccgtattaaagctgaaagaatatgcggcacttgatcctcgaattaaaattactttccgctcgaaaaatgggcacatatcaaatgcaagcaattctgctattgaattagtgacaggtgaatatgttgctttgatggatcaggatgatttactgcctcgacacgcgctttataaagtggttgaagcgattaataaccaacctgatgtgcagctaatttattcagatgaagataaaatttcagccgatggagtacgttgcgaaccctattttaaggcagactggaatcgtgatctttttctgtcacagaatatgttctcccacttaggggtattcagcaaatccctcattgataaagttggtggtttccgacctggtttggaaggcagccaggattatgatcttgttttacgttgcctcgatcacgtaacggaaaatcaaatagttcatattccagagattctttaccattggcgcattattcctggtagtacagcctcagggggcgaacaaaaaccatatgctttcctggccggtattcgtgcagttcaagaatatcttgagcggaataatattgccgcacaggtagaagaggctaaacaaggtatgttgatgctgcgggtaaaatataacttacctaagcaactgcctttggtcagtataattattccaacaagaaatgcgaaagcattagttaaacagtgtatagacagcatatttgaaaaaacaacttattcgaactttgagatcattttagttgataatggtagtgatgacccttcttcgttagattattttgctgagttaaatgagcgggataatatccgtgttgttcgtgatgatggtaactttaacttttcgcgcttgaataatgaggcagttaaagtagcgaagggtgagttgttatgtctcatgaataatgatatagaggttatttcacctgactggcttgacgaaatggttagtcaagcagtacgtcctgaaattggtgctgttggggctaaattactttatcccaatgacactgtgcaacatgcaggcgtcatattaggattaggggggattgccggtcatgcgcatctggggatacatcgtaacgacccaggctactttggaagagctaatcttgtccaaaattttatagcggttactgctgcatgtcttgtaatacgtaaagaaatttatgaaaacgtcggtgggctgaatgaaaaagattttgctgtagccttcaatgatgttgatttctgtatacgtgttcatcaggccgggtatcataatctttggacaccatttgccgaaatgtatcatcatgaatcagcgactcgagggagcgatctggcaccagagaaaattgaacgattcaagcaagaaattaaatcaatggaattgttatatggtaacattctctttaatgatcctgcttacaaccctaatctttcattagatctaagttttggttcatttgctcttaaacgataa

SEQ ID NO: 171181 - DNA, 279 bp, Enterobacter cloacae; identical to SEQ ID NO: 171178

SEQ ID NO: 171182 - DNA, 1014 bp, Enterobacter cloacae
atggaattttatcaggtcgatccgacgcttgagaactactggcgtggtgtgatcctctttggaaggaacgtcgcatcttacaaatttgcgctggcgtcagcgttgtatgaagtggataagacaggcagcgatttgattacgctcgaccagcttgctgtgccgttcagccgttatctttgcgagcacctgaaacatgcgccaaaacagatcacctcccgcagtagtcaatttttggaaacctgcctgaagttcaacagaggtgaaatcacccacgcccagctcattgaagcgacggtgcgccttggctttaacaacgtgattgatgcctttcattacgtgaaccagggcgagatcgataaacgttttttccttgatgaacgcaaaaccaacaacgggatccgcctgacgcataacttctttttactgggcgaacgcctccagtataaaaacctcgcctttgaaaccaatgcccgctggaacctggtggaacaggcctggtcgatggggatttcgcgtaaccttgtgggcgtagagttcgacgaagataatcagctgttgttcacaagggtgaataagcgtcgcgtagacatcaccagctgccgcgacagcctgaatggttatcagaaaggacgatgtttttactgcttcaaacccattagcctggtaccgggagacgcagaactggcggacgtcgaccactttattccctgggctgcccgccatgaagtgagcaatattaacggcgtatggaacttagtgctggcctgtcgatgttgtaaccgtggcgttgaaggcaaatctgcacgcattcccgagctcaggctcctgcagcggttacacacccgcaatgagtattttattcagagcaaactgccgttacatgagacgattgttctacagacggggcaacgtcctgaagcacgaaaaagctttcttcagcgcaactggcaggctgcgctggacaaacttatccatacctggaaacccaacgcggaaggcgaggcaacgttttaa

SEQ ID NO: 171183 - DNA, 1869 bp, Enterobacter cloacae
gtggttgtagaagaaggaggtgctgttcatctggcgcggcggacggttccagtccagcgcgaaggccagcggcagccagccggtttgcgggcgcagcttctcctggccgacatagtgcgaccagccgccgccgctctgcccgacgcagccgcagaagaccagcatgttgatcatcccgcggtagttcatgtccatgtggtaccagtggttcacccctgcaccgagaatgatcatcgaccggccgtgggttttgtgcgccgtgtcggcaaactcgcgggcgattttttcaatcagccgggcgggcacgccggtgatctgctcgccccaggcgggggtataggctttgacctggtcatagctctctgcggcgttgctgtcctccagaccgcgatcgagaccgtagttcgccagcaccagatcgtaaacgctgactacccgtttctcgctgccgtcggcgagggtcagggttttgctcggcacgcggcgcgtcagcaccggatcctgcttcacgctgcggaaatgcgggttctcgttgccgccaaagtaggggaaggcgacatcggccacgctgtcgtgggtaatgagcagcgacagcgtcagttcggtgtcgtggcccgcagcctgtggctccaggttccatttgcctttttctccccagcgaaagccgatggagccgtttggtactaccaggtttccggcaatatcaaaggcgacggtcttccactccgggttattggcttcccccagcccgtcgacaaggtccgaggcgcgcagcatacgtcccggcaccacgcgaccgtcttcctgctcgtccagcagcaccagcatcggcatatcggtatagcggcggcagtagttgaggaagtaatcgctcgggttatcgaggtggaactctttgaggatcacgtggcccatcgccatggcgagggcgctgtcggtgccctgtttgggggacagccactggtcgctcagcttcgcgacttccgagaagtccggcgtgatggcgacggttttggtgcccttgtagcgcacctcggtgaagaaatgggcgtccggggttcgggtctgcggcacgttcgagccccaggcgatgatgtagctggagttgtaccagtcggcggactccggcacgtcggtctgctcgccccaggtcatcggcgacgccggcggcaggtcgcagtaccagtcgtagaagctcaggcaggtaccgcccagcagggaaagatagcgcgtgccggcggcgtaggagaccatcgacatcgccggaataggggaaaaaccggccacgcggtccgggccgtagtttttgatggtccagacgttggcggcggcaatcagctggttcagctctttccagttcgagcggataaacccgcctttaccccgcgccttcctgtagctttgcgccttttgcggatcgctctggatggcgtcccaggccagcaccggatcggtatgctgcgccagcgcctcgcgccagagctcaatcagcctgcggcgcaccagcgggtatttaagacggttggcgctatagagataccacgagtagcttgcgccacgcgggcagccgcgcggttcgtggttgggcaggtcagggcgggtgcgcggataatcggtctgctgggtttcccaggtcacgaggccgtttttaacgtaaatcttccagctgcaggagccggtacagttcacgccgtgggtggagcgcacgatcttgtcgaactgccagcgctgacggtagccgtcctcccagtcgcggttggtgttatatacctgcccgtgcccgttggcgaagctgtccccctttgttttgaaataacgaaagcgatccaacagtttgctcatgacatttctcctgcttcggacgtgtag

SEQ ID NO: 171184 - DNA, 1530 bp, Enterobacter cloacae
gtgacggccggccgcccaacaacctgcccgcttgaccctatcccctcctctcttctccagaccatttccggagaccttctcccttacctcacctcgctcatcaactcatccctgaccgctggctacgtcccttccgtcttcaagagagcgagagttgcaccccttctgaaaaaacctacactcgatccctccgatgtcaacaactacagaccagtatcccttctttcttttctctccaaaactcttgaacgtgccgtccttggccagctctaccgctatctctctcagaatgaccttcttgatccaaatcagtcaggtttcaagactagtcattcaactgagactgctcttctctgtatcacggaggcgctccgcactgctaaagctaactctctctcctctgctctcatccttctagacctatcggctgccttcgatactgtgaaccatcagatcctcctctccaccctctccgagttgggcatctccggcgcggcccacgcttggattgcgtcctacctgacaggtcgctcctaccaggtggcgtggcgagaatctgtctcctcaccacgcgctctcaccactggtgtcccccagggctctgttctaggccctctcctattctcgctatacaccaagtcacttggctctgtcataacctcacatggtctctcctatcattgctatgcagacgacacacaattaatcttctcctttcccccttctgatgaccaggtggcgaatcgcatctctgcatgtctggcagacatatcagtgtggatgacggatcaccacctcaagctgaacctcggcaagacggagctgctcttcctcccggggaaggactgcccgttccatgatctcgccatcacggttgacaactccattgtgtcctcctcccagagcgctaagaaccttggcgtgatcctggacaacaccctgtcgttctcaactaacatcaaggcggtggcccgttcctgtaggttcatgctctacaacatccgcagagtacgaccctgcctcacacaggaagcggcgcaggtcctaatccaggcacttgtcatctcccgtctggattactgcaactcgctgttggctgggctccctgcctgtgccattaaacccctacaactcatccagaacgccgcagcccgtctggtgttcaaccttcccaagttctctcacgtcaccccgctcctccgctctctccactggcttccagttgaagctcgcatccgctacaagaccatggtgcttgcctacggagctgtgaggggaacggcacctcagtacctccaggctctgatcaggccctacacccaaacaagggcactgcgttcatccacctctggcctgctcgcctccctaccactgaggaagtacagttcccgctcagcccagtcaaaactgttcgctgctctggccccccaatggtggaacaaactccctcacgacgccaggacagcggagtcaatcaccaccttccggagacacctgaaaccccacctctttaaggaatacctaggatag

SEQ ID NO: 171185 - DNA, 1446 bp, Enterobacter cloacae
gtggcaaacgaaagaattacagaaaatttagtacgagacacgttacgtgttttaggttatggcactgttagtaatgaaacgattgttgaagagcaaaaaagccaaatagctgaagtcaataaaatgcttcgtggtgccagcaaaacaggtggtaaggggatgggagctcctgagtttatcgttagctctttttctgcgccggactttttgatcattttcgaatgcaaggcccttacaaaacagcatgaaagccctatgcgaaacagacctgtagaatttgctgtagatggggtcctccattatgcgaaagcattatccaaaagttttaacgttatagctgtagctgcaagcggacaaaatgaatccgaattaaaaatatcgaattttctttggccgaaaggttccgttgagtacaagtctttgaccaatgaacatggtgtagaaataaattctatcattccgtttgacgactacataaaacacggctcctttgatcctattgtttctcgaaatcggcacgaggatcttatggcattttctcgtgagcttcatgaatttatgagagatcatgctaagctaactgaaagtgaaaaacccttgcttgttagtggaaccttaattgctctaaaaaatacaccatttgcaaaaagtttcggtgattacggacctgaggctttacagcgccagtggatgcatgtgattaaagaagagattgaaaaagctgatatccctaattcaaagaaaaatagtatgactcagccttactcaagcatatctgtacatccggaattaggtaaacctacaaaaaaatatccaaaaggtgtaatgcatgagcttataaaaatgctcaatgagaaagtatggccgtttgtgtctgtatatcacgacttcgatgtggtaggccagttttacggagagttcctgaagtacactggtggagataaaaaagcgcttggtattgtcttgacacctcgtcatattaccgagttatttgccttaattgcaaacgtccaagtcgatactaaagtgttggacatatgcacagggaccggtggtttcttaatttcagcgatgcagcagatgatgaagggcgcatataccgatgctcaacggaaccatataaaacaaaattgtttggttggtgtagagcagcaaccctctatgtacgctttagcggcaagtaatatgatattacgtggcgatggtaaagcaaacctataccaaggtaattgctttgatagcgctattactaatgcagtgaaagcgcatgaatgttccgtaggtatgataaatccaccctatgcgcaaagtgatgagagtttacatgaattgcaatttgtgaaacatatgcttgataatctcaaggatggtggcatcggaattgcgattgtaccaatgtcttgtgcaatctcacctaaggaaggtgcgaacaagttcctgatatga

SEQ ID NO: 171186 - DNA, 909 bp, Enterobacter cloacae
ttgttttcactatatattttacctcttggggatgttattcgaaaacataatgttaactttcactgctatgcggatgacacacagctgtacatttcaatgaaacatggtgaagccccaaaattgcccttgctagaagcatgtgtttcagacataaggaagtggatggctgcaaactttctacttttaaactcggacaaaacagagatgcttgttctaggtcccaagaaacaaagagatcttctgttgaatctgacaattaatcttaatggttgtacagtcgtctcaaataaaactgtgaaggacctcggcgttactctggaccctgatctctcttttgacgaacatatcaagactgtttcaaggacagcttttttccatctacgtaacattgcaaaaatcagaaactttctgtccaaaaatgatgcagaaaaattaatccatgcttttgtcacttctaggttagactactgcaatgctctactttccggctacccggataaagcactaaataaacttcagttagtgctaaatacggctgctagaatcctgactagaaccaaaaaatttgatcatattactccagtgctagcctctctacactggcttcctgtcaaagcaagggctgatttcaaggttttactgctaacctacaaagcattacatgggcttgctcctacctatctctctgatttggtcctgccgtacatacctacacgtacgctacggtcacaagacgcaggcctcctaattgtccctagaatttctaagcaaacagctggaggcagggctttctcctatagagctccatttttatggaatggtctgcctacccatgtgagagacgcagactcggtctcaacctttaagtctttattgaagactcatctcttcagtaggtcatatgattga

SEQ ID NO: 171187 - DNA, 327 bp, Enterobacter cloacae
atgattattagaaagcaaattacggactcctctttaaacctgcgtattcctccaaatttcagttgtcctgagtctgcacaactctgccaggacctaggatcaagagagacgctcaagtgttttagtactatatctcttgacacaatgatgaaaataatcatggcctctaaaccttcaagctgcatactggaccctattccaactaaactactgaaagagctgcttcctgtgcttggccctcctatgttgaacataataaacggctccctatccaaactcactaaaagtggcaataataaagcctctcttgaaaaagccaaaccttga

SEQ ID NO: 171188 - DNA, 516 bp, Enterobacter cloacae
atgccaacaaacaacaaaattccttcggtcgacgagctttttgcacaaatgacagatgagccttacatcttctcagaacttgagcttcaagcttcggtcgaaaagctatatatcggcattgtgcaacggatcacaaatgatgtggacctctacaaatacgttaccaccagcgttgagtctgcgcgaatgtggatgggccaacatggtgcagaagttctaaaccatgcgaagttgcaccctcacgagtttcagggcagtttacaggctgagctgtacccggaagggagtgctggtgattatgtggcgaacgggcaatacggcatgctgatgagtcaatttggggaagataagacgcagtggatttattgccaggcgcttaccaaggtaattaatgagtatcgtcaggagctggattccgtgaggaagaaggtggcatttaatacagcccatcattgcctgactaacgagcagtatcaggaagcccgccagtggatcgatgtgcttgagagcatctga

SEQ ID NO: 171189 - DNA, 282 bp, Enterobacter cloacae
atgaagtataacttcaggttcctgaccgacaagcaatacactgattcacttacagacaacaaacatcactggttctgcctgcacgaaatattcaaatacgagcagtatgattcccctgatgatattttatttaacgttgtcgtaccagaactcgaaaaaagaggactcatttccagtgaattttccagaaaaactctgcttaaactttataccaagataagaactgagaatcttatccactacttcaatgaggctttgttgaataaatcgaacttttgctga

SEQ ID NO: 171190 - DNA, 1074 bp, Enterobacter cloacae
gtggatgtatttcaaggcctaccttcaaactcagtgcctctttgcttgacatcatgggaaaatcaaaagaaatcagccaagacctcagaaaaaattgtagacctccacaagtctggttcatccttgggagcaatttccaaatgcctgaaggtaccacgttcatctgtacaaacaatagtacacaagtataaacaccatgggaccacgcagccgtcataccgctcaggaaggagacgcgttctgtctcctagagatgaacgtactttggtgcgaaaagtgcaaatcaatcccagaacaacagcaaaggaccttgtgaagatgctggaggaaacaggtacaaaagtatctatatccacagtaaaacgagtcctatatcgacataacctgaaaggccgctcagcaaggaagaagccactgctccaaaaccaccataaaaaagccagactacggtttgcaactgcacatggggacaaagatcatactttttggagaaatgtcctctggtctgatgaaacaaaaatagaactgtttggccataatgaccatcgttatgtttggaggaaaaagggggaggcttgcaagccgaagaacaccatcccaaccgtgaagcacgggggtggcagcatcatgttgtgggggtgctttgctgcaggagggactggtgcacttcacaaaattgatggcatcatgagggaggaaaattatgtggatatattgaagcaacatctcaagacatcagtcaggaagttaaagcttggtcgcaaatgggtcttccaaatggacaatgaccccaagcatacttccaaagttgtggcaaaatggcttaaggacaacaaagtcaaggtattggagtggccatcacaaagccctgacctcaatcctatagaaaatttgtgggcagaactgaaaaagtgtgtgcgagcaaggaggcctacaaacctgactcagttacaccagctctgtcaggaggaatgggccaaaattcacccaacttattgtgggaagcttgtggaaggctacctgaaacatttgacccaagttaaacaatttaaaggcaatgctaccaaatactaa

SEQ ID NO: 171191 - DNA, 999 bp, Enterobacter cloacae
atggctggccagtatgaaaaagcaataacgataaaacaagcgatagattcaattaatttacgccactatcttctgcctgcaattcagaggaagttcgtctggagcagcagtcagatatgtttgctgtttgattccatcatgcgagactacccgataaactctttcatgatgtgggatatccgtagtgccagtattaaaaatgattacaaattctatgagttcctgaaagaatactgtcagcgatttaatgaagaaaacccctgcgtagcaacaaatgctgggtttcatgatttcaaggccgtgattgatggtcagcagcgtctcacatcattatatattggattgtgtggaacgtatgcgtataaacagccccggatgtggtggccttcggcacaggatgatcgcatcctgccgccaagaaagctttacgtcgatttaacagcgccacttaattcagacgatgagctcatgatgaagtataacttcaggttcctgaccgacaagcaatacgctgattcacttacagacaacaaacatcactggttctgcctgcacgaaatattcaaatacgagcaacatgattcgcctgatgatattttatttaacgttgtcgtaccagaacttgaaaaaagagatctcatttccagtgaattttccagaaaaactctgcttaaactttataccaagataagaactgagaatcttatccactacttcaatgagagcagtcaggacattgatcatgtgctggatgttttcatccgcacgaacagcggggggacaaaacttgagttttcagacttactgatgtcaatagcggtagcgcactggcagggggatttcagaagagaactggatgaactgacaaaaaatatttatcagaacaacgagatggggttttatattgaaagagactggttcttaaaaaccagcctgatgcttattgactctgacgtccggttcaaagtaaaaaacttcacttcagaggggctttgttga

SEQ ID NO: 171192 - DNA, 321 bp, Enterobacter cloacae
atgaaacgtggctgggtctttcagcatgacaatgatcccaaacacaccgcccgggcaacgaaggagtggcttcgtaagaagcatttcaaggtcctggagtggcctagccagtctccagatctcaaccccatagaaaatctttggagggagttgaaagtccgtgttgcccagcaacagccccaaaacatcactgctctagaggagatctgcatggaggaatgggccaaaataccagcaacagtgtgtgaaaaccttgtgaagacttacagaaaacgtttgacctctgtcattgccaacaaagggtatataacaaagtattga

SEQ ID NO: 171193 - DNA, 402 bp, Enterobacter cloacae
atgcaccgttccctgaaaagtgcgctggcgcaggggaacaccttcatgacgatggaagaacaacagcggtggttcagtgactaccgggaagaatttaactacgaaagaccgcatgaagccctggcgggtgcaacgcccggaacggtgtggcacccctcgaagcgccagtgggatggccgtgttcctgactatgcctatccgtcaggaggaacggtctacagggtgaaatcgagggggacactctatatggggaaaaaggggacggtgttcctgagtgaagcgctgactgatgagtacatcatgctggaagaacaggatgatggcctggaggccatcatcttcaacggaataacacttgcgtactacgaccgaaaaacccagagtgtggtgcggatagactaa

SEQ ID NO: 171194 - DNA, 639 bp, Enterobacter cloacae
atgcgagctgtggcaagaaggtttgctgtgtctgtcagcgtagtgtccagagcatggaggcgctaccaggagacaggccagtacatcaggagacgtggaggaggccgtaggagggcaacaacccagcagcaggaccgctacctccgcctttgtgcaaggaggagcaggaggagcactgccagagccctgcaaaatgacctccagcaggccacaaatgtgcatgtgtctgctcaaacggtcagaaacagactccatgagggtggtatgagggcccgacattcacaggtgggggttgtgcttacagcccaacaccgtgcaggacgtttttcatttgccagagaacaccaagattggcaaattcgccactggcgccctgtgctcttcacagatgaaagcaggttcacactgagcacatgtgacagacgtgacagagtctggagacgccgtggagaacgttctgctgcctgcaacatcctccagcatgaccggtttggcggtgggtcagtcatggtgtggggtggcatttctttggggggccgcacagccctccatgtgctcgccagaggtagcctgactgccattaggtaccgagatgagatcggttggccctgggttcctcctaatgcaagacaatgctag

SEQ ID NO: 171195 - DNA, 579 bp, Enterobacter cloacae
atggaagaagtgaaccgtgtgaccaagcagaccgatttcaacggtatcaaagttctggataccggtacaggttcaagcacctacaacttccaggttggctctaaagataatgaaactatcggtatcactctgagttctagcgatagcttcaacctggcagctgctggcaacaccggcgcgacgctgaacaccaaagcgatgacttctggtgatgttgttaacggcaaccaacgtacgactgcagcagaaggttttgacgttctgcacggtgcggtaaccggtggtacaggtggtaccgcagcaggttctaccccactggcagacatcgataaggcaatcaaatctgtagacaaccagcgcagcctgctgggtgcctctcagaaccgtttcgagtccaccatcaccaacctgaacaacaccgtgaacaacctgtccgctgcccgcagccgtattcaggattccgactacgcgactgaagtgtccaacatgtcccgcgcacagatcctgcagcaggctggatcttccgtactggcgcaggccaaccaggttccacagaccatgctgtccctgctgcgttaa

SEQ ID NO: 171196 - DNA, 630 bp, Enterobacter cloacae
  misc_feature (604)..(613): n is a, c, g, or t
atgtatagtgatggcgatgaagcggaaaattatcttatttctgtactcgaacagacccaagaccatagtgttttttcagacgaactaaagccatggattaaggattggccttcattatatcatttatcttcacgtcgttctaatctcttacaaccctttaaaagttggttcaatggtaaacgagtcttggaaattggttgtggctgtggagcaatcactcgtttccttgccgaagctggtgcgacggtaatttccgtagaaggtagtattcgtcgtgcacggattgccagcaagcgatgcgctgacttagaaaatgtcactgtaatttgttgtcctagtgaccagctacccgatttaggagagtttgacgctgtcatgcttattggggtgctggaatatgcatcgatgtttctcggaactgacggtgatacaacgttattacagaattgccgtgaacgactaaataacaacggatgcttatttgtcgctatcgagaataaaattggcgcaaaatatcttgctggtgcaaatgaagatcatctcgcggtaccaatggtgggggttaatgacgcatataaagataaatctgtcagaacctatgcgnnnnnnnnnntgcgcgacaagaattga

SEQ ID NO: 171197 - DNA, 570 bp, Enterobacter cloacae
atgagaaacaagattctctggtctgatgaaaccaagagtgaactctttggcctgaatgccaagcatcatgtctggaggaaacctggcactatccctacggtgaagcatggtggtggcagcatcatgctgtggggatgtttttcagcggcagggactgggagactagtcaggattgagggaaagatgaacggagcaaagtacagagagatccttaatgaaaacctgctccagagtgctcaggacctcagactggggcgaaggttcaccttccaacaggacaacgaccctaagcacacagccaagacaatgcaggagtggcttcgggacaagtctctgaatgtccttgagtggcccagccagagcccggacttgaacccgatcgaacatctctggagagacctgaaaatagctgtgcagcgacgctccccatccaacctgacagagcttgagaggatctgcagagaagaatgggagaaactccccaaatacaggtgtgccaagcttgtagcgtcatacccaagaagactcgaggctgtaatcgctgccaaaggtgcttcaacaaagtactga

SEQ ID NO: 171198 - DNA, 384 bp, Enterobacter cloacae
atgctgttcatcgactacagctcagcatttaacaccatagtaccctccaaactcgtcatcaagctcgagaccttgggtctcgaccccgccctatgtaactgggtactggacttcctgacgggccacccccgggtggtgagagtagtgaggtctgcacaacgcatcaccgggggcaaactacctgccctccaggacacctacaccacccgatgttacaggaaggccataaagatcatcaaggacaacaaccacccgaaccactgcctgttcaccccgctatcatccagaaggcgaggtcagtacaggtgcatcaaagctgggaccgagagactgaaaaacagcttctatctcaaggccatcagactgttaaacagccaccactaa

SEQ ID NO: 171199 - DNA, 534 bp, Enterobacter cloacae
atgggccagcacgcgtcccttaagatccgtctccgggatggcattggcgatatacggcgcggcaccacccgcaatcgcagctttaatatcgccacctgccagcgcctgaatggccgccgttgctgccgtgatggcgcgctgggtgctctgccccgttcccatgccagactggttaaacgcttcgttatagaaggtctggtacatctggtcatgaatcgcctgatcggtaacctctttaccgtcttttttcagctggctgatggcggcgttacgcgcatcgctgcccgcggttttcatcttctcgttggccgcttccgcggccgcaatcttgccgttagtgcgcgcaatatccgcaacctgattgccgatttcgccaatcatttgcgcggtttgcaggcgtttctgctctttctctttgttaaagatcgggtcgatgctgccgttggcatggccagtgtcacggctgagcgtgctgacgtcctgcttctggttagcctggtcgcgaacaatgattgcaccgtcggctaccgctga

SEQ ID NO: 171200 - DNA, 408 bp, Enterobacter cloacae
atggttaaaattgatgggaagatggatggagccaaatacaggaccattctggaagaaaacctgatgaagtctgcaaaagacctgagactgggacggagatttgtcttccaacaagacaatgatccaaaacataaagcaaaatctacaatggaatggttcaaaaataaacatatccaggtgttagaatggccaagtcaaagtccagacctgaatccaatcgagaatctgtggaaagaactgaaaactgctgttcacaaatgctctccatccaacctcactgagctcgagctgttttgcaaggaggaatgggaaaaaatttcagtctctcgatgtgcaaaactgatagagacataccccaagcgacttacagctgtaatcgcagcaaaaggtggcgctacaaagtattaa

SEQ ID NO: 171201 - DNA, 489 bp, Enterobacter cloacae
atgattgtggactacaggaaaaggaggaccgagcacgcccccattctcatcgacggggctgtagtggagcaggttgagagcttcaagttccttggtgtccacatcaccaacaaactaacatggtccaagcacaccaagacagttgtgaagagggcacgacaaaacctattccccctcaggagactgaaaagatttggcatgggtcctcagatcctcaaaaggttctacagctgcaccatcgagagcatcctgactggttgcatcactgcctggtatggcaactgctcggcctccgaccgcaaggcactacagagggtagtgcgtacggcccagtacatcactggggccaagcttcctgccatccaggacctatataataggcggtgtcagaggaaggccctaaaaattgtcaaagactccagccaccctagtcatagactgttctctctgctaccgcacggcaagcggtactggagcagccaagtctag

SEQ ID NO: 171202 - DNA, 447 bp, Enterobacter cloacae
atggtctggggcggtgtgtcacagcatcatcggactgagcttgttgtcattgcaggcaatctcaacgctgtgcgttacagggaagacatcctcctccctcatgtggtaccctccctgcaggctcatcctgacatgaccctccagcatgacaatgccaccagccatactgctcgttctgtgcgtgatttcctgcaagacaggaatgtcagtgttctgccatggccagcgaagagcccggatctcaatcccattgagcacgtctgggacctgttggatcggagggtgagggctagggccattccccccagaaatgtccgggaacttgcaggtgccttggtggaagagtggggtaacatctcacagcaagaactggcaaatctggtgcagtccatgaggaggagatgcactgcagtacttaatgcagctggtggccacaccagatactga

SEQ ID NO: 171203 - DNA, 333 bp, Enterobacter cloacae
atggtttgggcctgtttttcatggtttgagcttggccccttagttccagtgaagggaaatcttaacgctacagcatacaatgacattctagacgattctgtgcttccaactttgtggcaacagtttggggaaggccctttcctgtttcagcatgacaatgccccgtgcacaaagcgaggtccatacagaaatggtttgtcgagatcagtgtggaagaacttgactggcctgcacagagccctgacctcaaccccatctaacacctttgggatgaattggaacaccgactgcgagccaggcctaatcgcccaacatcagtgccgacctcactaa

SEQ ID NO: 171204 - DNA, 216 bp, Enterobacter cloacae
atggctcagccgcgaagtggtaggccacacaagctcacagaacgggacagagtgctgaagtgcgtaaaaatggtctgtcctcggttgcaacactcactactgagttccaaactgcctctggaagcaacatcagcacaagaactgttcgtcgggagcttcatgaaatgggtttccatggccaagcagcagcacacaagtcttgctcaccatgcgtaa

SEQ ID NO: 171205 - DNA, 171 bp, Enterobacter cloacae
atggcggcaggtatgaatacacacttctttgtcgaaaattcccgcccgacgcacgacacgctgaaaggctttaaccgggttactcagcggcattccttgttttttacctataaacaaccacggatttccccgctgtgttggcagtgttctgattacgtccatcgccagtga

SEQ ID NO: 171206 - DNA, 171 bp, Enterobacter cloacae
atggcggcaggtatgaatacacacttccttgtcgaaaattcccgcccgacgcacgatacgctgaaaggctttaaccgggttactcagcggcattccctgttttttaccaataaacaaccacggatttccccgctgcgttggcagcgttctgattacgtccatcgccagtga

SEQ ID NO: 171207 - DNA, 123 bp, Enterobacter cloacae
atgcgccacttcaacccattgttaaacgtgaaccacattaaatggggccgaggttgcaatacctacagcttccacacgatgtcaacagtcttgtcatttgtctcggatttgtttcttggttaa

SEQ ID NO: 171208 - DNA, 186 bp, Enterobacter cloacae
atgcatggggccatgtatcgtgagatcttggccaacaacctccttccctcagtaagagcattgaagatgggtcgtggctgggtcttccagcatgacaacgacctgaaacacacagccagggcaactaaggagtggctccgtaagaagcatctcaaggtcctggagtggcccagtctccagacctga

SEQ ID NO: 171209 - DNA, 1158 bp, Enterobacter cloacae
atgaggcttgtatttgcaactcaagatttgactctggctaaccgctccttcgaaggctttccattactgattggagcagatgggtggccagttcaaccagcacaatcctttctttggcacatcctcatcgagtcaggtgaatcactaagcactctgacctgggaagcatacggtcggcgtttgtatgactacttcgctttcctggaagccaatgcgctagcttggaacgatgaaaccccagctcacggccttagcgttctttcgagatacagagattggtcaatcggcgaactagcgcttaatccgcgtactgttaacaaccgtctggcgttgattgcgagattttatcggtgggcgaagctgaacaacctaataaaggtgctgccttttcgtgagaaaaaaactcatattgttccccactcaggtcttttaagccatgtaactcggcctgggaaagaaagaagtaaaatttcaataatgctccgcgagcgaaagcgtcaaatgaaatttttgaccaaagaacaagtcaaagtatgccttgccttagatgacgatccaagccatcagatactgtttcacctcatggtacgaactggacttcgctcctgtgaagccaggtcttttcctctcaaatatgtgtttaatcccaggttgaagaatgggctgcgccgtgggcagatgataagcgttgctcttgagccttcagatatgcaaattaagtatgaccgacccagaatcattgatgtgccttggtcgctaatggaagacatgtggtcttattcccttcatcaacggcagatgcgtaattctaggggtgatggaagtgttaccgcattattactgacaaatgaaggaaagcaatactcaaaagatgctgtcgtagacattatgaagtcctacgaacgtaagtgcggtttctatgtgcgtgcccatatgctgcgtcacacctatggaacttatactttgcttgcccttcgaaaaactaaagaatttgaaggtgagccactaatgtatgtaagagatcggctgggccattcagatgttcaaacaacgatgatctatttgcatcttatcaatcagctggaagctcaatccgtacttgcgtatgaagatgaaattgacatgatgtttatgaccacctctcttaatcacgactga

SEQ ID NO: 171210 - DNA, 1611 bp, Enterobacter cloacae
ttggctcagcaaaagaactataaggcagatctgcaaccaggcactaaaaatttagaacctgccgttgaaaatatcaaaattgacttgccaagaaacccgggaaaccataggcagattgatcattctcaatacctaggtctgggtttcgacgcttgggcaattcaaagcattcatgttatcagagcattattacaaggagggaatttttctgtcgccactttaattggttattcggtcacaggattgagaaactttatgaagtttttaagcgcaaatctaattgaatcaccacctgctacgccaagtgatctgacaaaacgagacatggaacgttatatttcctggctaaaaattaaatacccaaacggctcgacggccaagaatttttatacaagcttcaaatcactaattattattctggcggattatgggtttatagcaaacgttcttgacgatctcctaccgcctaatccgtttcccaataatgcgaaaaatacaaaagatgcagatccgtttaccatgagagagatgcaaaggttgcttagtgcattaaaatgcgattttattgatatctataaaggcacgtttcttggtaatgaagctgagaaaatgacagtgctgttgctaatcacggctgcaaggtccggccttaatacaacgtcattattagagatggagagagacgctataacaccacatccttttctgccaaatctcaaactaattaacactctcaagcgtcgtggcaaaggtgcgcagaacaaaacaatacgtcaaacaaatctactggatcaatatagctccattccacttgatggggttgcagtcttgaataaggcgcttgcaatcagtaaaccgcttgtggagctggcatcagatgagattcgttcatatatatggttatatcgctcaggacagcctgggggtgagaacaaaattgttgctcttaatcccggtgctttatacgtgtgtagcaaaagtatttgtaagcgtcattcactccaagatgatcaaggaaatagactgaatgtcactcttagtcgtctgcggaaaacaatggaaagccgcctatggaaactgagtggtggggacatcatcgaagtgtcttcgatcatgggacataccccacaagttgcagataatcactatttgaaaataaacgatgaaatcaagactgagagcgcggttttcattggtgagactttccctgataaacttcgtggcaccaccattacaccgaccccatcaggcggttgcaaagacagtctttatggcagtctggcgcctatggatggcatcaatcattgttctgagttcattcactgtcttgcttgtcctagctatgcaattgtaggaactttggaggatttataccggctgttcagctaccaacaattcttatatgccgaaataaaatactttcttactgatgagtgggacgcatggcgcaggcggcagtttaattttattcagttgatagatgatttcacctcccgaaagttcgatcttgcgttggtcctgcaagcaaagactaaagctgaatcctctccacacttgttctggagtaaaaagatcgagttcatgaagaaaaaactaggaggtgaaatatga

SEQ ID NO: 171211 - DNA, 1857 bp, Enterobacter cloacae
atgagcacaagaagcgttagtgccatgttgcaggcatatgatgtcctcatctcccagccagctacagctaatggactaagttctgcagagcgggatgcaatcgtcatcagtgctattgttaatgaaaatggtgaaacgctggttcttagtcggtttggcgattcgcagtgggatctacgcccgttttttgatcaggcaaacgtttctcattcttataaatttatcaactgggatatgagcatgcctcgggcgctcattgatgacagtaaagctgttgcttatgcttggtttaagagaggaatgcctaggtctaaaccacctatcgcacggggtatcactacttttgctgttgccagcgtgatgccttttattcgctggctaaataatttgggcgtttcaagttttgcagagatcattccaatccatatcagcaattacgttcattattgcaaaagtgagttgaaattaaggcctcttccgctgtatggccgattacggattattgattttctctgggtattctctaccgatatgatgttccccctcaaaaattatccttgggggagttcaacattgtggcgtatttgcgggattgccaatataaaagggttagatgcagaaaataaaaacgttgtgcgaacggatatcattccttcggatgaacaatccaaaatcttcaattattgtgaaaaaattgtccaagatatgaaggctgagttggctgtctgtggcattggatatcatcctagcgatgaacagatgtcaattcgttgtagagacgctgtactatatatagtttcaatcactagcggtatgcgcaatgacgaggctattggaattgaggtcggtgcttggcgtaaggagttaaagaatggcatcaccttttactgggtagctacaatcgagcataaaacaggcaaagggctagtcgagtatcttgtgccggaactgacatttgaagcactaaatcttttggcaagatattccgtacctatcagaaaggagttggagcaagagattaggttgcttgcaaaaaatcagaattgttcgaattcaaccgaacacattcttaggctcgaaaaagctcgaaaggattcgaagaaactatttctgggacgaaacagccaaggaggaaaaattaaggaaggctaccacgttgaagcgcttagcggccaaggttctaatgttgcatttggccgtttagctaaagctgctggaagtgattggccgttaaagacacatcaatgcagaagaacatatgcaaggtgctttgtggagtcccgtatgggaagaacttcgcttatttttctcaagtggcagtttaaacacagcagcatgagcatgacccaactgtatgcgtctaacccgcagcaagacttggcactttttgatgaaatcttacagcagatgacagaatacaaaattgatttgatcgaatcatggctcgatgaacagcctttagcaggtggcgcaggtgaaaaaatcgtcaaaatgcgagctattccaatcaaagacagggccgcattgcttgcccaaaccgtcccacatgcaaacattcgtgcgactggacacggctggtgtattgcaacagagcgaggttgtggcggagccggattatacgaggcaacacgctgcccaacatgcaaaaacgcggtgattgatgagcttttcgcggatacgtggcaggacatatactgtcaacagcaggagctgctcaacatcgaagatgctgggcctgctgtaagacagcgggcagagcgcgatttacaggttgcattagatgtcatcacgagcttaggtctgtctcctatcaatggcaatattgacgaggctgggaatggcgatgaagtccattaa

SEQ ID NO: 171212 - DNA, 414 bp, Enterobacter cloacae
atggcgatgaagtccattaagcggcagactcttgtccgttcgcggtcaaacacactagatgttcttgataaagtcattaatgaccttgtcgaaggtaacgaaaagatttccatcgctttggttgcccgaatagcgggcgttacacctggactcattcataacacctacccagcggtggcggagaaaatccgcctcctcatgggtaagtcagttcgcgcccagcgagattcgaaacatcaggcgctgatggttgaaaaggagaggaaccgggtgctccgtgcagagaatgaccaacttttagacgagctagctcgaattgcttctgtaaatcaacgcctgttgttcgaaatggacgagttgaagacagcaggtaataggggggttgtttccatttcttccaaatcccgtaattag

SEQ ID NO: 171213 - DNA, 2310 bp, Enterobacter cloacae
gtgcatcttcactcgtatcgccttaagaactaccgacgtctacaggatgctcatattgagctggctgacgatatatcaatattcgtaggatcgaataacagcggaaaaacctcagcgactcaagcgattcatgcgttcatcacgggagggagggatcgttttagcctctacgattttagttccccatgttggaaacgttttgatgaagcgggaaatatcaatttagctgatccaatacccgagggattctcacttccgagtatagatctcgatctttggttcgaggtcgcggcagcagatctctatctcgtcattccattgcttcctagtacagcatgggaaggcactaaggtcggcattagagtttccctgaccgcgaaaaactctattaacctcattcaaaacttccaggaagctaaagacagaggggctgcacagacagcggaactgccacaagattcgcaatatacaccatggcctcgatccatgacggactatcttcagcgcgaactcaagagcgaatatgagttgcgctacttcatcttagatcgcacacgatttgatgagacgaccttccaagagattggaaattatgttccagatgaattaagtggagaaccaggcggcggaacaattttaaaatcacttattcatatcgataatctgggtgcgcaacgacatcttgcagatcctaatccagaagctgggggaagatcagaagacttgtcaaagcgtttaagccgcttctacaaacgcaaccttaatcaaagacaagacgatcatgtagcccttaaggcactattcgactctgagcaagcgctcaaccttcatttggatggcgtattcaagccgatgctggatcggcttgccaggcttggctatccgggcgtcaataatccgcgactgaaaataatgtcagcattagaccccgctcacgtaatgaaccaggatgcacgggttcattatcagatcggagatggagaagataccgccactcttcctgacagttataatgggcttggtttcaaaaatttaatctacatggttgtagaaattttagactcccaagcaagatgggcagcgatggataatcgacctccattgcatctgctttttgtggaggaaccggaggctcatctacacgctcagctccaacaggtcttcatccgcaatattcttgaacttctgaacttagagggagacgacggaagcatttttggtagtcagatggttatcacgactcactcgccgcacatcctttacgagcgaggattcaagccgattcgctatttccgacgcaaaaaaactggtacagaacaggtgacagaagtcctcaatctatcggcgttttaccaatctcaaccgaatgatcgtgattttttagaacgatatctgaagctgacacattgtgatctatttttttcagatgcggctattctcgttgaaggtaacgttgagagattgctcctccctgtcatgattagaaagagcgcgaagactctccgctcagcttgcttatgtgtcttagaggttggtggggcctttggacaccgtttccagtcactcattgagtttctcggtctgaccacactgatcattactgatattgatagtgttgctcttaaagctcaggcgattgagggtgttgaggaggacgaagaactcgaagaatttgatattccaaccgacgcggaagacgagccagcggacctggcccaagtcaatgagcaagatccagacggtgaatcgatggttcctgcacctaagaagaaatatggcaaagcctgcttaccaagtacaccgaacgctgcaacctcgaaccaaactcttatcaaatggcttcctgggaagctcacaatcgaagaactgcgtaatgcatctgaagcggacaaaactcacgtattcgaaaacgatgcaaaggttcgcgttgcctatcagactgagcgggctattacctggaacggagccaccgaaatcttatgcgggcgtacgcttgaagaggatttcggcctcgaaaacccgaactggtcccaagccatagcgagaaagcctttaggtttaattgtgaaaggagagcccattagtccagcagctcttgccgaaggccttcatcaaaaggtttcgcgaaagagtttcgataaaacaaagtttgcgcttgcagttctcaccgaagatgaggaagcatggcatgtgccggtttatatccgtgatggacttgtctggctgaaagacgaaatacggctcgaactcgaaaccgtgctacctgaacttatcgccgaagaagatgttgtgacgggaggtgagcaatga

SEQ ID NO: 171214 - DNA, 1959 bp, Enterobacter cloacae
atgagtagtcgagcaaataagccagacacccaggccgacatagacttgcggaactgccttagcaacgttccaccacgtagcttcatcatgaaggccggcgctggttcaggaaaaactacgtcactgattaaaggcttggcatcggccatccaaatacacggcgataagctcaagaggacccggcagcgcattgcctgtattacttataccgagattgctgctggagagatttggagggacgtcggtagtgatcctctggttcatgtctcaacgatccacagttttatgtggctgttagctaagcctttccagaacgatattcgcatctgggtgtctgggcgcatcatggaaaaaattgatgtgcttgaagaaaaatgcgcaacctatggtcccagagtccaacagcggacgaaggataaggacgcccgagatttggagcgcctccgtcgccagtcggagcggatagctacagtaaaaggttttcgatacggaacaggtagcaactacgcaaagggtattcttggtcatgacgacattctgaaactggtctcctaccttatttccgaacgctctctctttcgaagccttctcgcacgccagtttccattcgtctttgtagacgagagccaagacacaactcctgcagtcgtgcaagctttgaaggccgttgagcgtgaacccggggtcacattctgccttggtttcttcggcgatccgatgcaacggatatatgtcacaggaaccggacaagtcgaagcagagtctacttggattgatattccgaaacctgaaaatttccggtgttcaactaaggttttaaacctcgcgaatgccattcgtcgtggtggtgatgacctcgttcagacccctggtcaacgtctaggtccagaaggtatcattcccactccagagggttccgcacacctttttattttgcctgctgacgaaacacgggatgccaatctcgttcgtgtacgtgaatggatggcaacacgaacaggtgacgactactggcgatcagatgataatgatcaggcgcgagtaaagcttcttgtcattgttcaccagatggcagcaaggcgtttagggtttggggacctctacactgcacttaactctaaagccccatcagcgttcaaagatggttttttagacgggtctgcatggcctatttcatcgtgtgtaaagtttttgatcccgattgctattgctcataccaatggtcaacaacttgaagtgatgcgcttgattcgagagtattcacttcttcttgataaagagtctcttggaggagcgagcgtggcggaacgccttaaggtacttggcgaacttgttgcttcaatcacagcgggcatagcgggacattccggagcaacaatcggcgatcttctaaaacaagtaaattcctccgatttactagtccttgaccctcgattggtatcgtatctggatccaaatgcagttcttcctgttcagcctgagccagaagcaggggagaacaatgacgacgatgttcaagaagagggtgaaactgacaaggaaatggcctcaatggatgctttccttgcctgccccgcgagccagcttttgccataccatacctatatttcggaacgttctcccttttggactcagcaaggcatcaaaggtgctgagtttgatagggtacttgtcgtactggatgacgccgaaagcaaccatttccaattctcatacgaaaaatacctcggtcttgaggctctctcagataacgaccagaaacatatggatgccggtgaagaaacaaccatggatcgaacgcggcggcttttctatgtgagttgcacaagggcgttaaaagacctggcggttgttctgtttaccgctaatcctgagcaggccgaggatcacatacgccaacttgatctttttgaagtggaagccatccacactggaaccgtctttgatctagccctgtga

SEQ ID NO: 171215 - DNA, 999 bp, Enterobacter cloacae
atgaacggtatattttataacaacacaattactaccctaccgggatgggctgagcctttacatttatctcagccaatcggttacgcatatgaaactgcaacccactttgtgcatttatatggtaaagaccatgggttgaatgtaatttctgttggcttaacagtaattgagaaaaaaaatggcactctagttgattgggtacaacgagtatttggcgctcaaaatatccaaccattatctttgcctattggtgatactgttgagaatctttggcgtccttcactttattactctaacgatattcagatagccttaaatatcgatccatatgagcagcgttcagcagagcaggcgttgcgtgtacttgtcgaaaaacttgatgatattctcctctatgtggaacctagtcaaagtggtttagcttcttatgggcataaaagtagagagttactaatacttgcgtgtacagaggttgaaaatctatggacttcaattttccaaaaagcaggaatccccccttcaaacagccgaatgtacacaactcaagactatgtaaaactgttgcctaaagctggattgaacgaatttgaaataacgtttaaaaactacaatggattacgtacttttcaaccatatgcaaattggaatacgcagcaacccactcagtctttaagctggtatcacgcatacaataaaactaaacatgatcgaaatgcatcatttaatgaagcaaccttagaaaatgtgatggacgcaacttcaggggttatagctatgttttgtgcgaagtttggtcctttttcactgatacatgataataatgctctatcttctcttatgaatcagcattttcacattaatcttaaggatagtgaccattcaacgtactatgttcctaagataaatttaccagtaaacacaagaaatgacttgttcttatatgattgttatcgagaggggcacaatgaacagtggaatgttcaaccactagtgctataa

SEQ ID NO: 171216 - DNA, 249 bp, Enterobacter cloacae
gtggtggatgatttaaactgtgagactctggcgatagaaattgctctgaataccccggtacaacgtgttgtgcgggtgctggacagaatcgtggtaacccgtggctatccgctaaagatgcgaatgtataacgtgccggaactgatatcacaggcacttgcgcagtgggctgaaaagcatagtgtggtgctggagtttattaagccgggtaaaccgatacagaacgcctttttacaatttcacagctag

SEQ ID NO: 171217 - DNA, 225 bp, Enterobacter cloacae
atgaagaagtgttttaccgacggacagatcatcagtattctccgcgaggctgaagctgggatttctgcccgtgaactctgccgtaaagcacgccatttcctacaccaccttttacacctgacgcaagaagtatggcggtatggaggtgcggttaagagcctgaagtccttcagcttaatcactagcgtgtgtactgcctttatcatctcagcgggctgggcgtaa

SEQ ID NO: 171218 - DNA, 1263 bp, Enterobacter cloacae
atgttcgctctcgtagatgtaaatagtttttatacttcttgtgaaactctttttcggccagacttgcaggggaagcctgttgtcgtggtttccaataacgacggctgtattatttctcgttcaactgaagcgaaatccctcggtataaaaatgggtgaaccttttttcaaaataaaaaacaatacatatagttccaggattcatgtatttagttctaattatgcactttattccgatctaagtgagcgagttatgcagacgctaactgcaatatctccttcgatcgaagtttattcaatagatgaagccttcgttaatttatctggggtgataaactgcatgccattaagtgatttcggtcatgaaatgaaaaacaaagtatttaaaaatacaggtttaactgtaggaattggtattgcacaaacaaaaacattagcaaagctagctaaccatgcagccaagaaatggcgtggcactggtggtgttgtcgatttatctaatattgatcggcagcgtaggctaatggcacttacctctgttgaggatgtgtggggtgttggtcgaagaattagtaagaaacttaactccatgggtattaatacagcacttgatctggctgaaagctcattgtggataataagaaagcattttaatgtcgtgcttgaaaggaccgtccgagaacttcgtggtgagcaatgccttgaactagaagagttttcaccaacaaaacaacagatcatctgtagtagatcctttggccaccgtataactcagtactcagatatgcatcaggccatttgtgcttacgccgaacgcgcagcggaaaaactgcgtggcgagcgtcagttttgtcgtttcgttagcgtttttgttcgtacaagcccacatgcagataacgaaatatactatggaaatcaagcttccgtaaaactattgataccatcgaatgatacacgtgacattataaacgctgctacgaacgccctaaggagggtatggattgatggtcatcgatatatgaaggctggtgttatgcttgctgatttttttagtaatggagtggctcagttaaatttatttgacgataattcccaacgaagaaacagcgctgcattaatggaggctatagacaaactgaataagtcagggaaagggaaggtttggtttgcaggtcaggggttcgaaaaatcatggactatgaaacgtgagatgttgtctcccgcttacacaacccgatattcagacttggcagtggcaaggtga

SEQ ID NO: 171219 - DNA, 420 bp, Enterobacter cloacae
atgcttttcacccgaccaactgagatttctcccccgctcatacttcctctcttttctgagaaagtgccctgcggctttccgagccctgcgcaggactatgttgaggacagactggatctcaataaattgctgataagacacccgagtgccacttacttcataaaagttagcggggagtctatgcatgacgccggtatcagcgatggggatcttttagtggttgatcgctcacttccggccatacatggcgatattgttattgctgctgtgtcaggtgagtttaccgtcaaagaacttcgtactcatccttatctacagctagtacctcacaaccataattattcttcgatttcatttcaaaatgcagatgaattagaaatatttggggtggtgatttttagtattaaggcgcataaataa

SEQ ID NO: 171220 - DNA, 4422 bp, Enterobacter cloacae
atgtctgaagaaatcaaaaatactgcgatcactgctgcaggctatgtctatcagaacaggcaggggctgaaactgctgtgtgactggctagatgcgccgacacgctatacccgagtgaagtttgagtgtgacgacgaggctgttgctccgaccgggctggatgacatcgtcgccgagcgccctaaccatctcgttgacctccagcaggtgaaatatactcctaatcctgccgagcaccccctgaattgggcgtggatgttggagaggaccggaaagacagcacgatcgaggtcgatgttgcgtaagtggtttgatgcttttgttaaattggattctgctcgcgtcggagagctatcgttgaagaccaatcgccggccagatgccgacattgagtcttgcctgactgatggaaaaatcgatttatccaaagttccagagccacggcgattagaggttatcgctgaactcggcgacgaaaagaaatgtgaattatttttcaagcagttgcagattgttcacagcgataagagcttcgaatcacttgaacacgagatcgatgcgcgattgcgctttcacggcacaccagagggagttgcgaacttaaaaaacgtcgccttgaactggtcgattcagaaaaactttccgccgccagaagggtggatttctctggagcaagtccgcactattctgcgggcaataccgccggccccactgccggaagattttgttgtgcctctcggatatgaggtgcctgacgagacgttccaccgtgaattcgtacgtgacacggttgccggggccgggcagacaatcgtgctcacagggccgcctggtcgtgggaagagcacatacttgagcgcgatgtgcgaagtgcttgctgaatcaggggttcccacggtacggcaccactacttcctctcgatgaccgagcggggacgagaccgtgtgaacagctacgtggttgagcaatcgctcgaggcgcaagtcaaacggttacatccggaagttgatgcgcctggtcgtgacctgcggggcctcctcgaagcgtgcgcaacctactacaagactaagggcaagccgttagtgctggttctggacggcctagaccatgtctggcgcattaacagcgctgataaacggccgctggacgatgtgttctcccagattattccctgcccggataacatggttctgttggtaggcacacagccggtcgacgacactcaactgcctagggacctcttgtcagttgcacctaaggctagttggcgaacattgccggcgatgtccgagaacgccgtcctgtcctaccttcacaaggtggttgacgaaggcaggctcttgatccggttcaacgatgaagatcagatagaacgccagctacaggaagctgcgaccgcacttcgcaataagaccaacggccacccgctgcacgtcatctatgccatggctgagcttgagcacgcaggacgagacgtggatagctggaatattgagcggctacagggtgacatgaccaaagaggcaaagttctactacgcatcgttgtgggaagagctgccaccaagtctcaaagacacgctgcgattggtatgtgcatttcccttcttttggcccaaagctgcttttctggagatctccgctaagcagggcgctgcgccgccagatgtcgccaaggtggaacatctgctgcactcatcggctgctggtctgaaggtcttccatgagagtctggcggtttttgtacgctcgacctctgactacggagagcgtatcaaaaacctgataccagcggtggcgatctggctggaaactgaggcgccaccttctcttcgcgttaactggctctggacggttcaggcaaggttgggtaatcctgagaatctcattactgggctaactcgtgactggatcatgcttcgtttagaggagggctatccagaatcgctctttgacacgctgctatctgaggcactggtcgcagctctggagaccaacgcatttgcagacgcatatcggctcgcacacctgcagtcccgggtggttggcggcagcgaatttcagatgcagagcgacgacatagcccggcttgtgtcatttaccctgacgctgacagccaatgagggggttgttcaagaggctatagcctcgcgacacgagacagatattttggacgtggcagctctcggcttagccttgcaagcacgtggacaaactgtactggccgagacctgcggtgaggagaccctgcgtcgttttagaggccttaaccgcttctccaatcgatattcaactaacgcggggggtgacgaactccagtttctggtcgatgcgttcacacgtcttagtgctatcggggcgaccccagaggcttttacccagttagtccgagaaagcagccaaatagtatggatgcccagagcccgaatgctggttgaggatggttatctggatgacttgatggaagcggctgtttcgctacagcctgatgtggacacgagtgttctaagtgacttctgcgttcgtgctgctgcaacggccggagtaagtatcgtcgaccgcgatgacttcagcaagctggtgcgaactccctttcttgcagcgatggaagcggcctataagcggacttcgaagccattagatgaggctattccagtcgagtggctcaagggaaactactacgagcataaagacaatctaaatacgctggtacaccattggttcttcagcagtgtgcacctgagcctgtgcatgaaagctgaggatcaaatcgccttcgagttcgtacgagcacccagttacgaggaaagggataacatcagtcacttccttgatgctctctcagagattgcagcccaggttgcagagcgttggtggcaaggggaatttgtggattttcatgagctattcaatctcctcaaaccgtgcaagttcaggcattttaggcagagtcacagcgcgagtgcagcggcagaggacttccgggctggattgcatcgtgttgcctgcgacattcgacttggaagctgcctgctcttcaatcgtgacgatgtggcacttactgagtcaaccctgacagcggcagccacatccgagtggtttgacagtgcatccttccgcactcagtacgcagcaggattactgacaaggatgagtgttgaggcggccgcagctttcgtccattctcaacgcgtcatgctggatgcagatatccgcgaagagactagcgtgcatctgcagacgcctctgcagttatgtggcatcgctttggctcatggattaaatgtcagcgcacaagagctttgtaaacaggtctgggagctaacgaccggctatggacatcgtaaagatcccacgttgagtaacacggtcgatgctattggctaccttgtagatgcagcaccagatgatgctcgacgactactcagtctgctttcgccacaaatccatcacgtgctggactacacagacggaaaaggcactaggcacctgcttgaagttgcggaccatctgctggcaaaactcagcccgatggctttggtcgtaaaatacgaggaacacacgcacgcaggtgaatggtcgcatgcagagaacagtctgcggatatatgtgcaacagggcgtcagagatggctggccgctggatgcacttatgcgtacgggagttcatcccgacgttcagaacgagttaatacagcttgaacgcgatggtgaggatggtgccgcagggcagctaggtgttcttagggagcatgtcggctgggacattggtgtgctgcaaggcactgggtcgtctagcaacgataacgacagcaatccgtacactggcgatgtaaccacctttgcgccagaggaacttgatcagttgctggtaagtctgtcaacaagctacaacgaaaagaagagagtgcttcgtgcttggtatgagcactgggatcgcgctgggcagggtaaacgcttactcgcggctctggatggtttgctgcagtcagacgaggggcggcaaaagggcatcttcgatctgtctgaccttgcctttgagaccaaacgtaggctgagcggctcgaaagcggcgtggaaatatcttgtccaggcgcagattcgaaatggcgggtggatgagttttgtggagagagaggaagatacctgtaaaaggtttgacatggtagtgaagtacttcccgagccgttgcgatgagtttgttgatgttactacctacagctggttcggagagcccgagctgcagcgtgtagcgccgacagagctgatggtctatttctatgtgcaacaaaaacgcgtagcagatgccgtgaagtttgccgaaatgatggtcaactgcgtgcgtgaagatacccgaaccctgcctctggaacgcccacgttgggcaacagaacttgatgcttcgatgacaatgggaaaatga

SEQ ID NO: 171221 - DNA, 1443 bp, Enterobacter cloacae
atggacgacctaagtattctaatcgccagactcggctggccatcaaccgctacaaggtggtggaccatgcaagaacttgccgcccggttgggtgaatcagcatcgaaagctacaacggaggctgcgttacttaggtttctgagctctcgtaagcttgaggccgaagtggtggaggtactttacgtattctggatagcggtgcagatgcatcgttacaaggcgagccagaaattggcgcaaagcattcctaaaccgtccattctctcaaatctattgctggaaagctttggcctacagactgagactcctataaccggtctggaagaggtgactgagagcttcgctattccacaggattttaacggtgttcaaggagcggatctcccacggatttttcacaccacaatggttaaccttgagcatgatagcggcttcccatttgtcagtcagatggcgttcgagtggtcagtaaacagcaatgtctatccagatgctccttttcagggagatcactggcattttgtgagaccacttggcgacgggttcatcggtcacatctcttccagggctgccatacggatgatctccgcctatctccgcacattgtcggttgctgaagagttcgggagcatgccttcagaattggcggaaaaaatgactctgctggcattgcctgtacacccaactcttgcgttgctcagacctcgacgtccgtcttggtttccctgcgtgactgatttcgatggtgaccacgagacaataggtgcagctgtacgcaatctaattgaacaagcctcaatcgaaagtcccagagacgagttgatagccttcatgtcgcccatcgtaatttcaactgagcgctgtgtagaggtatcggtcgtccgctggagtcaggtggtaggcggttgcatcaaggatgagagtttagccgagcacctaaaagacttttggagtaacggacaaatgcttcagagttatgctccagagccgctaaatacgacgaccgtcttgatgtcgccagccctttactctgtcgtggacagtgggagtagggcttggcctctagctatgccgctcggtatggaccgtttgggttacctgcaacatgatctgtatccgagacgacttttattgcccactatgcctggccatgagctaatcgagatcgttcctcatcacgggcaattggaggtgaaatcagataatggggttgtcgccaacctgtattactggaatgcgggctggggaccagttcgcccgatgcatttcgatggaaactgcggtacggctcttgtttctaaaggtaaagcctatcgagagctaaccgatttgccagaccaggatatgcgatcgttttacttctggcgtgtacgaacacttcacagaaagggctcctatgaacgtttcgaggaaacgttgaaatttggagtggtttttgtgtga

SEQ ID NO: 171222 - DNA, 1062 bp, Enterobacter cloacae
atgtcaacacctaaaatagttacaccgatagcgtccaataaattagttgataagaagtcttattggtcgatgttttactactcgattatcgctacaatcacacaccaaaaaacactaacccacccatggaatccaaatttaaagagcctcgagtcatataaaggacaaataattgagcattcatttttttcaaatatgattggttcaattaaaaatcatgggtttgaatatcttatggcggaatttcttcgttcagaggaaggttgggatgctttcatgcaattgtgcgactccatacttgaagaccacgatattacaaaattccccatcaaatatttcagcattagcaaaacgggtagtgattatctgcgacataaatgtcagttaaaacacaatacaaggaatgtagagtttttacttccaagtaaaacgaaaaacaaacaaggaataataacactcccatttgatatcactggaaaggatatatatacccttatgattgaagattctgatttatatatagaaataactgatggatatcaacgattcgcttttgtaggtgaggtggaaggtaacaatggaaacaaaatgctaaacaagaaatattttggaggattgaaagggctctatagtactttcggtatcagtgcttctgacagaaaaaaatttgataaatgtgatattactgatccagttactgttttgtggaatcaaaatagtggtcagtggatcttaaactttaagaagtctgaggatttttactgcgattatattacggcagctgagaacctgaataaattgataagtggaactcataaaaatttaatgaatgaattaagaaaagatactgagcacttatcagtaattgaaatcataattactcactggcgcttagatgtgcaaattttacttgaaacactatccaaatctattaatcacttgaatatccacaatgatttatatagtattgatatacaaatggataactcccttatatttaccccatcacaattaaccatgcctgatggtgtgcaattttataaagtaaaagaggcagtttga

SEQ ID NO: 171223 - DNA, 1338 bp, Enterobacter cloacae
atgacgatattacgaaagccaatgttacgccgatttacagcagcgctggcattcatttcattagccataaatacggcgtacgccaatagtagtcaggtgggtattgccccggttgccaggacaaccttaaaagaaagtattctttttgctatcgatcgcgatccgtctattagtcagcaggccgcgcagctcggtattggtcaggcacaaatagatgaagcgcgcagcggctggatgccgcaaatatcgctgaacgggagcacgggccatagccagaccaccgattccagcgggtcgctgaagaattcagccgcctggggactgagcctgacgcagctgatctatgattttggcaagaccaataacagcatcagccagtcttccgcccagcgcgatagctatcgctaccagctgatgagcacgctctctgacgtggcggaaaaaacggcgctgagctatgtcgaggtcaaacgctatgccgatctgctgcaggcagcaaaggagaacgttcaggccctgaaaaatgttgagcagctggcaaagctgcgcgccgacgcgggcgtgagctcgacctccgatgagctccagacccgcacgcgtattgccggtatgcaggcaacggtcgcgcagtatcaggccgccttaaacagcgcccgcgcaaggcttgcggtattaaccggcatgcaggcagaaaactattcgcctgtacccgcaaacctcgcggttgaacctgattcgctcaaccgcattgattattcgctgataccggcggtcatggccgcgcaaaacatggagcgctctgcccagtatggcgtggagacggcgaagtcccagcactggccgaccctcagcctgaagggcggacgtacccgttacgagtcggacaaccgttcgtactgggacgaccagatccaactcaacattgacgcaccgctttatcagggcggcgcggtctctgcacgcgtgcggcaggctgaaggcgcgcgggcgatggcctcctctcaggtcgatcaggcgcgtttcgacgtcctgcaaaaagcctccgtcgcgcaggcggactggaccggtgcgcggggaagaatggaggccgggaaacagcagctggaaaatgcgctgcgcgcccgtgatgtttataaaaatgagtacaccctgagcaagcggagcattaacgatctgctcagcgttgagcaggatgtctggcaggccacctcggcgaaaataatcgctgagtatgatggctggagttcagcaattaattatgcttccgcggttgataatttaatgccgcttattggaatagagaaaaacgctgccgcaaaactacccgatttgagttaa

SEQ ID NO: 171224 - DNA, 924 bp, Enterobacter cloacae
gtggttgccttcacccagcgcgcccagcacggatgccggaacgcccacgctccagctgccgtccgccagcaccacgccggtgaaggactggtcgccaacggtcacggtgaccacatcgcccgcagcggctccgctcgtctgcccggaaataatctgcgcctggccctgttcgctggtgttcagtatgtcgtcgcccgccacggtatcgatggtgaccaccggcgcggtggtatccaccgtgaaatctgcggtgacagacgaaccgttgcccgctttgtcgctgacgttcacggtcagggtgtgattaccctcgttgagcgcctgcacgtcgtccgcggcaagcgtgacggaccaggtaccgtcgctgcccaccgtggcgttgtagtttttaccgttcagcgtgaccgtgacgatctgaccggcttccgcagtcgttttgccggtcagcgtcagcggctggctgtgctcggcggcattaatgatgttgtcctgcgcgagggtatcgacagagagggttggcgcgacgctatccacgccgattgtctggctgccgctcacggtgttacccgccgcgtctttgccgctgacgttgaccgtccaggtgccatcgcccaacgcctgcgcgtcggccgcgggcacgttaacactccacgtcccgtcagcccccacttcggtcgtataggttttaccgttcagcgtcacggtgagtgcggtaccttgcgccagattcttgctggcaccggagagcgtaaagcccgcggattgctcgctggcgttaagcacgttgtcgcccgccgtggtagccagcgtaatggcagcctcggcggtcgagaccgttacggtaatgttgcccgcatcggtggttttactgccgtcgatctgcaccaccgaccaggtgtgttccccgtccgtctgggtcggtaa

SEQ ID NO: 171225 - DNA, 804 bp, Enterobacter cloacae
atgatgttatcgctggtgaggttatcgagggtaatcgccggcggcagcgtatccaccgtgaccacgcgcgacgcgtcggcactgttaccgttgacgttcgtgacgctgacgctcacctgcgcccgcccgtcgatcagggtttccatggcgctggcgggcacggtcaggctccaggagccatcctgctgcacctgggcggtaaaggtctggtcggcgaatttcaccaccacggtctgccccgcctccacgccctgcgtctttccggaaagggttaaatcggcacctttttctgccgcattcagcaggtcatcgccggagacggtatcaatggtgaccgccacggcgttgagatcgagttcaatcgggtgttcagccgcaacggtattgccccaggcatcttttgcgctgacgctaaccgtcacctctcccgcggtccaggcctgcaggtccgcagcaggaacgccaatgctccagccgccgctggcggtaaccacggcgttatattcgacgttgttaatggtgacgacgatcggcgtgcccgcggccaggtgggtgctggcgccggtgacggtcagatcctgctgctgttcaatggcgttgatcacgtcatcgccggaaatggtgttcacacgcaggcccggaagctgtgcgttgatgttgatatcgcgctcgccggtaccggtattgccgtgcgaattggtcaccgacgcggtgaaggttaaatcgccgtcgccgaacgccttaagatccgctgacgggattttcacgctccaggtcagatcgctgcccaccgtggcggtgtag

SEQ ID NO: 171226 - DNA, 510 bp, Enterobacter cloacae
atggatgaagaagcgcaggctggtggcgataaatcattaaagacggtgaatgcgatccgtcaggttccaattcatccgcgacttatcgaactagggctgctggagtatgtagatgcattgaaagctgccgggtatgatcgtcttttccctgagttgaagcacaacaaaatcaaaggatatcgtgccgccgcctcaaaatggtttaacgaaaactactttggtaaagtcctcggttttacccgtgacgttaagaaaacgttccattcgctgcggcatactttcatcaacgccgttgacaagtatgagaccaacgaacgcacgattgcgcagcttgttggacatgtccggggcagcactactgcgatgacaacctatcgtaaggatgctgatgtgggagagcgattgggcgtgatttcgcagcttcgctacagtttgcctgatattgcgcagttcgactcgcaagcgggtatcaaggcggtcagtgacgcacggcgcagacataaatcgtga

SEQ ID NO: 171227 - DNA, 1083 bp, Enterobacter cloacae
atgaccgctaacacttttgatgtgaacaaggcgatttctgacgcatatgatcaggctttaaaaaagcaaggagttgctaatattttaatcgctggaaaaactggtgttggtaagagcacattgatcaatgcagtctttagaggaaggatggcagcaacaggtcaaggtaagccagtaacgcaaggcacaaagaaaataactaaagagggtattccgatatcaatatatgatacgaaaggactcgaattagctgattatgataaaattcttgatgagttacttagattcatatcaaccactaactcatcgactgacccgcaatcgcatattcatgccgcttgggtttgcttgtcagaaagctctcgtcgaattgaagatgctgaaataaaactagctaagtccctgtcagaaagaatgccagttataatcgtaattactaatgcgctttctgatcaagggtttaaaagcgaagttgaaaatcattttgagtgcgctcggaatgtagtgagagtaaactcgattgaacaaatattcgatagcggacttactcttcctgccacaggtcttgacgatcttatcgatgttacaatggaggttttgcccgaggggcaaaaaaaggcattctctgctgctcaacaaataaaaatagaacatcaagttaatcagtcgcataaaattgttgctgccgctgccacttccgcaatgggaaccgctgcaatcccaattcccttttcagatgctatcgctatagttccgattcagattacaatgctggcgggcattagcctcgcatttggccttgagaccaataaagctttccttggttcaatcgtaagtggcgcattaaccgcaattgcaggaacactgggaggccgagcactcgcaggagccctgcttaaattaattccgggagctggttcagcggtaggtgcagctatatcagcaagtgttgcagcaaccgtcacaacaacatttggtgaggcttatattgctacactctaccgtttattaaaggatgatcccaacagaaaactcactagtgaattgatcgctgttgaattcaaaaaagaactggcgaaatga

SEQ ID NO: 171228 - DNA, 1197 bp, Enterobacter cloacae
gtgcgtcagcagcaggaggaactgttattaaagaaccagcaacagcgtgaagagctggagcggagtattcctcgccctgcgcccgccagaccgctgcctgtttccggctccggaccctgtttcaccattcataccattaccctttccggtgcgaccttaatctccccaaaaacccggcagacccttgtcgcgcaggccggtaacgatctctccctgtcaggtacggatatccgtgccggtaaatcggtctcactcagtggcgaaaatgtcctcatgggggtgagccgggatacccgcgacggtgaaaaccacagcagcagcgcccagtatggtgtgacggcatctgctggcggctgggctgttgaggctgcaaaagccgctgagacggttgcccgcagcgcagaaaacggcgatgatccacggctgaccgccatcagaacaggccagtcggcggcaaccgcggcgcagggcgctatgtcggactcgtcgctcatcaaggctaaagtgtctttaacggcggggacgtcctctcaggacagtcgttaccacagtaccgacacgcagggcaccaccattaatgccggcgagaatgtctctgttcgtgccggaaatgacattgccggtatgggggtacagatcgcgggtaaacacgtggcgctggatgcggggcgggatattctgctgtcttcctcccagaacacaaccctctctgagagtaaaaacagcggtagccagttcagcgttggtgttggtgtgagcctgattggtgcgcaaaacggcatctcggtggagctgggagcgtcacagcataagggtaaggaaaacagccagtcacagcgcaatacgaacagcgttgtccatgctgatgaacagcttacggtgaacagcggacgcgacaccatcctgaaaggtgcggagctggaaggtaacggtgtggtggtgaataccggacgcgatctcaccatcagcagcgtgcaggatacagccagttatgacagcaagcagtcttcgtcaggcgcgtccctcagtctgtgcataccgccactgtgttatggtgccttttccggtagcgtcagtgcatcggtgagaatatcacccagaatggtaagagcgtcgctgaacagagcgggatattcgcaggcaagggcggctttgccgtcaccaccggaaatcatacccagcttgacggcgcggtga

SEQ ID NO: 171229 - DNA, 600 bp, Enterobacter cloacae
atgcgttttttaaaaaatacagcgtggccgtgcataaccgtgatagtcgcttgcatttcatgggttctcgtaaatggtgacaaagttattgataacgtaaatgccttccaaacatggtacggaacatcgaaagcgttagagggtaaatggaacaactctaccgaaaatgatattgatcctcccgaatggttatcgaatcagaaagacttcgttgaagttcgcattacactgaaagattcagttattgatggaacaatcagttctgggaggttaaaaaagttgtatccatacgattttgtacttctcactggtgagaaaaggagcttccgagataccttagatgcttacgcatttgactttgtgctaggtaaaaaaatcaacttcggttcctttgttatctaccgcgatggagagcgcctatacgtggatgccgatgaaacagcacagcagtatttcccaaagcgatccattcttttaaaaaaaacggatatcgcattcccagaaataaaatctgataaatcagggaatgaagaaggcgaggcagacaaaaacccaccaataaggggagtcacgccaaatcaggtagatagcaatcagtaa

SEQ ID NO: 171230 - DNA, 183 bp, Enterobacter cloacae
atggtttgtcggagctgtcagaggaacttaatcgctgactcgccgaaggcggttttaaaagatggttcgataataggaacaaagcgacacaacaaccacatgcttttaaaagaaaaaattttaataattattaaagtgcccccaaaagtgcccctcctttcacacccaaagaaaattttttaa

SEQ ID NO: 171231 - DNA, 495 bp, Enterobacter cloacae
atggatcatgaattaaagcgactgcagcttaacgtcagtcaactggcggccttgtccggtgtgcatcgccagactgtgtcagccaggctgaaaaatgtccgtccggcaggtggcaacgacagcaacctgaaactgtatggcctgacagatgtccttgcagagctgatgaaaatgcctgccccggtagctgaaggagaaatggagcctcaggatcgtaaagcctggtatcagtcagagcgtgaaaggctgaagtttgaacaggaagtaggagagcttattcccgcttcagatgttgcacgtgagtttgccgaaatggcgaaggccatgattcaggttcttgagacgttgccggatattcttgagcgtgattgtgcgcttaatcctgcaacggtttcccgcgtccagtcgattattgacgatctccgcgatgaaattgcccggcgggtcatgagtgacgaagaaaaaacagaggaggacatcccggaggaggaataa

SEQ ID NO: 171232 - DNA, 1326 bp, Enterobacter cloacae
atggctgagaagtattacagtattctgaccaacagaggcaaagagctggaggcgcagtcttctgcgaccgggaagcccgtcataattaaagattttgtagtaggtgatggtaacggccagccggttaagcctgacccggcattaacagcccttgttcgcgaagtttatcgtgcggcggtttcagcattgcaggtctcaccggaacaggctaatcagtttattgcgcagcttgtactgcctgccgatgtgggcggctttgtagtcagggaggtcggacttttgaccgatgcaggcgagctttatgctgtagcgaactgtgccgcgatcgagaagccagtaagtggtatcagcgttaaactccagtttagactcgccgtgtctgaaacggctgatatcgagctgaaggtttcaacgggcgatgggttgtttctgcgacaggatgcagacctgagtgatgtgatggatatagtcagggcacggaaaaaccttgggctgaaagaggcagcagttctggatgttgggacaaaagctggcactgtggcggcaggggatgacgaacgcattaccggcgctgtgcagcgcgctggtgacgaaatggcgggatctcttgctatcactgactcaaccgcactccgcttaaagcagaaagatgtgagtacccttttccgctttgacggtacaacgttttacctgatgtttactaaaaaaggtgatccgaatggcgggtataacaatttacgtcctttttatgttgatgcaaataccggggctgtaaccttaggtaatgtagttaaggcccctgcgggaattactgcaaattcaattacgtcgaatacaagtgttttcatcgagagtgacgaccgtcagcatattatttttcaaaataaagatggcaccccgagagcatatatttataaagaccgtaattccgatcttcgtctgaataacggtaatgaggggggcggggattttgttatctcacgtaccggtgacctcttgtggggcccgaatggagcgagactgagctatgacgggaatctctacggctctgtatggggcggttggctgtcaaactggctaactgggcggcttggggcgaaggcggaaattaactgggtgcagtcaaatttcatcactgatgtcgcgctgggtgccgaggggtcattcatcattgctaaaaatgcatggcagcgcgcgcctgctggatgtgtccttactggttacaacgccgaaggtaacgaacctgtaaacgatacattattttaccgccccattcagaaatatattccgactgtcggctggatggtcattggtcacactgcatag

SEQ ID NO: 171233 - DNA, 528 bp, Enterobacter cloacae
atggcattaacacttaaaaatttaacgatttacacaccggaatattacgacctgatgattcaggcgatttatcttcaaacagaagatggtctggactggtatctacatttgacccgcttccagcctgatacgctgaaaatttgttttgatgataaaggggtaatccgatcataccatgctgacgcgtcacgcctttatccgttgaatctttcggtaactgaggtcaataccgccgatgtgccggatggcctgaatatttacggtgaatggatgtggaacggcgaaaaaataattccacgtgagtttacccggcaggaaaaaatcgaccaggcagaagcccatcgttcagaattgatcgccgctgcaggggaaaaaattgcaccactccaggatgccagcgatttgggtattgccacaaaaatggaggcggatcaactgatggcgtggaagtcctaccgggtgaaactaaaccgcctggtgttcacaaatgagcaggagatcagctggccgtcaccaccagaaacataa

SEQ ID NO: 171234 - DNA, 1479 bp, Enterobacter cloacae
atgaaggtttctccaaatgatttaaaaattgaaatggataaagtccgtgataataaattcagtaaatacgtaaaaagagtgactctcagaaacgtcagaggttttgctgaagaagttgttgatttcagaacaccggtcacagctttaataggaacaaacggtggaggcaaatcaacaattttaggagcagttgcattagcctataaaaatataaagccaagtaaattcttcccaaaatcattttacggtgatgattcaatgagtgaatgggagatagaattagaaataactgacaagcaaatagctaacgataaaaatataacaaggactgccaaatttaaacaattaaaatggagacgagatagttttccagacagaagtgtaatttacattgaaatccaaagaacagtacctgcaggagagcttacaaagttcaacaaattcctttctggagacaaagaacacttcgaagaggtccaattaaatcctgacactataaaatactcttctgcagttctcgataaagacattgccaattacaaagcaatcatcaataagaatgatccaacatctagaatgtatgttggaagggcactcaatggctctgactattcccagtttcactttggcgcaggcgaggcctccattattgatacgattgacagaatagaaaatgcatctgacaactcccttatactaatagaagaaattgagaatggattacatccagtagcggttaggttattagttaattatttaacgaatgtttcaaaaagaaaaaaattacaaataatctttacaacccactctcaagatgcggttaatgaacttgaaccagaggctgtatgggcatctatcaataagaaggttttaaatggaaagctcagcattgagagtttgcgtgcgataacaggtcaattaaccaatacgaaggtagtatatgttgaagatgcgtttgtgaaggagtgggtcgagaacgcgattggccgttacttaccaaaattcgcaccatctattagtgtttatgctgcgggtggttatccaaatctagtaaacgcaagtaaattccataacaaaaacccaactataaagactccttcggttgcacttgttgatggtgacgtaattggtcgcccaggggtaggagaattacctgataacgccatgtttataggtgacacttatcctgattcaattgtattcaactacatagctaaaaatagagatgatttagcatccttaataaggcagcgttgcttactcacgagattcgatgtcgcaagaatctcaagtgacattgagagtgtcatgaattcagcatgtgatcatcatgtttacttcaccaatttaagcaacagactagattttgtttccgaaatttttattcgcgcaggcatgattgatttgtttaatgagaataattcagacttctggaaaccagtgattgatttcattgcaaaaggtcttgacgtcgattga

SEQ ID NO: 171235 - DNA, 888 bp, Enterobacter cloacae
atggaaaagaaaaaaacacctaatgtattatataaatatatttccccaggtgttcttgaactaattctagaaaataaaaaactaaaattctccactccgggtgaatttaatgatccttttgactgcaatttttctggttacttaggtactgtcgatatggataagttgtttttaaaaaacatgccgagatcctggagggaaaaaagatctgcgatagctaaaatgatgaaaaatgataaagtctttgacggttttcatgaaatggtattgaatagtatagaagatcttagaattcactgggatagctacattaaccagtatcgtgtgctttgcttgacacctgaaaaaaataatattttactttggtcgcattatgctgtgaatcatactggcactgttctagggatagatttttcaaaagaatcattttttaatgaaataaagccggttgggtatcctgtcaaaaacactatgattgatgattatataaaagatactgctgaagcaatgtttcgttatataagcaatcataaaatggggttcgatgttgctatggagcaaattgatactttcatgaataatgatgataatatgaatgggttggttggtttgtttattaagaaattacatccttgtttttatgtaaagaagcctttttggagttatgaggaggagtatagatatgtcaagttacgagatgaaaatgattctgaatggctagattttgatttgaactcagtttcagaagtggtgtttggaatcaaaacatcaatagcagagcaagcatctattattaatttagtcaaagattacgggctgtctgttccaatttataaagcatgcaaaaaaaatgctgaaattaaatttgaacgtttaaatttgctgtga

SEQ ID NO: 171236 - DNA, 1344 bp, Enterobacter cloacae
atggggaataatgaatgggtgagtactacgctgggcgagctagtcgacacatttggtggatctgttcaaacaggtccttttgggagccaattacacgcagccgattatgtcagtgaaggcattccctctgttatgcctaaaaacattaaaattgaagaaattgatgtagaagacattgcaaaagttagcttaagtgatgctgaacgattaaaaaaatatcagttagcagaaggtgatatagtatatagccgtcgtggtgatgtagaaaaatgtgcgctggtaacaaaaaatgaagccaactggctatgcggtaccggttgtcttagaatcagaataccaagaaataaatcaataactccttattttctacatgcttttttatctacaccagttactagagaatgggtttctcgtcatgcaattggcgcgacaatgcctaatcttaatacatctatattaagagatgtccctatggttgtaccaccttttgattcaatgaattttattggagcaatgtggataaaattaaatagaaaaataatcttaaatagaaaaatcaaccaaacccttgaacaaatgtcccaaaccctgttcaaatcctggtttgtggatttcgacccggtgattgataacgcactggatgcgggaaacccaatcccggaagcgctgcaatctcgcgccgaactgcgtcaaaaaattcgtaatagtgaagatttcaaaccacttccggtggatattcgtgatctgttcccggctgaatttgaagaaatagaattgggctgcataccaaaaggttgggtgacaaatcggctggaaaacattttagaattagcttacggaaaagcacttaaaaaggcagaaagaaccaacggtgattatcctgtttatggttctggcggtatcgatggaacccataatgagtatcttgttaaaggaccagggattattgttggaaggaaaggtactgttggttcattacattgggaaaacaaagatttttaccccatcgatacggtatttttcgtaaaacccaaagaatactattcccttgtttactgctatcaactgttgaaaacactgggattagaaaatatgaatactgatgcagcagtaccagggttgaatagaaacaatgcttatcgtcttgaggtcgttacaccaacacaatccatcattaccaaattcacaaatataacccagaaaatccagcataaaatggatgcaaatcataatgaaacagagaatctaaccgccctccgcgacaccctgctccccaaactcatctccggtgagctgtccctggaggatttccccgacctcatcaaacaaacagaagccgcataa

SEQ ID NO: 171237 - DNA, 714 bp, Enterobacter cloacae
atgtatagagtaaatcaaatcatcaaaacaataagtaaaatgaattcttatgctccctataatcaaataaataaaagaagcaacttacttagaaaggttcaagtatattcatttctcacatcactaatttctcttgttttaatggtgataatggcagttatctataaaatttttgaccttcccaaggggccgtttcttttatcagtactcattctgtatgccctcaattcacttgccggtataatatacttattcacccctataatacctagcgtgaagttcatgctcaacttcaaaaaggaaattttcaatgatctaatttgtgaaattgacaatgatgagcaaaatatagaaaaactgatgccttactcgttaactgaattaaactattcaatagattggttaaacataaagatacaaagagttaaatcaagaataaatgatttttttggagaaaaaactgccgtcttatcaataattggattggcatactcagcagttcaaggttttggtgggttagacaaattgggtgataccatatcaaaagggatcttcaattccggcacagcaaatacactaatcgtatttggattagcttttcttttaggattatcacttggagcattagcactcagacatatatccaaccaccttcaatatctcaaagaaatattagagttggcaaaaaaagaaaaagaacagcaagaaaaataa

SEQ ID NO: 171238 - DNA, 747 bp, Enterobacter cloacae
atgctaaatgagattgaagataatagtttacagtcaatagagttcagcgaagcaatatccagactgttagagttgattaaaaatgaaagtatcaatgatttcaaattattaaattttatcctttctggtgaagaagtattgagaactgtaaattcacttaggaatagaatctggcatagagggctttttgttttacgctacgaagcacttgatgagttagtttgccgatttattttaccgttagtcagtgagtttttatctctgaatgtattttatggtaatgaaataaattggaagtataaagatctacactgtaatgttgacccgatttctgaattaagtaatatgaattttaatacagcttttgagttggataaagttgcatttttaaaagaaatgggaagggctgcatataataatcccttatatgaaactgttttaaaaagaacaggaagacaaaatttctcttcattatttgataatgcttctattcaaaaagctgaggatgtcgctaatcatgaattacagaaacatcatgcagagttgaaggcttgcccagtatgcggtgtaaactctttgattttataccctgaatctgattgtgagtataataatgataacgaggtaagcaatgtcattacttacatatggaaaataacatgtgaatgctgtgggttttcgttacataatgaatttaaaaatgcgaaagattatggcttcaataatattgaagatttttgggtgtaa

SEQ ID NO: 171239 - DNA, 549 bp, Enterobacter cloacae
atgaataaagttaattttattatagccattagtatcttcgttattactggttgcaatgaagaaaaaagccgaaaagaacaaagtaaattagcttcgcagattgttgactcaatggtgacagttgaaggtgggcgttatcaaatgggagattttgggtctctcattggagaaaaactaccgtttagtcctgataatgataacaagccgcttcactgggttgatttaactgattttaaaatgacaaaaaatagaataacttggggggagtttaatttatggctatctatgactaacaaagacaccaataaatattataagaaaatttcagatagaaaagttgaaagtaaatacgacgaacgtatgcttaagtacattggtgatgattaccctgcggttgctaactggaaagatgcttttgatttttgtcaatgggttggcgacgttacaggaaaaaaatcgccttacctactgaggcacaatgggaatatgctgcacgtagtcgtggtaaatttagacaatttgctaacactgataatgcctatgacctaa

SEQ ID NO: 171240 - DNA, 234 bp, Enterobacter cloacae
atgcacacacgaaacgtcaacgtcaaaaccgccgctcaggaatcttccaggaagatgggggaagaacaaaaccctatttctgtcgcacgggagtgggtggctcaggccacctcgctgaaagcgggggtcaccgcgatgtgtcccgatacggcgacgttcaggtggagatccgcaccaacggaacgcttaactggcacgcctggtcgtttgaaccggattttcttattgaactga

SEQ ID NO: 171241 - DNA, 1035 bp, Enterobacter cloacae
gtgcatttcgacacgggcagcgacatctgcgccgcgctggccggagcggccgcaccgtacgtggcggagattatcggtcaccggtccggactggacgacgggatggaaaaagccgctgcccacgcggtagccagtgccgtactggcgtcagtgcaggggaaagacgcgcttgcgggtgccgcgggtgccgccgccggagagctggcgggcacgctcgcgctggagatgtacgggaaggatgttgctgcgctgagtgaaagtgaaaagcagaccatcagcgccctggcgaccctcgccgcaggcatcgcgggcgggctgacgggtgacagcacggcatctgcggtggcaggggcgcagaccgggaagacgacggtggagaataacacgctgagtctgccgaaagggatgacggaaaccggacaagcagccgcatcctgggtgaagtatgcgcaggataataatctttcgccggagcaagttcaggctggattgcaggatatcgtgcagggtgatttgccggaaagcgcggatattatcaaagcgatcctggaaaacaatccgggaacagatacggtaatggcgctgctttcagcggaagatgcgaaagattacgcactggcgctgttgtcatctataccggcagaacgagcgctagctctggctggaaaagccgcaaaggttattgataacaagatactaatcagtgcagcggagaagatctcgacggctaagccggagaaacagtttactgcgccgagggatctgaatgagcaacttttgtggaatcaggttgaagaaaatccgacaattggcaagacattggatggaatgaataatgatccacgtttccctacatctgcagggttccagaagatggaagcaaaacaaaaactttcagatggttcaacaataactgttcattatcagtacaactcaacaactggtaaggcgtatgacatgaaaataactacaccgcaaaggattcagcccaatcctcaagacgtcataagcaacataaaggatcaagttcgatga

SEQ ID NO: 171242 - DNA, 315 bp, Enterobacter cloacae
atgaaaataaaagaacgtgatggcgaagttgttgacgtatacgcaatttacttcattaatggcgaaataaattttttaggcatgcccaaaaattatggtggattatctgcttactcagctagagaggtaacggttattgacccagaaattgaaggcgattgtgtttattttaaaaataatgggtatggtgtttatcattgggcgttgataaaagaaaagcttttggacgatcttcttgagcaggatgagacagcttacaaacgcttccttgagatcctgaaagctgaaggtctggtagatccagatttttattaa

SEQ ID NO: 171243 - DNA, 204 bp, Enterobacter cloacae
atgaaatccgagagccggtgcacaaaaaagatgcccgtcgcctccatggtaagcggactgatgctgctccttaacattcgagagctgaaacgccgcaggacagttcagcctgttgtgagctttattcccgtatggacagaaattacctgccccttaacgggaagtggttgtcgaatgcgggttttattgatggtatgccggtga

SEQ ID NO: 171244 - DNA, 939 bp, Enterobacter cloacae
atgataatttcaattaaaaaaaattgggcgtcgattgagtcaaagcacaatgcgttcatcatgaaaaaaatacaaaagcatttagataatgctaaaaaatatcacggaccaaaatccttagcaacatatttcgttgataaaaccaaagatctcattacctcaaataacctcaaggacttagctttagctgcaagatactacgatttcatcataagccgaaaccgaaacaacaaagctcttattaaggtattcaaaaaaaatttagcagatatattcgattatcataatttcattaccaaaaccgtcggctacgatgcctatgatttatgtagtgcatctaaaaccagaagctgcccttattgcaatcaatcatacgcattcacaatcagggcacaaaaaaaagaatttaggccaacattagaccatttcttcccgaaagaaagttatccccatctggcattaagtttatataatctcgtaccatcttgttctatttgcaactctagcttaaaaggtcgaattaatttctcaaaaacacctcacctacatccattgtttgacaacgaaagcattgagttctcacttgaaacaacaaaatcccgaaaagaaattgttggattggtggacatcaacaccaaggacttcaaaattaaaattgcacacaacaacgatgccaaatcaattaattccgtaaataccttcataatagcaaggcgttatgaaagctttattttcgaagcagtaaactttgcacgatgcaaaatttactatgatgaactgaaaggtaataaccaaatagacatagttaatgatattgatgaaagttcggcattgatgtttaatcatcacgcctatcaaaaccaacttcttggcaagctacttcaaggtatttacaaacaatattcacagcaaccttcgtcaattgcctccagagcttaa

SEQ ID NO: 171245 - DNA, 1482 bp, Enterobacter cloacae
ttgatacgcagcctttctgttgataataaaaaattagagctaagagatgaattggatgacagctcaaatatttttgatgttgactcaatttctttattaataggggagaatggtacagggaaaacatacttccttaatcaagtcataaatgaatttaagtcatcccatataggtgcatttactggggggtgtgaaatagacctctttaatacaccaagctccgatgtcaaaaatgaaaccagatactggggtgttgtatatttctctccaattcctttcagagaaagacatgcatcctcaaaaaactttatcgatgcatcacctgtatttggacgaggcataaaacttagcaacataaatgaatcccgagaagtaattgagtacttcaaaatcaatcccacgtctcaaatacaatacaggattaacgcaagaacactcataaaatcaatccttgatgaggtgtttaaacttagcgagcgtcgcatcaagcacataatgcagaacctttcatttgttaatgaaatcattaaattagataaaagcattcgcgaacaaattggcgagaatgatgattccggcgaaattacccaaatcacaaatgaaagaaagcatattttcgacatgttagttgacgaactgaattcatacttaacgtcaaatagagatagcattgaaataatatctgcacttattacaattaatggccttaagaagaaaaatagaatcagcaactcaacagctgtaaacattctcaactacctaattaatggacatgatacccttaagcggcatgaagaaaagtcacttacgggtttcaataaagaacgcgtgaaagttgaatcatttctaaaatatattagcccaggcttctccttcgttgaatatatggcatttcctgtagatgcttatgaaggagaaaaattgctaagtgattttgacgttgaggattactttgacttcaaactagttgaaatgagctccggtcagctagctataatacatcaaatgggaatgatttccaaagcaattaaacaactcagagaaaaagggatcggcaagatattattaatgattgatgaaggcgatgcttatttacatttggagtggcaaagaaattacatatttaaactcaacgattttttaagtgaagtcaaatcaataaataacatttcaattctacaagtcattctggccactcactctcctttgttggcgacagacataccaagaaaattcatatgtccaatggataaaccagaagccacttcaggatttgcctcaccaattcatttattacttaacgaatcttttggaactaagaccattggtgaattcgcttccaaaaaaataaatataaccgtgaaaaatatcaagaaaaacaaaattacaaaaaaggatcacttcgttataaaatcgatagacaacgaaatccttgggagagaaatcatgaaactaattcctttacacggtgatgtgaaatga

SEQ ID NO: 171246 - DNA, 276 bp, Enterobacter cloacae
ttgctgcgcaatctgatccgcactggcgtcatcatcgagaccgacctcgatgcggggcgctgtaaggcgatcccgcaactcagtattcagcgcagtgatggtgaccggcaccagttcgcgattgctgaccggggagcctataccggcgtcaccgcaaaatggttgcataccaaagaccctaagcctcaaaaacagacgcaaaaggtgaagctgaaacgtaagcccaaagagcagcaccttcgggcgcttcagcatccaaaagcaaaaccagtctga

SEQ ID NO: 171247 - DNA, 936 bp, Enterobacter cloacae
gtgtccaattcgccagtgctagagttacaaaaccttgtatcttcaactgatggaagcattacagatatgcttttaaaagcaaaattgattgcatccaaacttgagttagacgtttttgatgattttataaataaagagtttcttggttacaaatatgccttatttggtgaggataggaagaaattcccatcacacagacgaatactagcaaccattgtcaaacgagatgaatactacaattatgttgatatagatatatacaactgtgaagccctctttttggctgagagcctgccgggattaggatgggcttacgtaacgctgagtattactcgtcttgaatcagaattgtcttctggtgggacgttatatctaaatattccagaatggcttttgcgggatacgccaattcctatcgcagattatcaatattatttttgggaaattgaatcggttaaaataaaagaaattataagtgctataaagtttagtttacttgagtggacattaagtttggaaaggcaggggatattaggcgagggtttgctgttcacacaaaaagaaattgatgcggctcccatgacaatcaccaataacaccaataattttcatgcccctgtgaataatgccggttcaattggtgcgggtaactcaggtgataatcatcaaaataactctatcgtttctggtaattatgactcgctcaaacagcaatttaggagatttggtattcaagatgaagatatcgggttgtttgagaacataattaaagaatcaccagcgcctttgtcgcacgataagcttggtaaaggaataggtgattgggcgggagcaatgataggtaaggcttatgctggtgaacttaaaatttctggagtttctgctccggcacttcttataggttcgatttgcagctactttggtattgcatcatga

SEQ ID NO: 171248 - DNA, 162 bp, Enterobacter cloacae
atggccgcattgcaggctgtaccggttgaacctgtgcggctgagagaaagagaagtgaagcgcgaaaaagaagagtatttctctctgcgtcagaaggacgcgagtaaggagctggatgctcttctgaaaattaggacaggtaaggacaggaaagctgagtga

SEQ ID NO: 171249 - DNA, 819 bp, Enterobacter cloacae
atgagtatacatcaagtttctttcgaaaatttaggtggatacgataaagcaattgaaaaattaaatgcggttgttttagaaccgggtttcgtatggagggcatatagcccagcttcattaaaattttatggtgttgagagaaaatacttttcagaagaaaatgccataaagattgatagcgtacggaggcagattaaagaatggagagatgtttctacaattagtcatactgaagagagacttcttatcgcagatcttctgaaagcattaaacagaatagctaatatagccggtacttttggttgttttctttcaaaatggacaccacaatcaaaaggttatttaaaattagagtgtcgtaaattaaaaaattataacatcaagatagatgtatccatcggagatgtcttttctgttaaaaacaaagcctatgacttagtttatttagatcccccatataccaaaagacaatatgcaagctattatcatattttagaaaccatcgccttcggagatgagcctataatagagggagtttcaggattaagaccctggaaagataaggcatctgctttttgctacaaacgtaaggcattgataacattaagtaacctggtatcagaaattcaggccaagaaagtgctagtttcctatagtaatgacggtcacatcaaaatggatgaaatgatagcggcttttaataatttgggtatggtcaaagtcagctctttaggagagatcaacagatacgaacccaacaaaaaacctttaaaatcaataagtaatgtgaatgagtttttggttgaaattgagaaatag

SEQ ID NO: 171250 - DNA, 216 bp, Enterobacter cloacae; identical to SEQ ID NO: 142298

SEQ ID NO: 171251 - DNA, 783 bp, Enterobacter cloacae
atggaaggaaaaaacaaacacggtctatcacgttacattcctgaagaggttaagcgagaagttaggcggcgatgtggttttggctgtgtgatttgcgggtttggtttttatgactacgagcattttaaacctgactttgtggatgcaaaagttcatgacccgaagggaatgacgcttctttgctcgcagtgtaatcaaaaacgagcgcgcggaaggctgtctgcgcatacggttgaaatggctgatcgtaacccgaagtgtaggcaggagggttttgcaagtgaaatgtttgattttcataatgcgccgataacagtcaaattcgcaggggtcaagtttcataactgccagcatttgattgtcgttaatgagcagccaatattatctgtaaaaccctccgaacatcccgatgggccgatgctcctatcgggcgtattttgtaattccatcggccaggaaacccttcttatccatgagaatgagtggcacgccaaaacagacaattgggatgtagagtgtattggagcaagaatcacgatacgcagcgcacccggagagtttgccctagtaatcaggatggaagtaccgggaggattagtgattgagcgacttgatatgctttatgagggggtcaggattaaagggaatgacgacatattagaagtatccataaatggagggctttggcataagtggcagacgtgctcaatgactaattgcttcacagggctgtcgattaaaagtcgtattactgctgcgaacgattctgtttatgaagcatga

SEQ ID NO: 171252 - DNA, 1227 bp, Enterobacter cloacae
atgagccagttaaaatatgtagtcgacttatttagagcatctcaagccccttcctttgatggggttaaaattaacgcatccgcacagtataccccgcatatttataacattttaaaagttatgttgtccgatgacttccacgagggcacatttaacgatattgaaattgatgggcaggatgtatacggaaaagaagatctgcctttatcaggaagtattatcacctactcatttaacgttgcgcgtagaaacgccgatcgtttctatacctccaaaagtgatttcgtcaccattaattcacttaaaaaaggcataataccatctgatttttatattgtcgctgacaattactactcacacgacaaatctaagcctgattatattattaaagttgagaaaatatgcacattaattaaacacctttcaaaaatagcacatttccatgatatgcgaagcgataaaaatgttaatttttatcgacttgtatttgtattgcattcagaatcaaaatcctctacagcagttattgaaaccaatattacggatgatatttttgataagaatgaagatgatttaaacattgatttaattgcagcactgtccacttctgatgcaagtaaggataaccattatattgaaaaactaaatacctttaggaatactttaattgaatatgttgcaagctctaataatagcttttcaaacataataaataactggaatgaaatcaatagattatacagcaataatcttgctgtttatatgtcagccttttccttccataaatcgcggaaagaagtaacagatgctgaaattgattatgcagaaaagatttcgaaaataatgtctgaaataacaaacaaatctttagcgatcccaatttctttagtagctgcaatttcaatatttcaattttctgaaacaattgtcgcttatgtggctttttcaggtgtacttttaacctctctaattacaacatttgtttcaaaatcattaaaaaaacaattaaatcatgtttcacatgccagagacacactttttagctcattacaaaacaggttgacaactgagcaaaatgacttaaaaaacagattaaatcaggcaattcaaaaccttaaagataatgaaatattttgcattcggatcttagatctcatgaattgcttagcatggatgccaacctgcgttggcattattgcattaattttaaaaaaatttaatatttaa

SEQ ID NO: 171253 - DNA, 1173 bp, Enterobacter cloacae
ttgacatggaatgcgcaaaaaatgaccaacattaccattaagcatgtgatcgtccacgaattgttaaaagtttctaatgaagattttgatcactccagaccttacaatctgcgcgagactgaattagataaaaacaacgcaatcgttaagcagcttgtgaaaggcgtggtggatttatacggttcaaagggaaacgcggcacattatggtgtcttcaagagttcacgtgaagatcaggggccagttcctgacttatttcaccaatactatcaagtgcaagactctgtttcagatgatttcattatactctcgaaagaaataatgaaacaaatgtatctctcagcaaaagaacaaatttgggcatcagggggttacgtcgtattcagtgactatatctctttgggcttacgatatctgctagtaacgatgataaaaaaaactaacggagtaacaattagtgaacgattagagcctgaggaaatgatccaccttgagatgaataacatcaaccaagcagccaaaattaacttccattattatcatcaataccaggaagctaatgaagtcgagcgaaccgaactcagctatttaagtttcattagcaaaacaacaggccaatccgcagcagcttatttcatagcagctttgggatgtgataaaggtatagcgtccgctggtgctacaagaaaactgcctaatgaagtaaggaagtttttcaaaaaaaataaagaaacaatgccttacgcagatcgcattcggaataaaataatcaaataccttgaagttaaatttgaaagcaatcaatcagcaaaactatctgatatagaagctgtagttactgctgaattatcttttttaccagatgataagcgtgaaccaaaaattcgtgaactgatgcagcatttaaacagcgaagaggtaagaataccgaccgaatttgttatcaataaaacttctctggataaaataagaaatgtaattttcaaaacagatcaatatagttttaacttcgataaagacttgttaggtgttactgcggatgctacaatattttacgacaatgcatctggtaatttaacatttagtaatttgccagttgaagctaaaacaaaaataacaaatgcgcttaaagaaatgaatattacatttgataataacgacgcaagagaatga

SEQ ID NO: 171254 - DNA, 522 bp, Enterobacter cloacae
atgaaaattaaaccgagtcttatcagcgttgtcgttattgcgggcctgtcagtcgctctcgttaagagctgctcagacgccagtagccttcaaagcgataacgtcgttctgcggagtgataactctttgcaggggcaggtgatcgccacccaggcattcaatttcaatcggtttaatcaggttgcagaacatgctagcaggcttaactccctgatcgacattagcaccgaagaaaccgtaatcgaataccgggagattctccgccgtgaaaaaacctgtgatctgcctgttactgctgacattgctggtgggctgctcgaatacgcgtaccgtttacgtgccagcgccatgcactccgataccggcagacctgatgaaaccaatgatcgtgccgctgcctccagctcaatgactttctgccaggctgttttatggatcaagccactactttccactatcgagaaagcgaataaccaacttgcaggaattcgcgatatcgaacaacagcgcccaaccaaataa

SEQ ID NO: 171255 - DNA, 252 bp, Enterobacter cloacae
atggggggaagcaaggccgatggcactgtgagaatgggttatacagtcggtcaatttgaaaagcctgttgttgaccttaatcaagccgcatctttagccgcccaaaaatgtaaaacctggggatatgaaggtgcagaaccttttggcggacaaactagccagtgtggacagatggatggttttgggagttgtattatgtccaacgtatctgtcgaatatcagtgtaccggcggtaaagctgcacaaaattga

SEQ ID NO: 171256 - DNA, 369 bp, Enterobacter cloacae
atgaaaactcgttttttactcacagccattacattccttatgtttggctgctctggccatgaaaaagaatatagtttcaaaatggattacccagtagatgcagcgcgcttatcacttggtggtgatattcacgtcaacatcgactgtgtaaaaaagaaagttaacgttatttcagatagcagcaatggtatttttagccgtcatattaataagcgactgagtaatatttgctataagaaagcagataattttgatgttgtgtaccggttcgagccagcaaagggggttaagcaaaacatgatcgccacgcattatccacgcgttccacctgcatcaagtgccgacaaactgagcgatggggattcgtaa

SEQ ID NO: 171257 - DNA, 756 bp, Enterobacter cloacae
atggctataaaacacaagtttgagggaaaggttctcaaacttcataaggcatttaaaacgccatcttggggtaaagacaccgttcttgtaactgacacttgggactatgtatctctttggctaaaaagagagaataaatctgaggctcaattctattgggagcaagctaaatctttttttgaggcgacgcagtctcttcctaaaacttccgcaccgctgacagcatactactgctttcttaatgcagcaaaatgcctgctgacagttaagggaatcccctttgataaacaccatggggtttctggatggagtaagccgggaaaagttagtctatcaaaagagattgtcaaattacaaaacaaggggattctctctgagctttgtcgttactacggagagaccattaataaaaacacttacagcattaaaaatatattctataatcttccatttattcacagggcttatcatctaacatatataagcgagcaagagctatttttgccgatacaagaccctgaatacgtacatgcaccggcatccacaaagtcttggtttactgcgattcttgatcctcactatgttcacgggcagacattaaaaatactaccgcctactttcgaaaaagattccggtgataacaattgctaccgagttagaagaaagaaaagatttaagtggcagagaggaagtaccatcaagatactagaaaatatgtattctacatccacgggccaatgcgtctttggtatttaa

SEQ ID NO: 171258 - DNA, 570 bp, Enterobacter cloacae
ttgaagaaagaaaaaacgaactatcctattgccactgatttatcttacgattacaagatggagtggagtgtacaagaagaccaaaaaaactgggagtcattagacaaatggttataccttggcgctgattttaagaataggggttttgcaaagataggtattaccatgggagatcttagtactagatcatatagctccgcaaacccaaactattatatattctgtggatttaaatgcagatataacatttctaaaaaaaagctcaaatgcatagagcgtgatattctacgtaaattcactaatttttacatcgatgaaaatggagatacaaaaagattagttcatattgactcgggatgtttttcagagtgttttgataatgttaattttattcacttcttagctcatctgcactatgagttatttcataatcacaatagcagctttattactggtgtattttgcgacgaatctggtgaggaatttggtgacattctagatatcgagtttaataagaaattcgtaactaaaagtgaacaatcaatgtatcggttaaaattagctcaataa

SEQ ID NO: 171259 - DNA, 1311 bp, Enterobacter cloacae
atgtctgcaggaactatcaccctgacaaacgggtccgctattgttggcggttccggaaccacattcgcaaccgaacttgccgcaggtgacttcattgtctctactataggcggggtgccgtatacgctgccagtgaagacagtcgacagtagcacgcagctcacgcttgtcagtaacttcaccggaccaacgcaatctggagcggcctggtcagcggttccccgcgtggcgctgaacatggtcactgctgcgctggtggcgcaaagtgctgaagcgctgcgtggactgaattacgacaaacagaactggcaaagcattttttctggaaccggcaatgtaacagtaacactgccggatggaacgacatggactggccccgcctggaatagcattacctcatcactaaatagcattaacgaatcgatagatagcattaccacatcgctctcaggcaaggcggcaaaaggtgaaaacaacgatatcacctcgctcagaggactcactactgcgttatctgtagcgcagggtggcacaggggcaaaaacaccttttgatgcagcaacaaatctgcaaaccattagatccctgacatatagatttggctcaggaatggaccctacgtcaatatcatttaaaaacacatcagcatttataacaggacagcagggctatggtcctatcggcgcttttctggatatcacatctttcgataatgctgcaaggatgcagctctacgggtgctataactcacaaatgttcccgggtaaaaatgcacttgcctacgcaacgtataacccaaacaacagtacctggtacccaattgcatttgtaagggacacatcgaatacaactgtcgattcgaacggtttcattaaatcagcatctccaatagtcaacgtttatggtgatgggcgatacgaaactaacgatgaatcagaaggggtaagagtcacacgtctggatgtggggcaatactacattgagggatgtcaggcgctcaattctgacgctgcatggggcggtattgacggaggatttgagattcctactgacaggaataagcaaccgctgatatggctggactatgaggttaacgcagacggctctgtgctggtaaaaacctatcaccgcgaacatcctacagcgccagcatttgccaggaatgagcgtgctggattggcagatggcgagccggttgatatcccggctgatcagttcgtcagcgttcgtgtagaaattccagcgagtagcatctggaatcagaaacagaaacaaacggaagtggctttaaagcaggaacagggatcgtaa

SEQ ID NO: 171260 - DNA, 150 bp, Enterobacter cloacae
atgagtgaagcgttagctttgatgctagagtacaaggctaatgaaatcaagtattacactaaccttgtatctttttatgttttctattttgttttgaagtttaatgtttttattattaaccagactaaaattaccgaggtgataaaataa

SEQ ID NO: 171261 - DNA, 948 bp, Enterobacter cloacae
atgatcaatgaatttaaaataacaggcacgtatgttaattattctgaaacactacaaatccagcataaccttagcgatatcgccagatatttgatagcaataatatacaataacgccaaaccaactaaaatcaaagactatttttggggtagaaacttatcagaattctataactactggcaaggcaagccaaacgtttatatatttgaacatgaaaaccagaaaaatagcgcttcggataatgcgcaaagcaataaggcactaatagaatcgctattagggaaaagtgattttttaccaaacaaaaaacaacatagaaaatatatcgatcatcgtgcctttgatgattacagttttttttctgaacaggcattagctttaaccctactctccagcggaataaaaagcgagtcttttgcagggacatacacagaagaaaacttgatgtgggacaatcaactcaaaagtgaacttagagattacatctcctttttctatgaatccaggatagatgtcattgggaatgaaaagactcatcttggacttgccaaaatacaagaagacattcttctatttgaggagtggttacggattttctcaagaaaatatggtgaaatacaagattttgcgctcaacactcagaattctactcatataaaaaaagcacgtcaaagcgtcatcgagttgataaaatctagaatgcatgttttaaaattaattgatgctgaccgtagcgagaaaggaaacaaaaaaatcacaatggcctttggcctaattgcatcaacatcattatctccaatcatagtgaaaccattgttcgaaacattaaatctatctcactcaattaaaaatggagcatttaaaaactacgaagacgctatttattttatcacctcggtaattttagtctggttaataataaaaacattaaacttcaaaacaaaatag

SEQ ID NO: 171262 - DNA, 639 bp, Enterobacter cloacae
atgcaaattaaaagaggttcagtctggcatacatacacaacccaatcaccagagtattatgacgccgagaaattcggagccgacttgattaatactggattatttcttgcggtcctaacgcctaacaactcatttaaattcatatcaaacaacactccaatttcaacaagaataaatttaagatatgaaaataatgaaaatggtatcacagttgaaggtggtgataagattcataaatctggtgtctgctccttaactgccaaggctttttttcagtgtatcaacattagactttctgaaagaaaacttttccacacatcaagcagcaactattatgaaagcataatatgctgtcaaaaaccgatcattattaaaaacaatgacacagaattttttataaaccctatagtacgcctatataaaaacggtgtagcacatgttacatttattgacagtgaggaacgcagtagcgatttacctgattttattaaaaacatcttaaacctacctttcaaactaagtagttcaattacaaccagcatagagtttgccaaactgtctttaatgcttgattattcagggatgtcacaacccaatagacatagagcaaaaaaacgcagaagagttaatgatcaatga

SEQ ID NO: 171263 - DNA, 438 bp, Enterobacter cloacae
atgtccaaaaacctcgaattatttaaccagcagacggcggaaatttttgcattgttatgggataactttcctgtccaacagaccattacctacgaaaaatttaacgccgcactacctgatgactactttgaccaaattaactcaccggagatgaaatcgttaagagaaatccgttgtgtgatagagggcacattcacttttcttaacgaaaacggttacatattatacgaaacagaccatcaaacctattttcgcgatgtgcggctgaccgagaaagctcttactgtgctcaacaaaaaacttgatgcgctcgggggtgacgaaacgatgggcgataaaattataagtgcagtaaaagatggtacaccgggagtcattgctggcgcggtgacgaactttctgagcctcggcgttaatttgttaacgtcgacgacatag

SEQ ID NO: 171264 - DNA, 1296 bp, Enterobacter cloacae
atgactgcagaaatagcaatttttaacaaaaccgccattgccttagctgcagactcagcagcaaccattacaagtaatggtgttcataaaaaaatatataatggctcagaaaaactttttactttatcaaaacaccatccagtaggtgtaatgatttatggaaatagtgaagtgtgtggtgcaccttgggagctattaattaaaagtttccgagcagaaaacaaagacacatcatatccgacattgaatgaatggtgtcaggcattttttaattatgcttcaagcaacgacaaaataatcacgaaacaaatgcgcgagaattacataatggcatttcactttaatgacattatgcccggaatgtttaaggacattaacaaattagctgaagaagaatctgttaaaattgctcgcgtggttaccatagatgaatatcattcaataacaaacacttaccttgatgatttcatttcattgttaaacgactgtccatattttgaagactttgacgaaaacgacgcacgggattccctcaacatcatttcaaattacttagatacgttatgtaacgattttataattagtgatgaccgaggcgttccagaggaaattaaacaaaaaatcctcaccattctctctttgacatctacaaaaaaatctcctttaggcattacaagtggtattgttttcgcagggtttggtaatgacgagtattacccttctatattagcttttgacgtttttggattcctaggtaataaagttaggaaaatattcaatattgccaagagctctgtgagttcagatgcaaatgtaattccatatgctcaagaccaagaggtacaactatttttaaaaggttgctacgacgatctattgattcatggtcaacaaacgtatgcgaactgccatgatgagacgttgagtcaagtgcaaactgtcctacaagaatcattgccagttgagctcgcgtccgaactttacgaaaaaataaaagtaaatacagaaggctacataccgactgctgaggcaagtgttaactcttttatcaacatgaactataaccagaaagttatgagtatgctgtcttttctgcctaagcaagaactagcttatatggcagaatctttagttaatttgaccgctttcaaacgaaaagtatcagatgatcatgaaactgttggtggtccaattgatgttgcattaatatctaaaacagacggttttatttgggtgaaacgtaagcactatttctctccagaactcaatcatcatttctttagcaaaaatgagtaa

SEQ ID NO: 171265 - DNA, 468 bp, Enterobacter cloacae
atgagccgattaacagcaatcatctgcgctgtcgttatctgtctgctggtttccatgggttgggcgattaatcactaccgcgacaatgccatcgcttataaagaccagcgcgataaagccactgagaaactcagcctggcgaacgccaccatcaaagacatgcagacccgtcagcgagatgtcgctgcactggatgccaaatacacgaaggaattagctgatgcgaaagctgaaaatgatgctctgcagcgcaagcttgattttggcggcagggtgcgcgtcaaaggacgctgtccagtgccagcctcaaccgaaaccgccagcgccgccagcatgggcgatgatgccaccgtcgaactctcttcagttgctggacgaaacgttctcggtatccgagacggaatcaagcaagaccaagcaaaaatagccgcacttcaacagttcataactgagcagtgcagccagtga

SEQ ID NO: 171266 - DNA, 285 bp, Enterobacter cloacae
atggcttttgaatcaattggtgccgcccaagattgtcgtcagcatctcggaataaaaggtaatacctacgtaaccgtaggtgggtacgtagatggtaattattacgctgtgactatttcctcagactacgataaggttgtatttagttttgagtcatcaatttgtggttatcaatattttgattcgcgctttcaaaaaatggagtgggacgaagaaaactgcactctaaccataagcagtgataagcaaaactactctttcgaagtgcatttcccagagcagtaa

SEQ ID NO: 171267 - DNA, 249 bp, Enterobacter cloacae
atggaagacttaaatgcaaggcttgaagaacttgaagacaaagttttggaccttaacgtatccatggtcgcccacaaatcaatgataaaggcattgcttcagtttatagagtttaagcatggcgcaactgtcaaaaacgcaattagcaaagggcttttagaagctatagaagaaaataccattcaaggtgatacaccagaggcaataagctcgcaactgctaaccgagaaacttcgggaatttgtttaa

SEQ ID NO: 171268 - DNA, 192 bp, Enterobacter cloacae
atgttagatggttattttggcaataatccaatgacaaaagacaagcaacgcttgcttgcagttcaggccgctcttgaaattgcaaaggcttctgccaattcaggcagtggcgttatgcacagcgatttggaacaggcaagcaattacattgaaaagctagctgacgcgatccaaacagccttgaagaaatag

SEQ ID NO: 171269 - DNA, 396 bp, Enterobacter cloacae
atgaatattcaacttatcccattacagattcatggtgatgatagaggagctcttgtttctttagaaagagataagaatatagacttcgaaattagacgtgtctattacatatttgacacaaaaaaaggggtcgtcagaggctatcatgcccacagaaatttgaaacaactagttgtccctgttaaaggatcgtgtcgttttactttagatgatggaaacgaaagagtaagtgtttttttagataacccggcacagggattgttagttaattctttaatttggcgagagatgtcagacttttctgaggattgcgttttaatggttttagctagcaatgaatatgacgaatctgattacatcagggactatgatgcatttaaattggcggcgaaatga

SEQ ID NO: 171270 - DNA, 864 bp, Enterobacter cloacae
atgaagggtattattttagctggtggctcaggtaccaggttatatcctattactatgggtatttcaaagcagttactccctatttatgataagccgatggtttattatccactctcagtactgatgctggcaggtatcaaggatattctgataataaccacaccagaagatcaggccgggtttatccgcttactcggtgatggtagccaatttggtatagaaatcaaatatgcaactcaagcgaacccggatggattagcgcaggcatttatcattggcgaaagatttattggcgatgattccgtttgccttgtactgggagataatatcttctttggtcaaggattcacgccaaaacttaaacttgcttgtgagcgcacccaaggggcaacagtttttggatatcaagtgatggatcctgaaagatttggtgttgttgagtttgacagccagtttaaagcattaagcattgaagaaaaaccaataaaaccaaagtcaaactgggctgtaactggtttatatttttatgataacgatgtaataaatattgcgaaatctattcagccttcttcacgaggtgagcttgaaattaccagtgtgaatgaaatttatttaaaaaatgatgcgttaaaagtggagttacttggacgaggattcgcgtggcttgacacagggacacatgatagtttgatcgaagcgggcagcttcgttgagacagtccagaagaggcaaggaatgatggtagcttgtctggaagagatcgcctggagaaatggttggctgacaaaagaaaatctttacgaacgaggtcaacaactgagtaaaaatcactatgggcagtatttaataaaattagtaggatga

SEQ ID NO: 171271 - DNA, 1041 bp, Enterobacter cloacae
atggataatgatataattgaactatggaaaaaaatagaacagcattctgtcaatgataaagaaaagtcaattaatgacttccttgaaaaatttacacttacggaattctgggttgtgtgtgaagaatatggtggaaagttaggttttgtgcttaatgaagcaactgaagatgatctgaaatcgttgctatttgtatatccagtggatggagaagaaccgccggatatgttaactaatgtaataaataaaggagatagaaaatttcataaatttgatggcgcttcattgttggggattttacatggtattggatgctctttgatgattgtatcctcggtacggaaatttgtttgtattaagaaagatattataaataaattttatattgctttgaccggtaatatgagttctggaaatagtactggtggtatacccaagaaatggttttgggttggtgtcgctgcaattgtattgctgtgtatcctgggggggaggttttatcagaaaaattactcccaggtatcaataactaacttatctgagatatcgtggcgaacagtaaaaattgacattgcaaaaggtaatttctcggtagatctaccatttaattatgaaactgatagctggaagaaagatctgtcttatgaacttcagtcaggaaatgtctttagagtctataagagcaacgatgctgtctttcgtaatcatattgttaatattggttttatcccctctggaacatcactatctgaattaatgactgatttgaatgctgaaaccagtttgatgttgtctgcaatgcaaaaaaaattgggagaaataaaaataaccagcagaggccatgtcgatattaaaagtaacgatatggttatggttaaggggaatatgaaagtaaacggcgatgatgcgagacttactactgttgttgcgttaacagggatgggggttatgtggatacaagtgatctctgcaagaggagattctgaagaacatgacttttttgcaaataaaataattaacagtgttgagataatgaaatga

SEQ ID NO: 171272 - DNA, 1029 bp, Enterobacter cloacae
atgacaatgtatggtttgtatcagccctataaggtaaaccgcctgttgaccagtgaagaaaaaaacaaccagtttaaacaagggaaacatcgtaaagtaaaagcattatattgtggtgagtcagtaattcgtatgaactcaacttatcttgaaattgtggataagttctataaaaataagggggtggacagtctttgggctctgatgatttttgtggggtttattggaattctactatatgtgatttttagaggggttacagatttaattgctatacatggactgggtaaattttctcttgcttgtttgatggttcttccgtttatagcttttggtggatattttgtctttaaagaatggtttaaatggacacattatcccattcgatttaaccgccagaatggcatagtttatgtattccgtacaaacggaacggtgttatctgcgccatggaaggagatattctttactcaggagaaagatccgggtcccctgcgtgaatggtgtattcgcggacatattcttgacaaggatggggaaacggtactggaaaccttcagtctgggattttgtgagaataaagcatcgttgccggagtactgggagttcatccgttgttatatggaagaagactgtgttgaggatttggctgaactggtagtcatttgtccaccggtagagaacagaaaagaaggttttgtctttggtcttcagaatctgttttatatggaatcccgaatggaatggctatttctgcctgttacgctgcttctgaatattgacggcagcgtggcacgctatatttccatgcagaccagtaaaatcccgcaatggacgcaggaggtacaggatgcctgtaagcctgatattgatgactcagtgaacgtcagtgctgataacaatccgaaagatatgtggcggctggtatttgcgaatcagaagtatgaagactggaaaacactgtatgacaaaatggaatgtgcaacgaacagaattcatgcggcgctggcggaacgttatagcgtgtga

SEQ ID NO: 171273 - DNA, 1038 bp, Enterobacter cloacae
atgacaatgtacggtctataccagccctataagataaatcgaccgttgaccaaagaagaaagaaataaccagtttaaacaagggggacgtcgtaaagtaaaaacattgtattgtggtgagtcagtaattcgtatgaattcaacttatcttgaaactgtagataagttttataaaaacaaagggcatgataatgcttggtggttgaccgcttttattatgaccgcggggataatattatatgtatttatacgttctgtcatggatataccaagaggcggttattctcaattctggaggatgatgattggctgtgtgctattttctggtttaacaatttttaccgggattatggtattcaaagaatggcttaaatggacacattatccaattcgctttaaccgccagaatggtatggtgtatgtatttcgtaccaatggcacagtgttatctgcgccctggaaggaaatattttttactcaggagaaagatccggggcctttgcgtgaatggtgtcttcgtgggcatattctggataaggacagggagacggtactggaaacctttagcctgggtatttgtggggttaaagggttgctgccgggttattgggagtttattcgttgttatatggaggaggatttaaccagggaactggcggacgttattattgtttgcccaccgattgaaaatcggagagaaggttttgtttttggttttcagaatctgatttacatgtattcaagaatggaatggatatctttaatgtggatgctgccaatgagtatagtaggcagtatagctcgttatattgccagtcaaaccagtaaaattccgcaatggccgcaggaggtgttggatgcctgtaaaccagatgccgatgatttagtaaatgtcagcgccgataacaatccgaaagatatgtggcgactggtatttgcgaatcagaagtatgaagactggaaaatgcttggtgagcgtcatgaagtggcattaagtaaaattaatgacatactgacaaaacgttatggaagccagtaa

SEQ ID NO: 171274 - DNA, 612 bp, Enterobacter cloacae
atggcttcgttgatttttcagggcgtcgcattatggggggcagcaggggaaaaagatttactgacctgggaaaaaggtacacgctttggcgcgaatgtggtgggggcatttggcacttcgctggaggtggcggagcgggcgctgaatgatctgaaggtgctgaggctgaaaggaagaatacgtctgtactggggaaaagtgacgcttgaacgtgtgacagattctattcgtattggtgtcaaattttgttcatatgctgcaattgttggtgttttttgggacgggttaaatggttttgattatttaaagcaaggtgattatgggatgatggttgcgagtttcggttcctcaattggaggtcttcttttatccggtatgatcactggtttagttctggggccattaggaatagcctgggcgctggttctagtttttggttgtgctatttatatggcgttaaaaggggataacgatatccagaaatggttaaaaagctgcgtctggcgcaaggttccggaaggattgtatggtgtccctactatttatcctactggcataatggaaatggaagcatttaatgatgctattagaccagaggatgactcaatatga

SEQ ID NO: 171275 - DNA, 309 bp, Enterobacter cloacae
atgtcgcatgttaaacccgcagattgcacactcatagttataagctcgcagcacctgctggcggaacagctgatctcgaaccttacggatctgctggatatcaaaaaccatctcatccgcgagctctttctgaatgctttcaggaaagtgcgcttcaaggatttgctgcgcagcgagccgatcaggtttttgttcttgctcagcaatgcaaagtgttcttcatcaaacccacctgcgacattatgttccacaagttctttaacgggcggttgcttactgccggtggtcgaacagaactcattgttctga

SEQ ID NO: 171276 - DNA, 900 bp, Enterobacter cloacae
atgagtgatgaacgcaaggtgaaacatgttcttggcctatcaggaggtaaggacagtgctgctctctcggtgtatatggctaggaactatcctgagctcgacatcgagtatttctttactgatacgggcaaagaattacctgaagtttatgagtacttggagcaactagaaattgttctaggtaaacctattctgcacataaacgacaaaaaaggatttgattattggttagagcaacacaataattttctccctgcaggacaacaacggtggtgtaccatccgtatgaaactcgagccatttgagaaatggattcgccctttcctcaacgatggctacgaagttatttcttatgtgggtattcgcgctgatgaaccttggcgtgatggttatcgacccaatgagaaccaaaaatatctcacaatcaaaatgccatttgctgaggacggaattaaaaagcagggtgtactcgatatattagatagtgcagggcttggtttaccgaaatactacgaatggcgttctcgttctggttgtaccttctgcttcttccagagaaaaattgaatgggtacggctacgtgaagagcatcctgaggcttttgaagaagctaagtcttatgaaaaaagagctgagactagtgagaatggcgaaacttttttctggatggggccaaatgaaccattagaaacactggaggacccagagcgtgtcaagcagattaaggaaaaccacgagaaggtaaaagctcgtttcgagaagaaaaaacagcgcgagagaaaacgtcgattaggtatgcatgcaatggtggatgaaagcatgattattgacacgttagatatggacgcgatgtatgatcttgaagaggggggcggcgcttgtattacatgttataagtag

SEQ ID NO: 171277 - DNA, 1227 bp, Enterobacter cloacae
  misc_feature (462)..(496): n is a, c, g, or t
atgtatataagctgcttaaaaaatacatctattcactcggccgaaggtgaaaaagggcagcattggttcagagattatttggatacaaatctcagtgccgtatttgccgcagctgaacaactattgaaagatcgcaaaggtagtgaagttggtttgtctgaaatcgccgagttatggggtagcgcaccctttggtttaacgaaaggtgttattccgattttcatactcgcttttttgaaatcaatgggtgaacaaatcgcatattatgaaaaagatatgtctggcgaatttgcctttatcgcagagccagacaatgactatgttcataaactgatcaagaacccaggcgatcttgccgcgaaatatatcgtattagcaactgacgaaaaagagtggttgcaaaaccttgcggttttcgctgcagccgaaaccaaccgtaatatttcgaataatatattatcnnnnnnnnnnnnnnnnnnnnnnnnnnnnnnnnnnngggtaaaaaatgcacaccatattgtgccagataatgatgaacgtaataaaacttatttgagagtgcgagatctttttttgcaagcaaatgatccacatactctacttattaagaagttacgtaaagagttggtagattttggtgctaatgattttacgagtcaaattgatctcttggaagactgttttaaaactctcaggcaaaagcacgagcaaatgttagtttcgatcaagaccagagtaaaaaatatttttccagaaaatggtgaagaattagctcaaatgtgccggtacgttgagacaaattcaggtgacttgcgcttaaaagcttttgctagagagctcgccaaaagtgatactggattattacagtggctagagagcataattcaaattgttactgggcgcggaaaacaaaactggaacgaaggaattcttcaaacagcatcaaacaaaatcagtgactacgcacaagattttttgagtgtggtaaagtcgcagcataatgacgaagctaactctagctctggtaaaacaaaattggtgtccttagtattagaaggcgatgatggtaagctaacctcatttaagcgagaaattagagttgttgaaatggatgaattgcaaaacacaatgaatactattgaaggtcatctttctgggcttgatgaattccataaaatcaatgtgttgcagcaattgctgagaaagtcccttgaagcaaaaagttaa

SEQ ID NO: 171278 - DNA, 228 bp, Enterobacter cloacae
atgcagtggggacgtctgcagcgcgaggttgcaaccttctccctgcggctcgcagagggaagggctgatctctacaccgaaatgccagtgaaggtaagcggctctaaacagccaattgatgatgccgaatggaccattaccgcgctggcgcacagtgtcacggcagatgatggtttaaccactactctggagcttgaagtgaagattgatgatttcgaaatggaatga

SEQ ID NO: 171279 - DNA, 207 bp, Enterobacter cloacae
gtgaaggaaatcgccgccaggcataaattaaagatggcgctgggccatgacctgatggacaagcttgtcgatcatcttgaccagacaaatgaaagcgacgccagctttttgatgaagctggcgcggcagtatggggtgatagcttcagttaaggacggtaatctgttgtttatccgccagggggcagagcagaacggcaagcggtaa

SEQ ID NO: 171280 - DNA, 240 bp, Enterobacter cloacae
atgagtctgacgctgacggataaccggggctttgaagcggagcagcttgatctggagctggacgactcggacgggcaaatcgttctgccgcgtcgcggggccgctattcagtttgcgctggggtggaaaggtcagccgcttttccgaaagggagctttactgtcgatgagattgagcacagcggcgcgcctgaccgtctcacaagtcgcgcgcgtagcgcagatttccgcgaaaccctga

SEQ ID NO: 171281 - DNA, 165 bp, Enterobacter cloacae
atggctttaccacgcaagttaaaacacctgaacctgtttaacgacgggaataactatcaggggatcgttgagtctctgaccctgcctaaattcggccgcaagtttgaacagtatcgcggtggcggtactggattcgcgcctgatgagtctgacgctgacggataa

SEQ ID NO: 171282 - DNA, 735 bp, Enterobacter cloacae
gtgccggggcacgacacgcaggcggttgccactgagctgctgagcgtggcgcagagtttgcgcgggtttgcttatctgtccgcctacggctgcaaaacagtggaagaggctattgcctatcgcgctaatttcagccagcgcgaggggatgctgatctggcctgatttcatcagttttgataccgtgctgaatgctgacgcaacgacttacgcctcagcccgtgcgcttggcctgcgtgccaaaattgacgagcagaccggctggcataaatccctgtccaacgtgggcgtgaacggcgtcaccggcatttctgcggatgtgttctgggatttgcaggacccggcaaccgatgcggggctgctgaaccagaacgatgccaccacgctgatccgcaaagacggtttccgcttctggggttcccgctgcctcagtgacgatcctctgtttgcctttgaaaactacacccgctccgcgcaggtactggctgacaccatcgcagaagcgcacatgtgggcggtggatggcgtacttaacccgtcgctggcacgcgacattatcgaaggtattcgcgccaaactgcgcaacctgaaaacgcagggctacatcatcggcgccgactgccggctggatgagtccttaaacgataaagattccctgaaagccgggaagctcactatcgattacgactatacgccggtaccgcctctacgccggtaccgcctctggaaaacctga

SEQ ID NO: 171283 - DNA, 342 bp, Enterobacter cloacae
atggctcaggattaccaccacggtgtgcgcgtcgttgaggtcaacgatggcaatcgaccaattttaacagtaagcacggcaattgtcggtatggtctgtactggcgatgatgcagatgcgtatgtgttccctcttaataagccggtcctgcttaccgacgtgctgaccgccagctgtaaagcaggcgagtccggcacgctggcccgttcgctggatgcaattgccgaccaggctaaacccgttaccgtagttgtacgcgttgcgcagggagaaaccgaagcggaaacaacctcaaacattatcggcggcgtgacagctgacggtaaaaaaaaacgggcatga

SEQ ID NO: 171284 - DNA, 756 bp, Enterobacter cloacae
gtggctagggtagtcaataacggtcaggtgatagcgctgcctgtgagtgctggtggaaccggggcagaaaccgcggaggatgcccgaaaaaatcttggtattaatgttctgcttgaaggtaagcagccgctgaactatgtggtgacagcctttgccgggctgacgatgcaacaaagcaccttgccttatttcactggagataaacaggtggcagtgaccgcgatcagtgaatttatgcgcgtgatgctggggaaagtagatgcagtcagtattgcggcttatctggggatgggaagtggtgcacaggttattggctctccttttgcatggcctgtggcgcagatgccgagtgacgtatttgacgacatgaaaaacatggtttttttgaaagtgaatggcgcgccatttgataagaataaagacagcaagttaggtgtgacatacccgtctggcgtgttgccggatatgcgcggcgagttcatacggggttatgacgacggacgcggtgttaacccttctcagaatttgctcggttgggctgccgatgcgttcaaaacacataagcatcccttcttggggtcaggcggtgcagccgggaataataccgttttttgtgtcgaaacaggcatcaggggaatttataccaatggcataaaccagcctgatggctcagtagcgcctgcatttcaggagccaggtggaacagaaactcgcccacgtagcgtggcattcaattttattgtgagggcggcgtaa

SEQ ID NO: 171285 - DNA, 294 bp, Enterobacter cloacae
atggcggtcattgacctttcccagcttcccgcgccgcaaattgtggacgtgccggattttgagacgctactggcggaacgcaaggccgcttttctggcgctgtatccgaaggatgagcaggcagccgtcgcgcgcacgctgacgctggaatctgaacccatcacaaacagctgcaggaaagtacctagcgtgaagttctgctgcgccagcgtatcaacaaggccgcacaggcggtcatggtggcctatgccctcggcggcgatctggagcagctggccgccaactataacatga

SEQ ID NO: 171286 - DNA, 360 bp, Enterobacter cloacae
atgacgctgtatctcggcatgagtcaaagcaatgggaaagtcattacggacgcagaccatctgcgccagtcggtgcgcgatattctgttgacgccgcagggtagccgcattgcccgccgggaatattgctccctgttgtccatcctgattgacctgccgcagaacccggtactgcgcctgcagatcatgtctgcggtgtatatggccctgagccgctgggagccacgcctaacgctgggctctattaccatcaattctcactttgacggccccatggtggttgaccttaccgggcagcgcaacaacggtgagccgatttccctttccgtatcaacaggagcagacaatggcggtcattga

SEQ ID NO: 171287 - DNA, 699 bp, Enterobacter cloacae
gtgttaactcaaagtctggttaatttatttagcaaagaaacaataggaacattaatagccgccttacctataataaaaatcatcttgaattactttaacaagccactagacgaaattgacgagatttataaaaaagcaaaaattagcatatggcgcgttcgtttttttatggttaaaatatccacaaaaaaaatacccaagttaacctaccttgatgttgtcttattatctttcattattttatttctttcagttacatttgctacaggttcattttatggtacgaaactactacaaatacaaaatggatggacatcgttaattctcaaggaaactgatgagtggttcctgatcacaactgacaaagcatcagaacatgcattcaaaccttcatggtatatcacagaagaaacttgcctgtctggggccgcggataagttaattaatgaaaaaaagatcagcactccccttaggaattttatttgcgaatcattcacacaccccgaatatcgggaaaaaattgccaattccataaaagaaacagcacataacaaatctttccttactattgtgttagcagtaattactttaggctgcttatggtttataacgagcctaatattaactataacctacacaataagactaaaaaaattcattactaaagagcatgaaaaagcatattattatctaacatag

SEQ ID NO: 171288 - DNA, 504 bp, Enterobacter cloacae
atgttggttaccgccgctgagcgtagtagaggtagcagtaccaccagtgtaaacgtgctgggaaccaccactgataacagtaaaggtggctttaccgccactggagatttcctgtgtgccattattgatagtagtagaagtagcctcaccaccattgaagacgtactgcttaccaccattattgatagatgtagaagtggccttaccaccactggaaatattttgagtaccccagttgagagtggtgttagtggcagtgcctccgtcgtagatggtctgagcggtattatgtataagagacccagcaaacccatcgttgataatagtagagatggcagtgccaccactgtagacgtgctgattgccgttaaccttgatggtggttccactgaccgtgccgctgctataaacgtactgattaccgattgcgccaattgtggtactagtggctgtgcctccactggagacatgctggttacctccgctgttgaggtgtgtaaatga

SEQ ID NO: 171289 - DNA, 654 bp, Enterobacter cloacae
atgaagaaaaaactgccagacctaataccaagggaaagtattattgcagctatgcgtgcctttgatgagggaatcactcatccgtttagtgagtctcggttatatgacgtggtatttgaaggccagggctacccaccgaaagcaataataggcattgcagcgtttaatattaccggtgttatgcttaaacccgaaaattttaatggcggtctaaattctaaatgctttaggctactaattgatcaagggtttgagattgttcagaaagaagaaaataatgaacagtctgacatcagcatttttcctgatgaactaccgccacagggcgtatttactgaaggtgcagctacgcaggtaactgttaaccgctatgaacgcgaccgtaaggcccgacaggcagcattagcttggcacggttgtctgtgcaaagtatgtggtattgatatgatgaaggtgtatggtgagatagcaaaaggttttatccatatacatcacctgattccgctatcagacatcaaagagaattactctctggaccccaaaaaagatcttattcccgtctgtcctaattgccatgccatgttacatcggcgtaatccgccttttacgcctgaagaattgaaatcgattattaaatatcatgcggctctttag

SEQ ID NO: 171290 - DNA, 183 bp, Enterobacter cloacae
atgtttcaggagtcaggactggccctgaactgtaatgaagacagcataatctggacctgcgaagttcgcgcgtcacaaaagaaaaataatctattcaaaggatttctgatggaggctcttgggctggtgcttggagagaaaatgctggtgaataacccgtggctgaagctgctgcgcgaatag

SEQ ID NO: 171291 - DNA, 1941 bp, Enterobacter cloacae
atgcatgagcttccatctgaattgcaaaaatttataccagctgtggcccgggcagtgaacttaccggatgaacaatggaacctaatcaagttgtttaagaacgaatttcgcttatcattacttaactaccccaacttttatagcgactcgtacccagtcttggaacaaagcctcaacgtagatttgagcaaactcagtcataaagtaacttgctaccgttcttctgataacccacctattttacaccgaaaggaaaccatgattttgccggggagtgactactatgaacacttcactacattgacagaagaaggggagaaggccgggttgtacgaaaacacccgtactataggattcaaacgttcttggctaaatttgattcacaaaaaaggttaccagctagttgaaggtcggttactcagagcagatagtgcacctccgagtattggcgcttcggaacctggcatcgatcgctacaagactgctattgtccgctatgagttatccgggccgatgaaaacgttagctaagcaaggctatctagatggccgattttctatttttgactatgggtgcggtcgaggagatgacctaagggaacttgaggcaaatggacttgatgctttaggttgggaccctgtattttctcctgataacgacaaagtaaagtctgatattgtgaacttaggttttgttctaaatgttatcgaagatcaagatgaacgcctcgaagctctcttgagtgcttgggatctagcggacaaaatacttgtcgtatcagtaatgttagctaacgaggcgtatatcgagcagtttcagccttataaagatggcgtaattacttctcgaaataccttccaaaagtattatgcgcaatcggagttcaaagagtacttagaacgttccttgcaagatgatgctattgcagtcgcgcctggtattttttacttgttcaaagataagttagaagaacaaagttatcttcagagtaagtatcaaagacgttataattggcaacaactcacttctcctcaacccattgagagtaaagatcgagcaaaacttgttattactcaaaatagggagatctttgatagtttttggaatgtttgtctagagcttggccgtatacctgcaaacgatgagttcaagaattctgaagaggtgagaaacttgattggatctcacaaaaaagtctttggcctgcttcaggaaatgtttggtgctcatgaatttgctaatgcacaaaaatcccataaggaagatctactggtatatttttctatggggttatttgagaaaaggaaaccatatacacatcagcctgaaaatctaaagcgtgacgtcaaagctttatttggtgattaccgaacggcgaatgaacttgcgaaagaattactttttgcgattgcagatacgcatttaattgaagaggaatgtataaaagcacatgaacaattgcctgcaagtattcttaataatgggcactctttgattctccataaagactatatcgaggcactaccactcttattgcgcgtttatgtcggtgctgcattgcaactttacggagaactagacgacaccgttgaactagttaaaatacatataaactctggtaaactcacgttgacacgctacgatgattttagcaaatctgttccttttttgatagagagaaccaaaataaaaatggttaatcaaaatatagatttctttgactatctcgatgaaaatctccgcccaccactgctcaataagcatttgctactaagtaataaacacgaacaatatgaaaaacaaaagaactttgatgaacgattgtcaaagctcttgggaacaacagccacaggcgaggttatcttgaacaggcaaatattcgaggaacggttagcgcttaccagaaagcacgtggctggctttaggctaatttgtcactaa

SEQ ID NO: 171292 - DNA, 828 bp, Enterobacter cloacae
atgaatgatagttcaaaatcctttagtgtattaatgtctttataccataaagaacatccagactatcttgacgcatgttttgcaagccttgccaaccaaatgttatttccgacagaaattgtttgtgtttttgatggtccacttaatacgggattggaaaatattgtattaaaatggtctgagaaaatgaatatcaatatagtgaggttgccggttaatgttgggttaggtaatgctttaaataaaggtcttacacactgctcatttgatattgttgctcggatggattcagatgatatttgcctccctgaacgttttcaaaaacaaatacctctcttttttagtgataaagaacttatattgctagggtctgggattgatgagtttgaagtatgtgagaataaggttaaatcagtccggaaggttccattgtccgaggctgaaattcgtgagtgttgtaaaataaaaaatccattcaatcatatgaccgtggtttttagaaaaaaagaaattttatcgcttggcggttatcaacatcatttccttatggaggattataatctttggctcagggttattgctaaaggatataaagtagggaatatcgatggctcactagttaaagctcgtgttggtaatggaatggtggggagaagaaagggaatcaaatatattaaaagtgaatgggaactttttatgcttaagaaaaagcttggatttcagtctttcttttccggggtttgcattttcttgatgcgttctattcctcgcttactccctaaaagaatgctctcggtgctttacaatatttcaagggctcataattaa

SEQ ID NO: 171293 - DNA, 1692 bp, Enterobacter cloacae
ttgcttagcagtatcaaaatcgaacgatttaagaatatcgttgacattgagatccctcttgaggggataaaccttttaataggttctaataatgcagggaaaagtagtattcaacaagcgatacagttttcagtttcaattgctcaatcaacaaatcagcaaggtgctagatggtctcaaaatcgatgcccttcatcactttctagtgataccttaatttattctccattaaaagatattggggcattagctccaaatggtaaattacagacatcaaaagatcaagctattaaggttacatttaatggcgaaacaagcacaacagtaacaataagtaagggaaagaatagaaatatagcaacttctttagaagggaaagaattaggggagttacttcaagatattgaaaatccattttcaatgattgtgccggggttagctggaataccttcttttgaagaatacaaaccaccatccgttgtaaggaaagctgcagcaaaaggtgattccaacagtgtattcaggaatattttattgcttcttgcaaaggattcacattcatggattgcctttaagaaaaaattcaatgctgtattccctgattacgaaataaaggtatcatttgatcctaatgttgatgaacacatcaatgcagaagttattagcaactcagtttcattgcctatagattcatgcggtactggaattttgcaagccattcaaatattggcctattactatttatataaacctcaacttttaatattagatgagccagactctcatcttcacccaaacaaccaaagaatacttgcgcttttattaaaagaactgcaccaagaaacagagtgccaaataattatatcgacccattccagacatttttttgaagctcttaaggacgattcagcagtgttatggataaacaattgtgcattagttcaaggaactgatgatgtcgagcgaaatatattgatggaaatcggcgctcttgataaaggggatcagctaagaaatggaggaatctcagcaattctattaacagaagatacagacaaaggatatataaaagctattgcggaatcttcaggttttttgcctgaccaatatgaaatatggtcctacaacggatgttcaaacataaatatagcactggctttaaattcattcatagcacaacatgcacctggaactgcagttgttgttcatagagatagagattatatgagtgataacgaaatacttagctacaaacaaaatcttgaagctgtaggcctaaaagtttttataactaaagggaatgatgctgaaagtcattttataaatgaagggcacatccattttctttatgagaatatttcagaagctgaagcctctgaaatcatcaatacatgccttgaagaaagatcagatgcagtcattgaaaaatacattaatactatacacactaggaaattgcaagaatcctataagactggagttaaacctaatgcgggagcaatcgcactagattgcaaccaaaagtatcataataatatgcgcgaatttatgcatggaaaaacaattgaaagcacattgcgtggcaagattcaggcaatcattggtcgaaatgtagatctatgcaaaacttcaccggcgattcgtgacgatgtactagcatcttttgctgatgcgatttggaataatgcataa

SEQ ID NO: 171294 - DNA, 213 bp, Enterobacter cloacae
atgtggactgaggggcttatcggtcatgaaccgaatactggcgaaagcgacgtacgcgtgaatttcggcgacgtgaccttcttctccggcgaacatctttatgctgataataccggcattatccggtcggaagatgcgctggatatcgaggaaaaaaaaccgggtagcagcgacgcttacccggctatatctgttcaatcccgacagaattaa

SEQ ID NO: 171295 - DNA, 1095 bp, Enterobacter cloacae
atgtttaacccttttaagcgattccctgtcgacccgtcatcgaatcggttctataagggatttcgtcgtctcagcgataaaggtgtttttaaaatttattcgcagaaaacaggtgatccggatgttcctggtatatccgggttcgacagcgtggtgcggctgaacacgacgtatctggagctggttgaccgttcttacaactggcgcggaacatggacgctggcaggggtaatctttttctgtctgtcctttagtttgttttgctacagcattatcggggtggtattgggatggggaggacgcagttttggcatctggtttggaaccgttttaatttgggccattacattgccggtttctttactcacataccggctgatgacctccgaggtatttttcagcacctactatccgatccgctttaaccgtaaaaataggatggtgtatgtgtaccagtccggcggaaaagtgatgtctgtgccgtgggatgagctcaaatttgtcctgcacccaacgaaggggcgactctcaacgcagtggaccattgtgggttgtcttacgggagatgacggggatactgtcacaggggctattcctttgccgattaatctggaaagtgaccccgatgtgctgtccatgtactgggagtttatccgctgctatatggaagaaggagatgagtatctcccggacctggctgactccattgcctggtgcccgccggtggaaaaacagaaagagggctggctgttcgggctgctttacctcagtaagcaatggttcgggcggctcgggttgctggtgaatgcgctgcagttgcctctctttttcgtgctcagttttccgcgctggctggtgatggcgaccagtaaaattccggtatggccggctgacgtggtcgcggcctgtcagccggctgagaatgaccctgtcaacaaaggcgctgagcataatccaccgcaggtctggcgaccaatgctgggcttgcagggcaaggagcgttatgcccgcacctttgcaaaagagcgcggagcaatggaccggattgttgcccggctgaaagccaaatatggagggcaggaccatgtggactga

SEQ ID NO: 171296 - DNA, 2652 bp, Enterobacter cloacae
atgagcaatgaaaagggatgtaagttctgccagcgcgacggtttacccgtcctgccggttcgtccggcaatcatggaaaaaggtgacgcgttaccggctttatctggcagtatcaccgtaccggtaacggccgaaggaggtgcagactataccgcccgtctgctgaggcagggctttttatacatctgggcggaacgttcacaacgctggattaactattatgctatcggcgacggctatttttatcctctttcagaggacggcaccgtgccgccgcgcgtggaaagcggggacattaccccctgtattacccgaccagatgaactggcaaccgcttccctggtgacactgccggtaaagcccgccggtatctttaacggggcgtactggtttgcgtggtctgaagagtcgtggacaccgatggtacgcaaacagcatgaagatgtcgcctggcggcgccagtatatgcagaaatttgatatggatgcctggcttgccagccacagcggccagcaggccctgcccttccgtcaactcgccagctgcgtggctgaatacagtccaggactgcgcaacagcacccttaaagcctggactccctctcccctcaaagcggtcagtagtcattctgcggccgctttacgacaggcggcagataatctgaacgcgggcaacggtgcgattctgatattgtctgacccggttggggtggcgacggagatttcagccctagcacgctaccggatgcagcaggctatcgccacggatccggagttgagccgtggcactgcattgctgaccatgctcggcagcgtcgaactggcaatgcgtaattatttttacctacgggcagaagccggggatgaaagctatgagcgccagatgcgctacggcagggacacgccggcaggacagagatttccggctccggacatggctgaccagatgcatgtcctgaatgaggccagccggaaggaccgggtggacgaggcatggcagaccggctacgaaaaatacattgaccgggcgaagacacagacattcagtcagacactgaaagactggctgaccgagtatgacaacagttcagtcgttcccatcacccggatgtatctggcctggctgcagggaccggcgatggcgaattactttgtgcagcactttgatccgacctgcgcgcacagcggcggacgctatatccagacagtagcgaaagtactggcaggaatgaacgacaaaggcggagtgattacccacatcgatcagcagctgaatcaggctccgctgacgccggaaaactttcttcagcgggcggccttctttaatcatgacggctggattgccgaggcaaatgcacagctgaaaagcggcggaccagactggtggctgggcataagctgggaccgtctggcggacggcgcgaaggagtacagcggcagctacgccagtgcgatcctgaccgggctggaaaagctcagcatgctctggtctgacacgatgatgaaatcggtggatctaatggtgaaagggacgccggtgcgctttgctgtcgggatactggcgatgcagggtaaggcgttctcagccgtcagcgtggtgccggggacgaaaaactttgtcggggcgatgacccggggaatggccgggatgctggaaatgagtggacgcagcggcgggcaattatataccgcgatgcgtaagctgaccgagagactggtgaaggagctaccggctcgctcgctggagaaaatatctctgccgcggattattgacgtgcaggaggcgaaggcactggccgccctgccggttaaagagcggctggcgaagctcagtacggcaatgctcacggaggacgagctggcgcgaatgctgttcccgaaatcgctgggctcatcggtggctcagatgcagggaatgtcgtccggttcgctggcaacgggaatagcggcaaacgggatgaaatttggtggaaccgtgttctcagcgtacttccaatggatggtgctggggtacggtgtgaaagagagcggcctgccgtccgaaggtaaagcagcgacggtgttcgcggcgaacgccagcatggcggtggcgtcaacggcggaagcattgaagctggcgatgacgccgctgatgaagctggagctgtcatcgaccttatcggtaatcaggaacggcgccatggcggttgtcggggcgggtatctggggattgtttgggttcggcggtggattggtttacacaatgattgaaggtttgaatgggggcgttgatctttaccgtggaaaaatgggggaaggcattgctcatctgattaatgccctcggtgtcggaatgatgacagtcgggggcggtagcgaaatatccgtcactctcctcggcttggctggtgtgtcagctactttcattgaggaatccaccgtgttggcttttttcctcggacctgcggggatttttgtcggaatgatactggttctgggggccggggcctggctgttaagtcatacccggaacgatatacagacttggctgctcagtacgcagtggcggcggattccgccggatgaaagcgatatcccggctatctggccgaatgcacaaatggaaaaggacggctatatggccctgaatgcacagggaggagcacatgtttaa

SEQ ID NO: 171297 - DNA, 138 bp, Enterobacter cloacae
atggccatcttgaccaggtatatgacggtcttccaagcttccgttctcctgaggtggccaatgcctaacccattcgatttcgtgatgttcgtgctgctcacctggggggtaatcgaccagacggggtggatatggtaa

SEQ ID NO: 171298 - DNA, 693 bp, Enterobacter cloacae
atggcttggtctggtgtaccacatccttttccttcggttcattacctagattacggtttcctaaacgtaacaaaaatcccaacgatagttgtggatactggattcgcatgggatagcgttcttggtgcttttattgcaggtctaatacctgcatatatcgcgtggtatacaattaaaaaaaatatttctgcaatgaaagaggatagagttcatcagcaggactcttttgataaagacaggaatgctcagcttgaaattgcaacaaaaaatatcaaagcgcaagtaatctctgcaaacaggcaacagtggataaataatttaagagagtcaacggctgaatatatttccgcagttcattcactgagaaaatctcgcactatagcaaggcactgcctggccttatcaaaaaaggatggctctgattttctcatagttcatagagacgccatcaattctatgactaacgattcgcgtgtagtagaaaatttaaaatataaaatacttcttttagttaatcctgctgaacctgaagcgattgaaattaacaggattcttcaagaaatttccgcaaacacgggttcgtttagagaaaggccaaataagaaaaagttatatgagctgagtaaagagttagtcgcaattacacaggtatatttaaaaaaagaatggattagggttaaggatattaactaa

SEQ ID NO: 171299 - DNA, 459 bp, Enterobacter cloacae
atgcagtacaacacctcaggagattatgaggtcagtaacgtaatcatgggaatcgatactgcgtcacgtaacgtttcttgggatttccagttgtcaggaaacgctgttgcgaatgccggctcatggctgagcaattccgataaagagatcaaaaccaacataaaggttatagaaaacccgcttgataaaatgcgaatgatgcatggatatacctgggagcgtctggatgatgcacctcctgggcagggttttattgcacaggagcttatgaaagtcatgccgacggcagtttttgagggaggacgtaccgaacttaaagacggtacggtagttgagaaaaccttatcggtagatgtgcctggtgcatcagcagcacttcaccatgaggctatccttgctttaatggatgaagttagcgggatcaaaaggatgatgagcgagctgactgctgggaggtag

SEQ ID NO: 171300 - DNA, 234 bp, Enterobacter cloacae
atgaaatacatgattctttgtctggcggtggctgcattgctctctggttgcgctggcgttcttcagaagcagcatcccatatgtaccggaacggccctgatcggcggacaggagaacatcgtccagatttatggagtgcggaagcaaagtaatcagacccagtaccgcgccggttacccatttaactggtcatgggttagcgcaaacacgttcagtagtaccacctgccagtaa

SEQ ID NO: 171301 - DNA, 906 bp, Enterobacter cloacae
atgacgcatgtaaatgttgcagtgctattggctgcatacaatggaagtaaatgggttaaacagcaaattgacagtattttaaagcagtctcatgtaaacgttcatatatatattagtgtagataaatctgatgatgatacttttgaactatgtaaagcatatgctgaacaggatcatcggctaacagtattagattatggtgaacgatttggtggcgcagggccaaatttttatagattaattcgagatgtagatttttcgaaatatgattatatatcgttttcagatcaggatgacatttggtttgaaaacaaactctatacttccatatgcaatataatttcaagcaatgctcatgcatattcaagcaatatcattgcattctgggaggatggccgaaaatgtttgattgacaaggctcaaaagcaagtaaagtatgactatttatttgaagcggcgggccccggttgtacttatgtgttgactaatgagttgtgcaatagctttaaaaagttttatttaatgcattcagatgaagtgggaaaagtcacgcttcatgattggatgatttatgcttatgcaagaaatcgtggtttcaaatggattatagataaacaaccatctatgctatatcggcaacacgcgaacaaccaagttggtgctaataatagtatccgaagtgctgctaaacggtcaaagaaagtttttgaccgatggtatgccggagagatcataaaaataatagttttattagaaatggataagagctctattgggaagcatcttataaatggtggtttttttgataatgtaattcttgcttttcaagtgaacaaactccgcagacgtttccgtgatagatttgctctttttattttttgccttgctggcttgattagaatgtga

SEQ ID NO: 171302 - DNA, 948 bp, Enterobacter cloacae
atgggcgtttcacgtgatacattttatcgttaccgcgaactggccgatgaaggcggcgtggatgcgctgataaaccggagtcgccgcacaccaaaccttaagaaccgcaccgatgaggccactgagcgggctgtggttgattatgctgtcgcattcccggctcacggccagcaccggaccagtaacaagctgcgtaaacagggtgtttttatctccggcagtggtgttcgttccgtctggttacgccataaccttgagaacttcaaaaaacgcctgaaagcactggaagaaaaagtgacccgtgatggtattgaactgactgacagccagatcgccgcgctggagcgtaaagccggtgacgacgaggcctgtggtgaaattgaaaccgctcatccgggttatctggggtcaaaggacacgtactacgttggcaatctgataggtgtcgggcgtatttatcagcaaacgttcgttgatacgtactcaagggtggctcactgcaagctctacgtcaccaaaacgccgattacagcagctgatttactaaaagatcgtgtactgccattttatgagtctcagggcctgccgatgctgagaatactgaccgacagaggtaaagaatattgtggcaaagtggaacatcatgattatcagctttatctggcgataaatgacatcgaacacacgaaaactaaggcgatgtcaccacagactaacggcatctgtgagcggttccataaaacgatactgaacgagttttatcaggtgacgttccgcaaaaagctatatggtgatcttgatacattacaattggatcttgatgaatggctggctcactataataatgagcgaactcatcagggaaaaatgtgctgtggccggacgccgatggaaacattacttgatggaaagtgcatctgggctgagaaaaatttaaaccagatgtaa

SEQ ID NO: 171303 - DNA, 555 bp, Enterobacter cloacae
atgtctattccagtaattcaccagacagatcttatcgtgggtcgctctgttaaacttcgaaatgttaaaaccgatgatgcagctttcattgtcgcgctgagaacgaatgagaaaaaagggcgatttataagcaccacctctgatgatattaaatctcaagaaaaatggatagaaggttatctgaaaagcgagggccaagcctacttcatcattaccgaccttgaagatatgccttttggaacggtaagaatttatgatcagcagcaagattctttctgctggggatcatgggtcattcatgaagatgcaccttcacactttgcaattgagtcggcacttctagtttattactacgctttgaaattagggtttaccagtgcccacttcgacgtacgtaaaggtaatcattctgtcatcagattccatgagcgtttcggtgctgttcgtcaaaaagaaactgaggatgatgttcttttcactatttcgaaagacagcattcagcactcaatgaacaaatttaaaaaatatcttcctgagctcattttaatcaaataa

SEQ ID NO: 171304 - DNA, 303 bp, Enterobacter cloacae
atgccgaagccaaacacgatcgcaggcggcgggaacagcaagacatcaccgaataacaatctgaagggacagactaacatcgcgcgcaatggcgaggcgaaatcggacaacttcggccaggtccgtttcttcctggatctggctcagaaatcgctattcgaatatatcaacaatctgaaatacatcattgagctgatggtattcggtattggtaaatacgacgtaacgtcattgcgcttctctgagtctaatcttggttctatggccggtgccagcgacaccatttccagcccggagaagtaa

SEQ ID NO: 171305 - DNA, 243 bp, Enterobacter cloacae
gtgaaagatggctatcagttcgacgatgtcgacggacaggaagtacctgggctgaacgagagcagcgatttcccgattgaaatggcgacggcatccactgtcatcagtggcgcttatactggcgggcagattgggataaaaatcttcaaacaggctggtttcgacttcttcactgagctgactttcccgcacccggtcacgttcactatcaacgtgacttatccgaatgtcggagacgtttaa

SEQ ID NO: 171306 - DNA, 276 bp, Enterobacter cloacae
atgtcggagacgtttaaccggactgacaaactcaccgcggtgggcgggtttgggcgatactcgattaccttccagagaacagataatagcagcgacgcgagcaagctgcaggttgaggagactcatacgataaacgtcaggacgaacattgttcacgctgaatatttgctggtgatggtgaaggtccgggcaaccgagaacgccacaagctggcgtgacaggaagtgcaacgctctgatcacccgccacgtcatcagctacaacatgacgatgtaa

SEQ ID NO: 171307 - DNA, 360 bp, Enterobacter cloacae
gtgttatttaactggttggtcgtcaggcagcagtcggagtcgagcattgatatttacggcctgtgccagatccaggctgaaattgacgctatcgatccgcgcctcgggtattttgattatacctttgacgatgaggatgtgccgctaggatcgcgtatggagaccatctgtgacgccgacagcgtctcggtttatgacaataacggcgtgctgtctttcacctgggacggcaaaaagacgtctgcggccacgatatttaaccgctcaaataccaaacctgattgttactcgctttcttacgatattactaaccgaaggttgtatctaatagtggggaccggtcagcagtgtgcactatga

SEQ ID NO: 171308 - DNA, 333 bp, Enterobacter cloacae
atgatacaggaaagtagatgtaacgcaatattctatgacctcaggttgttttcacagtgcaagaattatgaatgcgatcaattcatcgtatctgatcccatatcgattgcctgttttccaggtagggttaaggacaaactcaagttcatcaaccacttccacttcttcatcccatttgtcatagcaaaccgtaccgtagtcgaacgcatcaaaaccattaactgtaaacgcttcaataacttattgtgcaataacgccaaaatgaatccttgcaccatcgcttttagtatcaaccgaatcagtaaatctaaaggccttgatcatgtttgttaa

SEQ ID NO: 171309 - DNA, 1158 bp, Enterobacter cloacae
atgatattatcaattcattatttgagagggatagccgcgttactggttgttctctttcattatagggatagattaaataatgtatacgcccaaaaagatttgggtgatttattatttggtggtggacttgctggcgtggatttgttttttcttataagcggcttcataatagtatattcaacaaaaaagaaagagattaataatgttttgttcttttttgtaagaagagtctttaggatatatccattgctcattgtttcatgcgtgttttattatctggtaatcacggaaatgatgaaatattcaacgggtgaagggttggctaaattgtttgtttcaatgattcccttcaatttaaattggtctggagaggctccttattttggatataacttattataccctgcttggacgattacttatgaaatagcgttctatattgtatttggactgtcgataagtattagtcatagatataggacgattgtctcttcgacattcttaatcgctcttgtatgtttgtcacagtattattcgcgcggtgaattaagcatgagtggttctgtttctgctggtttgctcgagcataatacgcttttgggatatattaatgtcttcacctctccaatgatgtttgaattcgtcgttggtatgatgattggtgaattatatattaaagcaatacggattgaagcaatatcacaacatattaagaatatctcaaccatatgccttttgcttgctttgtctatgtgcttcattatgtttttctctaaggttccatatggacatgggttgtttggttttggcgtcttctcttttgtcataataacgtcatttcttttttatgaaagaacaaatgatatatctagaaacaaagtgctatcatttttgggagatatttcatattcattgtacatgtgccatgcgattatactggcagcatatctgtatctatatactcgcatgggttttttacaatatataaatggattttctcttgtggtcatgctgtgtagtgtttcattggtaactgcgttcttaatgcatatatatatagaattaccatgcataaactatggcaaaagaatactggtcagatacgcatctgaaaaggaaacgagctcagagaaagtttccatattaaataaaatttaa

SEQ ID NO: 171310 - DNA, 1605 bp, Enterobacter cloacae
atgtcactcagatttgtagtgttaagcaaaaacgaccagtttccccaaagtggaaaagatgtaatctttcttaaggaaagtaactgggatgattttgggtataaaacaattttccatattatgttttatgatgaacattctgctcgacatgacttcggcaatgcaaagattggctatttatctcagtcagagggctggacttcacaaaagctagaacgtaaatttgataaattcgaagaaaatttcttttcattaggtcaggatgcagactattatcaaaaaatcatgaatgatttaagtgagcaaacatcttcaaaatacttaaaagcaatgcgtgacattgtttatgataaagaactctttacgttagtggaatctgatgctcagtctttgagtgatagtaataaatcgtctgtttatatagtttccatgctcagagacttaagtgcttctgtcattcgaaatcaattttccagaattttacaaaatggtattccccttacgccatattcgttccttttcaagagaaacaaaactgaaaagcattctaaagtagaacttcattttgaagttgatccggatcttaaaccttcaactaatattcatattctcataggcagaaatggcgttgggaaaactacgatattaaacgatatggttaaggctatagtcagagaggaacatgatatctcgactgatggtttttttcaaaaattaagatttaatcttaatatgcctattgattcagattattttacagcagttgtttcagtatcatttagcgcctttgacccatttataccacccgatgcaagaatcgaaccatcgaaagggccacgatataactatgtgggtctcaaaagaataatcacaaataatggaaggaatgaaatacttataaaatctactgaagatcttcatcaggaaatgattggcagccttaaaaattgcatgtcactaagtggaaaaagagagcgctggattaatgcactgaatcagttagatgctgataataatttttcagacatcagcttaagtgatattgaatccgattttgattctgatgaaacagaggataaaagtgtttttgaagaaaaggtatcacctatattcaagagtttgagttcaggacatgcaatagtgctgttaaccctgacaaggcttgttgagcttgttgaagagaaaactcttgtcctgattgatgaacctgaaagccatttacatcctcctttgctttccgctttcacacgagcattatcagatttattattgaatcgtaatggcgttgctatactggcaactcattctcctgtggtattacaggaggctcctaagagttgtgtatcggtcattagaagaacacgaatgtcatgtgtggtggataagccattgattgagacttttggagagaacgtgggggttctgactcgggaggtctttggacttgaagtatcaagctctggtttttatgatgttcttgcggcagaagctaaaagcgggcttaattacgatgatataataaaattatatggcgatcagatagggtttgaaggaaaggcgatccttcgagctatattgtctaataaaaaaaatacttttaattga

SEQ ID NO: 171311 - DNA, 867 bp, Enterobacter cloacae
atgaaatcggtagatctaccttcaattacatataatgatttgattagcagttgtattggcagtattgactcggaagagttacgcaatcgtcttgaaactgcgttagctcatctactcagggcgggagttgcgtatgacctggctgcaactcatgcaaatctctttcagacggcttgcttcacaggcaatgatgatgatgtcgtggtcgagtctgttacaaaaaaagaactcaaaaatctatatactgcacagatggttcccgcaaacaagcccagcagaatctattacgatgatataaaactattggcaccccttggtatttgccctttctgcggatttggccatgtaaaaactttggatcactatcttccaaaatcaaagtttccgctactatcaatattcccttcaaatctagtgccatgttgcaccgactgtaacaaaggcaaacttgcaaatgtcgccgtagctcagggagaacagtgcttacatccctatttcagtgatcctattttcattaatgagcagtggatttttgccactgtcgttcattcttctccggcagttgttacctttcatgtacagcggccacctttgtggagcgatataaatttcggtagggtaatttatcatttcagagaatatgatcttgcaaaccgattttcagtgcaggcaggaagtgaactggcatccctcaggaaagagcttttgatagattttagaacaggaggagtaaatgaagtgcaaagaacgttaataaaaaaggaagcagcctcaagaagtttagaggttaactcttggaaaacagcaatgtaccaggcgttgtctgccgatccatggtttttccaaggggggtttatgcaggaataa

SEQ ID NO: 171312 - DNA, 1113 bp, Enterobacter cloacae
atgggtgagccgtattttaaattcaaagaaaagccatatccgtcaaaagtttacgtctttagctcgaactatgcgctgtatgccgatctcagcagtcgggtcatgcagacgctgaccgatctcgccccggcaatagagatttactccatcgatgaagcgttcgtgaacgtttcaggggtcagccactgcctgtcgctggaagcgttcggtcaccagatgcgcacagaggtctttaaaaatacgggcctaaccgttggcgtcggtattgccccgaccaaaacccttgcaaagctggccaactatgcggcgaaacgctgggccagcacgggcggcgtggtcgatctctcaggccgcgagcggcagcgtaagctgctggaaaaggttccggtagaggaggtgtggggcgtagggcggcgcatcacgaaaaagctcaacgctatgggcattaccacggcgctggagctggcggaagcgtcgtcctgggtcatccgcaaacatttcaacgtggtactggagcggacggcccgcgagctgcgcggtgagccctgtcttgatctggaggagttcacccccaccaagcagcaaatcatctgtagccgttcgtttggacaccgtattacccaatatgaagagatgcaccaggccatttgcgcctacgcggaacgcgctgcggaaaaactgcgcggcgagcatcaatactgttgttttatcagcgtgtttgtgcgcaccagcccgcacgcggataacgaaatttattacggcaatcaggcttccgtcaccctgatgacgcctaccaatgactcacgggatatcatccgcgccgccacggaggcgctggggcgtatatggctcgacggctatcgctatatgaaagccggggtcatgcttgcggactttttcagcagcggcgtcgcccagcttaacttgtttgacgataatcgcctgcgcgccaacagcgcggcgctgatggaaacgatcgacagcctgaatcattccggcaaagggaagatatggtttgccgggcagggtattgagaaatcctgggcgatgaagcgtgagatgctgtcaccggcctatacgacgcggtacgccgatttgccggtggcgaagtag

SEQ ID NO: 171313 - DNA, 2688 bp, Enterobacter cloacae
atggcagacgcaatgaaacagtctaattgttttaaacttaaaaccaatccagttaatatttttgtactgggtgttctctattcgacaggacttttttcgacgcaggccgtaggtagtacaacggatattaccggacaaactatcaccgacggagtgttagttgataattctgacgatattgttaatattaatggtggtagcaagataagtaatgctgcagatcaaactagtgtaaagattaaccttgcttcatcggaccctacgaaaggcgcaacactgaatgtcagcggtgcgggaaccactatttctggcgggaatgtaggtatagatataaacacctctaaaggaagtgtggttaacgttacggataacgccgaggttagtggttcgctatatggtatttacggccggaatgatatcaatggtcaggctattgacgcaaaattaaatatcgatcatgcgactgttacgggtggatctgcggcagtatttttctgggaaagctcgtccatcgataacgcgactagtgttgatatttctaactccacattgatcgctaatggcgggagcgcggatgacaatggtctgagaatgactctaggatccgatactgtccatataaataacagtaagattatatcggatggtcgtggcgtctattctaatggtagtttcgccggtagtatcaatatagtggactcaacgataaatgctgttgccagtggtcttcgattacgacaagtcctcggatgcagttacgatgtgtctaacacgattataacgtccgacgatacaggcctttattatgatgacggtaacaaaaatagcaccgtaacgttgtcgaaaggcacaacactaaacggcgagaaatatgggatctacactgttgacgtcagtgacaatgaaaataataccatcattgtcgatgattccactgtgcattccgctgaaggcaatggtgtttcactaggtggcggttttacgctgaatgtgaataatcattctcttgtcgatggcgataatgccattgttctcaatggcgataccgctggcagcaccgtaaacgtgaaagattccaccgtcaccggcaaaaccaatctgctgcagttctccggcaccagcgcggtggatacggtcgatttcaccggctctaccctgtccggcgccatcaccacctcttcaggtgctgaccagtcggtgaacatcgacagctcagcctggaccggcagcgccgggaaaaccggtaccggcgcgctggcgctgaatatcagcaacggctcaacctggatcaacaacgcggccacggatgtcgatgccatcagcctgaccggtggcagcaccatcgtgatggacggcgggaatatccacaccgcaagcctgtccgacagcgcaccgaccacgctgctggcggcggccagcccgacggcatccaccatttactccacgtataacgcggaaaccggttcagccttcgtgctcacggccgacaaggctaccggcagctttaatgccggcgtcacctccagctccagcggtgcggcgggcgatatgaccggcaacaccattgttcaggtgacggacggttccggtgcgaccttcaactccatgcagagcgatgtcggggtttaccgttacgaatcacgcagcgtggctaacgcagacgggtcaaccagcgtgatccttgataacattacgccagaaccgacgccagacccggcccctggcccgaatccgaacccgaacccggattcacgcacgctctcaaccgccgcgcaggctgtagtgaatacccgtgcggcagcgatgagcatctggagcgacgagcaggatgtgctgaaccgccgtctggataacgagcgcctcaccggcagcagcgacggcacggtgaacgcctggggcagctactacggcggctaccaccgtcagcaggtcgagcagaccagttctgcctacgatcagaccaacaacggctttatgttaggtgctgacaagcgtgtcgatatcgcgccgggcaacctgctgttcggttttgccgccacccgcgggtattcggatgtgaacatgcatgacggcggcagtgcaggtactgatgtcgacagctacggcgcctcactgtatacctcactgcgcctgaacaacggtctgttctttgatgccagcatcaagggcacgcacctgaaaaacgacatcagcgtgacgtctctggacggcggtcataccaccggcgactataacaacaatggcttcggcggagctttcaaaacgggctaccacaagcagtttaatgcctggtatatcgaaccttatgcccagatttcttatgcccgctataacagcgtcgactacaagctgaaaaatggcctgcacacgaaagatgacggcagcacgtcactgggtctggaaggcggtgtgaatgtcggtacggcgatggcgctgaacaatggcaccgaggtccgtccgtatgtgcatctggccgttgcgggtgaaaccgagaacagcaacaccatggacatcaacggcgaaaaaatcaacgacagcaccgacggttcacgcggcatcgttggcctgggcgcggatgtgaagctcagcaaaaacctgagcggatgggccggggcgaactatgccaaaggtcaggatcactacgagtctccatggcagctgaatgccggtgtcagctacacctggtaa

SEQ ID NO: 171314 - DNA, 264 bp, Enterobacter cloacae
atgacgggcgacgggcaatctcgccaggaaaaagagggcggccagcgccctgctgttctcctcaaaacagggatcgcgcttatcgcgcagctcagccataaaccgcgccagctcttttccgctatcgctcccgtatcgggcgcgcagttcagcgatgtggttaagcccgctaaggcgagctcccacgctaagtggaacccttgcacgggcagcttctatcgccatatctccccacgcgtaaactcacgcacgctagtgcgctga

SEQ ID NO: 171315 - DNA, 162 bp, Enterobacter cloacae
atgtcagataccaaagcttcaccaaccgatgaagaccagccatcaaccgaaacaacacaggtaaggttttgccctatctgcggaacgcaaatgtatcaaggcatgcgctacggattcatgtgttggatttgccctgagtgtgacttcgatgagccggtgtga

SEQ ID NO: 171316 - DNA, 822 bp, Enterobacter cloacae
atggcacttcaacttttggctgctaacaatgctcaaagcgttctggcagctggcattagcgcctcagcaacatcgttgacactgaatactgggacgggtgctcttttcccctctccggtatctggaacaagcttttttaagttgacgctggttgatgctgcgacaggtcagctcagtgagattgtccacgtaacagcaaagtcaggtgatgtgcttacgatcgctcgcggccaggagggaacctccgctcgagcatggtcagctaacgacattgctgcaaatatgcttactgcaggaacaatcctgttacttgctcaactggatagcccatcatttacaggcacaccaactggacctacagccgccccagggacaaatacaacccagtttgctacaacggcatttattcaggcggcgttagcagcgttaagtcttggtacggcttcaactaaaaacgttggcacaggaagtggacaaatacctgacatgtccagctttgtatcatctaagacatccacaacaatagtcttgaatctccctggtggttacaagcttatgtgtggccagcaattagcacctacagatgcgcaaggcaacgtgttcctgacgctcccggacacattccccactggatttatatatgcggaagcccatcaaagcaaaacatcatacgcaggagacatcgacccatacatcttttcatcttatccatccaccacggctcctgttagtcaggctagctttgcagttcgcaacaccaaatcaggtatagctcttgcgaacagttctattgtatgtatgtattttgtatgggggtattaa

SEQ ID NO: 171317 - DNA, 249 bp, Enterobacter cloacae
atgaaaagctttacagtttctatcctgaagatacttttatcttcagtcagcacattaacaattatgctttctggatttttgatgttccttattttcgatatgtgggtacatgaaggtgttccaccattcgaaaatttaaaattcagtgttgctttgttttttacaataatcttattacttggtatatgtcagtgtcttaaatactacacctacatagcaatagattctcgaaataattctagccaataa

SEQ ID NO: 171318 - DNA, 429 bp, Enterobacter cloacae
atgagcacaaacctggccgcatttatcatattcattcgtactgacgtgggtgtgactgtcgaccaggttccatatgactcgccgtcattcgcccttgcatataacgcagctgttgaatgggtaaacccggacatcgcctgcgtcatgccgaacatgtacaccgttgccgtgtacaacctgggcgcgtctttcctggtcaactatggcacggaatcggtattcgccgagttcaggaaaaagtatggcctgaacgatttcaaggctggcgtaattactggagccggggataactcaaccagtgctcagcgcctggtaccggacttcttcaaagacctgtcactggctgacctgcagatgctgcaggacccatggggccgacggtacctgatgattgcccagcagttcggcagcctgtgggggctgtcatga

SEQ ID NO: 171319 - DNA, 1272 bp, Enterobacter cloacae
atgccgaatgaatacaccattgagtttttgcctttccatgaagggcaaaagaagattcatcggtcaaaggctaagaggaaggtaattcgcgctggccgacgttttggtaaaacaaccatgctggagcaagctggcgggaactgggcagcaaagcagatgcgggtaggctggttcgcgccgtcgtacaaaatcctgctgccgtcctttaaggctatccgtgaccttttaaaaccaatcactaccagctccagcaagacagactcaattattgagactatcggcggcggccttgtggagttctggaccctcgataacccagacgcagggcgttcccgcaaatatcacaaagttatcattgacgagggaagtctcgttaaaaaaggtatgcgtgatatctgggaacaggcgatagagccaacgctacttgactatgacggtgacgctgtcatggctggcacgccaaagggtgtggatgatgagaactttttctatcaggcctgtaacgataaggatatgggctgggaggaacatcatgcaccaacggcggccaacccaacgattaaccctgaggcgctggcgagaatcatcgaaggccgccctccgatggttgtccagcaggaatacaacgccgagttcgtagactggcgcgggcaaaacttcttcaagctcgactggcttctggagaatggcgagccagttgattatccatattcatgcgacacggtttatggggttgtcgactgtgcgcaaaaaggacaactgcataacgatggatcggcgtgcatttggtttgccctgatcaacgtaccaacgccccacctcgtgatactcgactgggacatcatccagatagatggatatttcctgaaagatatagttcctcagtggatcggcaaagcaagacagctaagcgaaatatgccttgcgagaatgggatgcaccggtttgtttatcgaagataaggcaactggcatcacgttacttcaacagggttccaatgagggatggaacgttcacccgattgatggggatttaacgtcccttcctaaagagtcacgagccatcaatatctctggttatgttgcatcggggaaggttcgaatttccaagtatgcatttgaaaaaataaccgaatacaaacagtcaaagaaaaatcacctgttattccaggtcctgaaattcatcattggtgaagaggaccaggatgatgatcttttcgactgtttcaactatggcgttgctatcgggctcggtaacggcgacggattctga

SEQ ID NO: 171320 - DNA, 186 bp, Enterobacter cloacae
gtggaaaaagaacaaagcaatgcaccgcgttatgaccaggccagttttgaagcagcagcaaagccgctgatccaatggctgaacgaaaacgccaatcctcacgcatcggtcatcgttgattgcaccagtgcagtgctctttaccggggaaattgcagtcaacacgaaagagttcctgaaagactga

SEQ ID NO: 171321 - DNA, 492 bp, Enterobacter cloacae
atgtccccagcactgcgaaacagcgttctcggtgccgggagtgcaattgccgtcgccgccgcgctcattaccgggccaaccggtaatgatggccttgagggtgtgagatacaaaccctaccaggatgtgatcggcgtctggactgtctgttacggtcacaccggcagcgacgtaaaaatcgggaagaagtacaccgaatctgagtgccgtgcgctactcaataaagatctgaacaccgtcgcccaccagattgacccgtacatcctgaagccgatcccggaaactatgcgcggcgcgctttactcgttcacgtataacgtcggcgccgggagttttcgctcatccaccatgctgaagaaaatcaaccagggcgatcagaaaggcgcatgcgatgagctgaggcgctggacatatgccggtggtaagcagtggaaaggcctggtaacccgtcgtgagattgagcgagaagtatgcttgtggggccagaaatga

SEQ ID NO: 171322 - DNA, 216 bp, Enterobacter cloacae
atgtatcgaatggacaaactaacgactggtatctcctatggcgcgtcaggaggtagcgcgttgttctggttcaagaggcttcttgatggatacacgccggaacagtgggctgcgattggcgtcatgggtagcttgatgtttggcctcctgacattcctgacgaacctgtacttcaaaattaaagaagatcggcgtaaggccgcgcgaggtgaataa

SEQ ID NO: 171323 - DNA, 690 bp, Enterobacter cloacae
atgagtactattaccagagaattcaccaaagagcagttaatcacccaggcacaagagaacgttgcgcagtggcacgatgcgatgcagcacaacgtcaataccgaatacgcagcaatccgtctgcgtcttgctgaaatcgcgctggcatcgctcgaagcggagcctgccattcaccggtggcgtcgtgtgacctctgagccatacggcccatatccttggcattatggtgattttatcggcttctcaaaccccgttgatgaccttgaggacgagtatttttattccgccccgccagctccggtatctgtgcctgatgaagtgctgaaaaggctcttgcctgatgctgagaaggcagagttctggtttgagcatgatgggaaaattttgttcgagggtgtgaagtttaacaatgcggtatttgaagcctgccgcgccgccatgcttcagggtgccgaacctgtaagtaatcgtgatgagttgaaagatggttgggtggcttgcagtgagcggatgcccgaggaaactggtgacatcattgtggtttctgatggcattgtaatgtccggaatttcttattcccgtaagaaagggttctatctgcaagcattggagtatgacgcagatgagacagttgacgatgtcacccactggatgccactgccagcagcacctcagcaggaggcagaatga

SEQ ID NO: 171324 - DNA, 330 bp, Enterobacter cloacae
atgccgccggtgtttatatgtggcgaatgggtagccgaaaagttaaagggcttgtcgttattgcccgagctaaatttcgccttcgtggcgctggttacgaagatgttctttctcctgaatttgaccgttgggacggatattcggttgttgtgccaggcgaacttcaatgggctgaagatgatggatcgctgccggacatttctttcgaaaatctccctgacgcaacagagtgtccattttgcaagcgacagccagcaattaaagcgttcgaatgggatcgcggttgcaggattggtccagagccatacatcctcaatcagttccaattga

SEQ ID NO: 171325 - DNA, 345 bp, Enterobacter cloacae
atgagtaagttaattatttccatgctgaatacgttactgtgtgtttttgtgattgcactgtgcctcatttgcttaggtatctctgataactggaaagaatgcactctagctataatcattattttaggaggcacacaccttacttgtgttttactgaatcgtgtattgcctcataagttatctatcttagaagaaatactggaagtattgggtggaccactattagttataggcgcaattgtgtgctttgatgtattcgaaccctggccgctaaaaatcattgggatgtttgcgtggattattttgattttctttgtaccttcaataataaatcccaagcgttaa

SEQ ID NO: 171326 - DNA, 1557 bp, Enterobacter cloacae
atgataaaaacggtatattgttacgctcgtgttagttcgagaggtcaggctaaagatggctttgggatgtctcgccagcaaaagatgctgaatgattacgtgtcatcatatgatgattctctacatgatcgaggatacgaattaggagcagttaactggttgttcgcagaggggatctcggcctatagcggtaagaacatcgaagatggttcagtgctgaaatcattcattgatgatgtattggatcgtaagattatcaattcggttttagtcattgagaaccttgatcgatttagtcgagcagaaccaattaaagccgctaatctattccttaatttgatcactgccggatgtgatatccatgaagtcgaaactgaaacaatacatcattccagtagtgacctcagtatcattacgggcgggttacaacgtgctcataacgagagtaaacgcaaagcccgattgagtatcaaaaattgggatgaacgaatcaaaaacgcaatcgatggtaaagcagtactgactaatcgagttccatcatggttggaagtaaaagacaatggatatgtaatcaaagaaggggagaaggaaaagtataatcttatattccagatgtatgctgacggtttcggtccggcagcaatacgcgatgtattaaaagaaaaaaatatgttaatcaatgatagtgaaccaacgattgctcacataaacaagataataaaagatgagagattgattgggaaattcaattcaactggtaggaaaaagctaagtggtcttgttatctatccagtagttgtagatttatcactattccacatcgttgaccaactacggaaacagaggaatcccgttggtaaaattcatcgcaaggcaaataatttatttgctggattatgtatatgcatggaatgtgggagatatgttcaggttaacagtgttgagcctaatggtgaatcttattttcgttgtggtggcagtctcgttaagattgatagatgtcaggaacgtggattcaaatacaagttttttgaaaatgcattattgcaatacatcaggaattttgatttttcatcattgaatgcgaatgaatctgatattcagattagagtaaatcatctttcaatggagttgttaacacatataaagtacaaagatgagatcttacaagatatcgagaaagaggatatacccgatcctaatgataggagaattttgaaaaatttacagaagaaaattggagaaatcgaatctgaaatatcgaatctaaaacgtttgaatgtgaatgtaagtacattcgatgagttgaaaaaatattcagaggagttacgcgatccgatgaatgtagatataagacttgattttaacatcaagattaaacgtgtaattaaaagcattgttataaaacgctatagcgattctatatttttagttgttaattacatagcaattaacgaaaaacaagcgatcgtaattaatagtaaaaatggtgaagtactgtacatgggtgttcagaatgatgacttaaaaatagtcgagcatataattggaagttaa

SEQ ID NO: 171327 - DNA, 1776 bp, Enterobacter cloacae
atgcagtttataatcgggtatgtcacagctgtaagaggaacctccgtccgtgcaatcgtacatccaaacctgtatcagactacatatatatatgatggaagattataccgtggtgttgctataaatgaatttatagtcataaaaaaagggtatcacgatattatcggaaaaattgagggtgaagaaatcatcgaaaagaaaaactttgacaacacacaacccaacaatgaaaagtttgatagatttgtagatattaaaatcatcggttatatttcaggaaataaatttcactcgggtataaaatacctaccaatgattcaggatgaattacacctcatatctgacgaaattatatccacaatatattctttcgaaggcaagatagatgctaaaaaaatattaattggcaaatcactcttagaagaaatacctattcacatcccaataaacggcatattcaattcacacatcggaatatttggaaatacaggaagtggtaaatccaattctttagcaaaaatatatagtgagcttttctcttgtgtgggagataaattattcaataaatccacctttgtatttattgacttcaacggtgaatataaacccattcacaatcagttcaaagacaagagtaattatattgaacttgacactcatttaaagaatggaaatcaaaagttaaaaatcaaaaaatcagagtattgggacccagaattactttcagtcctattttctgccacagaaaaaactcaaaaaccatttctaaatatacttgttagaaacagactcaagtatggcgatgaactcaatgattattttcatgacaccataaaaataatgtttggtcaaaatcaacaccgagaaacaattagtgtacttcgttcaataattaacattatcaatcctgaaaaatctaaagaaataaactctgaattatctgagttcagttggttctcaagaggggaaaacaacaaatattatagaaatggtacatttctcaacactccagatgaatatcttgctcacctacctactcttgcaagtaccaatatcgacatcacaacattatcgccttttcagcaaataactgttagggcaacccttcaattaataaaatccgtatctaggaactatgtacaatatgagcatataagcccattaattagcaaaataaactcctcaagcagttcacttgaaaaagtgattgaaataattgatgatattgagcttgaaaccaaaccattattatttatatcattaaagaattgtaaccaagaaacgaaaaaatcgattccaatgttgattgcaaaatgttcttttttggaacataagaaaaaagacacatcgcaaaacagctttcacctgattgttgatgaggctcataacatattatcggagatatctaatagagaatccgagacctggaaagattaccgattagaactgtttgaagaaataataaaggaaggccggaaatttgcttattttgtcacgattgcaagccagagaccagcagacatatcaacaacaataatatctcaaatacataattattttctccaccgcttagttaacgaaaatgatttattcttactcaaaaactctataagcaatcttgatagttcttcgcgcggcttagttcctatactgccatctggtgcctgtgtagtatcgggcacagcatttcatactccgatgatcatacaaatccagcgtctaccttcagaattagcacctgaaagcgatactattgatctggactcattttggtaa

SEQ ID NO: 171328 - DNA, 1158 bp, Enterobacter cloacae
atggcaaacgaactatttaaagcattcaaagcatcagagttacatgataagaacattaatttccttatcggctcaggtgcttcagcttcgtatataccaacgctaaagattaatgatgatttaacttacgaggatctacttacagataataactactctgacataaacaacttcatttactatcaatattataaaaatattttaaaaaagagtttctgtttcctgccaaaagctgatgataccagatcgcgtaaaagtcgcagaaaaacattaaatgcgtacatacaattaatagatagcattgtgcatttaattaataggaaaggggcaaaccagatacgcagagccaacattttcactacaaactatgatttatttttcgaaaatgcttcagataggttgcttcgtgattctacaaattttatttttaacgatggtgctagaggccttaaaaaacgtcaccttcaaatcagtaattttcatacatcaacttggcatcaaggtacaaatgacctttataaattcgagatcccaacaataaacctcattaaaatgcatggttctgtttcatggaataaatatagcgaagaaagaattgaagtaaattaccccaatcatttcccagaagatttagaaattgatttagatattccagacatacaaaccgctgtacaattagtagaagatttttcatttatcgaaaccgccaaagaaagtctcaatcttgctgagaaagatgaattagcgttagaagaattcaggaaagaatacaataaacttgctatcgtaaacccaactaaagcaaaatttgaagaaactgttttccaacagcattattaccaatcattaagactcttgagttatgaacttgagaagcctcaaactgttttaatatgttttggtttttctttcaaagatgagcacattcgagaaattatttctcgttctttgagtaacccctcgttaatagtttacatattctgctataaaaacaatgacaagaccgcaataaaagaattaataaacaataaaaagattgtttttatttatccagaaaacgatgacgaaaataatgtgattgatctagaaagattcatagattgtattttttcccttagcggaaccgactcaatggagggattaacatgcagtttataa

SEQ ID NO: 171329 - DNA, 540 bp, Enterobacter cloacae
atgcttaagattcggttcgattcagaaaaggctttagaggccattctgtatgtagcctctaaagcacccgtacctgacatttaccatgtcgggaaaatcctttactacgctgaccgcgctcacctggagcgttatggtcgtctcattaccggcgatgagtacaaggctatgaaagatggcccagtcgcagaaaacacctatgacatcatcaaaattgcccaaggtaagggacgcttcattccaaatggaatcgaagttgaagacataaagtcagcgcttcgggtttatgagaaatcgcataactaccgtgtagagcctttgcgccctgttgatgatgatgttttcagtgattctgatcttaaatgtattgacgaggcaatcgagatgattggcaagctatcatttggtcagattcgtgaaatgagtcacgatgaagtttggtcttcggcaaacgaaaatggtgaaatccctctggaagttatcgccggaagctgtaaagatgctgacttactgatttcccatcttttcagcggaagatag

SEQ ID NO: 171330 - DNA, 468 bp, Enterobacter cloacae
atgcctaatttaggggacattttcccttcaaattttgcccaaacttttgcgtcacatcatcaactttctgttggtgatgtgatttatctcttctgcgattttacaactccagagaagcataaatacatggtggtttgctgctgcgaaccccttctcgttttgcttataaattcagatattagcgagtacatccttgctcgcccccatttgcttcagtgccaggttgatttgcttgaagcagatcatcccttccttgaatgggattcgttcgtaaattgtatagaagcccatcaagcgtttgatctggaagtagtcaaggagcagataacttcgaactatacgcagacatataaaggacgtgttgctggctattgtctgcgctcaatttatgaagctgttgagctatcggaaacgatgctccgtagacacaaacgattgattcttgagtcgatgcagcaatatgtttaa

SEQ ID NO: 171331 - DNA, 444 bp, Enterobacter cloacae
atgtcacagaaccacaaagtcatgccaggtgtaattctttttgcattgccatactttcctgttattgcagcttattttgcattcagatacttggttcctggcgtttccttctctgagcatagagacgcgcttggagcagcgatagcctcatatgcaggcacaacgatcgcaattctgatcgctgcgttaacgtttgtgataggtattggtggcagaaacatgcataaggtaaagtcttatggatacatgacaactgtcatcatcatgtacgctcttacgtttgctgagttagggattgttttcttcatggggctttttctcatggctaccagcaaagaaccgattaattttctcccgactctgtctattggattcgctgctacttcattgatgcacattagtttgcttttagtacaactgttcaacttctccaagaaaaagtag

SEQ ID NO: 171332 - DNA, 834 bp, Enterobacter cloacae
atgaaaatgagtttttatgctatttattatagcaatggaaaagataactcaccatgtaacctttttgaatccctttcttcacaggtcgtcgaaaagaaaggtaacgcccttgaagttgacgattatttcgttttcgcccatcacattgttgacaaaagcttcttgctaacaaagacatatgattctgcctttgttaaaagggtaaataagaaaacattttctatcgatgaaatgaagaatgctttgggtaatgatgaaacccttgctttcccttcctttcttttagtgaaagacaacatcattggttatgcatcatctcaacacggccccagaacaagagatctgcagatttatctttccaataaattggatattccgatgggcttcaaactttgtattgaacctctgatgcgtgatgttagtaaagatgatgctttagaaatgcagttcatcggcagaaccacgcttagggtggaaagcgggtctaagctgttcagccctttgcttagagcaacaggtattgaaactattgacgaagaacttttagatggtattgagatcacgctaaagccgaagagagcaagaaacattcgagacatggcgaaggaactcattaaaaacgccgatgacagccatagcgatatactcatcaaaggtaaagagcaggcagccgatcttcttacggaatactacctgtctaataaagggcatctggcagctaatctatataaatcgacaaacgaagatatcgcagaagagatggaaacatgcttcataagaatgaagtctgttataatgaaaagctataacgatgcgtttgatagtgcgttttaa

SEQ ID NO: 171333 - DNA, 540 bp, Enterobacter cloacae
gtggaattgaatttgaaatgcttttttgtcgtgactctgacgctgctgggggggattttttgtgttccctttgcatcgacagcagattcgacgttaacgatagcgggcaatattattgccagtggttgtactgttcgatatccgaccccgacggtgatgattggtgtattttctgggaaagattttcctacggtaggaagcaccacagcattcaaagctatgaatattgatttaaaagattgctattcaaaattaaaaaatgttcaagtgagtttttcaggtgttacggataaagataatcctgctttgttggcgataaccgatattgggaaagacaaggtgttagcgacgggggtgggagttgaattgctcgataataattttaaaacattgccatttaatagcgaaaagccattggtatatgagctcgacggggaagaaaatacgctatcatttctaatgcgttacaagtcgacaaaagcacaggtgacgccaggagatgcctctgctgtgatgtattttgatttaatatatcagtga

SEQ ID NO: 171334 - DNA, 528 bp, Enterobacter cloacae
atgaaaaacacaaggcgtttttttataatgtgcttgcttttaaacgtattcatatttgatgttgaagcacatgatggtactgtaactatatctggcacaatacaagataatacatgtgagctggctacagactcgcaaaataagaccgttgaaatgggtgtgctggcagtcaatcagtttacaaggaagggtaatcaaacgccagaaaaggccttctcaattaatcttattaactgtgggcctgcggcaagtgaagcttctgttaccttttcaggtacacccgacccacaagtcaataccctctattctctcgaccacagttccgatgcggccacaggtattgcgctgggaatttatgatagtaatgcccaaccgatcgctccgggtgctcaaagcttgggtgttgcgttggaaccaggccagacatcagttgagttggcgtttacagcgcgctatgtatctgttgacgataacgttgagatggggagtgcgaatgtatatgttacgtttatagtcaactacgcataa

SEQ ID NO: 171335 - DNA, 966 bp, Enterobacter cloacae
atgttctcttttttacgttatttatgtttatctgcactgtttttttcaactcatttacttgcttgcagtgcagatgcttattttggtccaactgatgacgttcattttaatgatgtaatagtgcagcgagatacccctgttgggactgttattgcatcagtggccggtgaaatgagtggtggtgagtattattacgggattactgactgtgatatatatgttgcaatgaattatcaaggggctgttccagcaccaatagagcatgtttataatacaaatgttccaggggtaggcattcgtttttatttctctacgtggtcgcatggcggcgtttatgcttcacctacaccaggcacttttttggatcatttttcaacatccatgagctatggaattaatccccctgttgtggatttaataaaaacaggaaatattacgtcaggatctctggcaactgggagtgtagctcatgtatatgctttgaataatgagaatacaaacggggatgtgacatggagcataaattcgcctgcggttattacacaagtcgcctgtgccataaattcaggtccgttgtcatttccaattggcaatgttttatcggcccagtttatatctactggaaccgtatctcaggaagtaaaaactgttgatttaaaactagactgtgatcctgaagcaaatatcaatttcacattgactggtgtacaaaaccccgactcatcagacagtagtattttggcattaacggggcagggccaggacgatgctaaaattgcggatggtattggtgtccagcttctttataatgataaaccgctgaaattaaacgaaagactggaaattaaacattccgctggcggaaacgaaattttccctattactgctcgatatattcaaactaaagataagattaaagctggcattgcaaataccaccgcaacgttgaatctgacctaccaatga

SEQ ID NO: 171336 - DNA, 126 bp, Enterobacter cloacae
atggtggtgacggtgatgcctaaacccgaaacgccggtacccgctgaagtcgtatcgaaactggcattaaggaaagcgcgcgatctgaaacggtttatgcagcgtattgatatgaagcacgggtaa

SEQ ID NO: 171337 - DNA, 543 bp, Enterobacter cloacae
atgaatataattaagactaaaatttctgatgtgctactgattgagcctgaaattttttgtgatgaacgtggttttttctatgaaagttttaatctaaaaaaattcgaagaaatcactaatcggaagatagaatttgtgcaggataatcactctaaatcaacaaaaggagtgcttagagggttacattatcaaaccaaaccttttgcacaaggtaagctggttagatgcgttcatggcgaagtttatgatgtcgcagttgatttaagacagtcttcaataacttttggacaatgggttggtttcatactttcttcggaaaataagcgtcaattatggataccagaaggctttgcacatggatttgtatgtttgagccatgaggcagagtttttatataaaaccacaaactattactctaaagaccacgaaagaacaatagcctggaatgatccaaatttaaatattgactggaaaggcatggattttattctttcttcaaaagatgctgctgggcaggcctttaacgaagctgaattattttaa

SEQ ID NO: 171338 - DNA, 1656 bp, Enterobacter cloacae
atgagcattatgatacaaccaacaaagaaccgtttcggcgtttacctcgtccgtaaggccgtccccagacacctgcaaggcatcctcaataaacgtgagatcaagttcacccttgataccaaagacgtgagggaggccagagaacgtgcacccgcaaaaatcattcagatcgacatgatgctcaggctggcagaaaagcagcttgaagcggaagagtccttaactgatgccgatatcgagatgatcgctgatgtatgggcttcaagtaccatgcagaatgacgagctaatccgggagcgatacgtcgttgaagatgttctcaatggtaaaacaggaatgttccactcgccggaaaacgacatcattcacgactggctggaagaccgcgaacgcaagcccctgtacaaatcagaaacatggcaggcagaacgtgacgaatccatctgcaaactgatggccgtagagctggatgaggcgctcgaatacacgcccgtagtccttacccctctctggaggaaacgtctggcttggaggcttgctgaacgccgtagcgatctgaccaacgtctatctactgaatctccgtccacgtctctacgccaaaagcagagggctggattcactgcccgttgaaaaaacgaagacgctcaccttcgcagacctctttgaacgttataaagagcacgtcaaacatcatgagccactgcgggcggaaaaacggattatcgcctacacgacatcggcaaaccgcttcatcgagtttatcggtctgaaggccgccgaagacatcaccgttactgatcttgctgacttccgtaacctgctcgaaaaactgccatcccgcccgtcaaaggctgtgcgattgctccccctgcataaacaggtggaagctgaaggtgaaaaaatcagccctgtccgcgtcgagaatatcatgaaggagctatcgtcggtcttccgcgtcgcggtagaagacggcaagctcacagataacccgctcagcaaactgaagaaacgcaaagccatcgctggcccggcaatcatccgctcttacagtcgcgatgaaatccgccgcatcttctccctgcccgtcttccacggtgaagatacaccgcacggggcaatggcgtactggataccgataatcctgtactactgtggtgcccgcgttgaagaaatcgcccagctccgtaaaggtgacatcgtggaagtggacggtaccccctgcttcaggctgacgatgggtgaaggccagtcgatcaagatgggtaatacgcgtcagttcccgatacacagccacctgctcgaactgggcttccttgatttcgttcagtcctgcacctaccagctctttgccgaaaaatcggaagtaaatggctcatattcctataactatgggcgttggtggggcaattacattcgtgaacacggcctgacgaggaacggtatcaagcccacccacagcttccgccactctctcgttaccctgttccgtgatctggacatccgtgaagaaattcaggacagcatcctcgggcacaacgaaaactcatctgacagagcgaaggccagccacggctacggagagaagtccgtggaggcccagcgtcgtgccattgaacaaatccccagactgaagctaaagcgactggaaaactga

SEQ ID NO: 171339 - DNA, 933 bp, Enterobacter cloacae
atgttaagaattcctgactcagactggcggatcgttgatggggccccccagctttccgttgctttcttgcggaaaatgacgcctcaggcagccagatttactcaatgggtacagcggacacatgccaaattgcttaaggctcccgaaaatgtactgtcgtgctgcacatccgggttaatccacggtgaaattcccgacaaaaacggctggctttccgctggtgatgcccttgccctgcttacttacagcatccataacagcgaaaatgtgccgctaattgaggcgatagaacatcgtgccgggttaaagctctctgttccagcttttgagagcaaacttgaaggccagtttggtgagcagttacgtgatgctctgagctatctagagaagcgctcaccttttatgacttactacgaaatcgagaagcagaagataatcggcaactatcgcgttgatttctttatcacacaaaagctcagtgccgctgatggttcgacggttagacgccacagcattgttgaatttgacgaagcagcccacaagctaaagcgatacaaggaacacgataaacggagggattgctggtttcgtaaacatcatcccgaaactaagcttatccgtgtgaggcatgaagaacaggatatttggttagaatgtatccgacgcttaaaccagcttatccgcctggaagatggctacgttcactgtttacgattagcttgtactggtggtccgggtccgggaatgcgaataaatagcgattcagcccgaaacgcctacgatgcaaggcaaaacgcatgtgcttttctgcttaaacgccctgctcagcctctcagggaaatgggaacattgcttctacggcttggtattccttatgaaaagcggcgtgatatcaacttccagcggacacatctcagaggatacgggatttag

SEQ ID NO: 171340 - DNA, 567 bp, Enterobacter cloacae
atggctatagtcggctacgcccgcgtgtccaccaccgggcaaagtctggatacacaactcgaagccctgtcaggttgcgagaaggtttttcgggaaaaaatcagtggggcaaaagatgaccgtcctgaactgctagcgatgctcgagttcgtccgggaaggcgacactgtacaggttacgaagctagaccgactcgctcgcaatactcgccatcttctagaagtgtctgattatctgcagaataaaggtgtcgcattgaatatactcaacatcggtatcaacacggctacaccgactggaaagctgatgctgaccatgattggggctatcgccacgttcgagcgtgaaatgatgcttgaacgtcaggccgagggaatagcactggcgaagcttaaagggaaatacaaaggtagaaaggccacagcacgtagcaaatcgcaggaagtaatcgagatgctggagcaggggctgagcaaacccgaaatctctcgtcagctagggataggtatcaccagcatttatcgcatcgtccgggctaatcgacctgacttaatcgaggggaagtaa

SEQ ID NO: 171341 - DNA, 318 bp, Enterobacter cloacae
atgaaagttctaaggctcgttctcatttctgcgttggcttggagtactagtaactttgctgggactttacctaaaacacttataattcaatgtgataatggtgttaaggcaactcttaacactgagcagatggacgtttctggcttgttgctcttgccgttcaaaagagttgcagaacaggacgatgacaaaatcataatggtgtatggcaatgatcgggcagataccaaggtactgattcagtacgcaggcccgagagtgttcttacaagatagaaacaactgggttccgtgcgatgcctatcgtgctaattcttga

SEQ ID NO: 171342 - DNA, 168 bp, Enterobacter cloacae
atgacagcaagtatgaagatgctgggattttcatcattcttagcgattgtttcgctggcgattccactcagtggtacaaatatggcttgggtcaatgatgctgattacagtttcctgacacaggtagctctgatcttacccagcaatagtggacacgcgactaagtga

SEQ ID NO: 171343 - DNA, 327 bp, Enterobacter cloacae
atgctggttagtggtctgtttatcatcgatagtatgtatgtgttcctgtactcgctggcatgtcctccgctagttggttttggcgtagtgaaactcgctgaacatctaccatcaataaaaaaacgtggagtaatattcatactgcttggcttgctgatgctacccagtattgccctcctttgcattggtatcaactcggtggactgggtaatggttatcgactttgggacagggttcagagtgctcattggggcgataatgggcggattagcagcaaaccttactccagcggtggaggttggacataagcccgaaaaatcacattag

SEQ ID NO: 171344 - DNA, 936 bp, Enterobacter cloacae
atgctaagaattcctgataccgactggcggaccgttgacggggtcccccaaatttccgttgatttcttgcggaaaaggacacctcaggcagtacgattcacgcaatgggtgcagcgtacacatgcaaatttactcaaggctcacgaaaatgtcctgtcacgctgcacacccgggctaattaagggggaaatcccggacaaaaacggctggatctctgctagtgatgccctcgccctgcttacctacagtatctatagcagccagaatgaaccgctaattgactcgatcggacaaaaagcgggtttagagctgccagtcagacccggcgaaagcaggcttgagggacaatttggcatcagattacgcgatctgatagccgagctgaggaaacagccgcattttgtccattacgaacttgagcaacagaaactcattggtcactatcgggtagatttcttcctaaccgagcagtggtataccgatatggcaaaaggggaaacagctaaacgccagttcatcattgaattcgatgaggctgctcacaggacaacgcgttatcggctcaatgataaacgtcgggacaggtggttcagggaaaatctgcccggtgtaacgctaatcagggtcaggcatgaggaacaggaaacatggcttcaggccgtccgccatctgaaaagattcattcggctggaagattgttatgctcactgcctgcggaaggcatgtattgctcgaccgggtcccgaaatgcgaataaacaacatgtccgttcgaaatgcttacaatgcagagcaaaacatgtgtagttttctgcttaaacggcctactcaacccctccgcgaaatggaaaatctgcttctacgacttgatattccttatgagaaaccccgtgatgtccgcttccggcgggcgtatctcagggcatacgggatttaa

SEQ ID NO: 171345 - DNA, 651 bp, Enterobacter cloacae
atgaaatggctattcgcggtgtgcagccttgcagccttccctgctctggcagtatatcaaccaacagcaaatgaaatagcattactggaaaaattgaagaagggtacggaacaaaacttgaaatatgctcttccacttcaatctaaagccgaaatctgtagatcctatcttgatctctatcgccgtgaacatcctgatttcaattactacaagatgagttcatacatgacgtattgggggatagttcaaggaactacagaacaatcaatgacaatagctcataacgtactaccgcagttgtactactacgagaacaagctttatgagaaatttgggcgatatacagccacccctgcggatgtagatgcgatctttgagaaagcgaaagaggataattatcttaacttaaatcaatacattgcgataaatcagcaattcaaagaaaacctccgcaaaaaagatctttctgctgcttgtatgacacctcctggcgaagacccaagtcgagtgagggacagggcatctgcggctactcatgtagaaaaactcttctatcaaggctacttacctatcgagaaggagggttcctacaatgatgagtttaatgagatgtattcagtccttaggaacattagggagtcttattactga

SEQ ID NO: 171346 - DNA, 1437 bp, Enterobacter cloacae
atgaaaactttaactgagaatcaaaaattacagcatcctaaaaggatttctgctgttgtaataaaaaaactatttggtctatatgattatactcttcctggggacaatatcttcgccaatatagcagtactttatggagaaaatggagtaggcaaaagtactattttgagaatggtttttcatcttttgtcagggactaaaaatcaatcgagttctcacttgcggagtttatataatattcggtttgaaaaaattactgttcttattggtaatgatgttgagttgagcgccacacaacttaagaaaaacaatagtaaagtaatgaaattaagtattcaggttggtggtcttagttttgaatgggattactccccgcacgaaaatcgtcttataaggtttgatgagtctgatgtttttgacgagtactatacttcaatggattatagtggtttagaagtgagtatggaaagttatgatttatcagaaataaaacttaataaaattaaagataaacaatttaaaaatagacttggatattattcgacattaagaaaagtagttcctgaggtttttctgcttaacgcagatcgtagattagatggtgattcaatcgcagatcctgctgatgaagtacagctccgcagaatggttaataataaagagcctcgaagcatatatggcttggtatcccgtagtcgtgaaattgcattagctcaagcattgaattccgctcataaatggatatctacaaaagttgttgagggtaataatttaggtgcagagaatgtacactctgtttatattaatgttctaaaacatctttcgacgtcaagccaggtgtttgatttatcggatgataaaaatactaaagagggattactaaagcgcttagaggagattgatcttcttacaaaaaatttatcaaaatatgaacttgctactatattagatacacagtctttttttacagctctctcggatgagacaaagtcatattatcatgtgtctgttgaactcttaagtccttatattgatagtctcgaaagtaggcttaatgcattaatacctatttacaatattatccataagttcgttacaacgataaacgaaatgttgacagataaaactattagctataatttaaaaactgggttttatataaatagctctcttggtgaaaaattagaacctaactatttgtcttcaggtgaacaacagttgcttcttttatttttatatgtattggtcgcacgtgactcaaaaagtctcttcatgatagatgagccggaaatatctcttaacattaagtggcagcgtaatctaattaaagcacttgttgatattactgacggcgaaagcacacagtttatttttgcatctcattcaatggaaatactatcggttcatttagacaaagttattagattggagcactga

SEQ ID NO: 171347 - DNA, 177 bp, Enterobacter cloacae
atgcggctcaaaaaattaaaactgaaaaacttcagaggctacagaaactctactgaaatcattattgatgaaggcatgacgggcattgttggtcgtaatgactttgggaaatcaacgcttctggaagcgctggctattttttttgaaacagaaggaatgaaggctgacaagaattga

SEQ ID NO: 171348 - DNA, 1128 bp, Enterobacter cloacae
atgacggaacagcaattaccggaaggctggcaaatggtgaagtttggtgatatcgcgaaacatatctccaaacgtgtagaaccgagcgagacagaccttgaaatttatgtcggtttggagcatttagagcctgacaaccttaaaatcaaacgtcatggcgcgccaggagatgtcgagggacaaaagcttttggtgaagaaaggtcagatcatatttggtaagcgtcgcgcttatcaacgtaaggttgctgtggctgactgggattgtatttgctcagcgcatgcaatggttcttgaggaaaatctggaaatggctattcctgggtttcttcctttctttatgcagtccgatatatttatgaatcgagctgtagctatttctgaaggctcgttatctccaacaattaagtggaaaactttggcggagcaaaaatttttatttccatccaaagagatgcagtccactttgcttaaattattgataggaatcgatcgcaatttaaatgccatagaatctgttttggatagtcatgaaaatttgattgagacaattgttaataaagttttgctttgctctaaaacaataaaacaaaactcagttcaaatagatgatttgtgtaaggaacgaagagtgcgtgttagtccggatgaattcgatgaagaaaatatttatgtaggctttgaacacctaacttctaaaaattattggggagttaatcattctaatctagatggcgttgttagtcagaagtttcgttttgagcctgataatatcctgtacggtaaaattaggccatacctacgaaaagctgcattaacagattgtaatggtatatgctcttctgatttagtggttctaaaacctaaaaataacaaagtggggattattctggctgctttattttgtagcaaagcattcgctcaaattgctatgcactctgcgaaaggaactaagatgccaagagctgattggaatatcttaagtaaattaagtatcgcaaaattaagtagtttacaaatagatcaaattagttctatgttgatagtagctaaagattcttttgagagtatccaaaataaaaaaagagctttactaaatactaaggtttcactgttgagtagggagtga

SEQ ID NO: 171349 - DNA, 849 bp, Enterobacter cloacae
atgaatgtatttgtgacaaaaagtactctttactcaatttcaggtgttttagaaatagattatgacattacatcaaaagcatgtagcgccattgagaagatcatacatggatattcaaaagcagcaatccttacaaaatcagaaatatcttcgcttggaaatatgattgcaattaatgaaattctaaataatgaaacacctgaaaccataaaaacaaaaaaaagaaaactaattaccaatgcagcaatgagagaaagggtcgtttttataagtcgtcataagacatatcattactacgataactgtcccaaaataacatcggactatcaaaacttcacaatcccagatgaaatacctgaaaaatcaatagaagagtacagaaagtttttcattgaaaatatcacaacatttaccaccaatccagatgtgttttattttagcgccaacattaaatttggtacaaacattaattccataggtaaaatgcatcacagaaacagtgggaaggcgaacactcaagatatgctcagcattcttgagtcagaccaagaaccgtgtgcaaaaagcatctcaaacgctctcgttttttatcagaataacaaaaggatagtacagaaattcggtgctgcgtcacatctgcgagacaaacttcttaacgagggaaaaatgggaccagacgaacataaaacaatctgcgattggcatcttttaaaagaaactgtaaaagcagaaatcttccaaaaaataacaaaaataaataagataacaaaccatgcatattcaagtgatatacttgatgccataggatttacaccatgtagtacatgtaatgagctgaagaatcgctaa

SEQ ID NO: 171350 - DNA, 201 bp, Enterobacter cloacae
atgctgagtttaaaggccaaagaacatcaaatgctgctcaagcgtggtgcgcatattgacgagtcggatctgatcaaagcacctgtttgtaatggcacaagagaagagcgtttacagtctcttttagagtggcaacgtcatgttgcaaaaacagttcttggtgaagatcaagaggatatccctcatcttctttataaataa

SEQ ID NO: 171351 - DNA, 366 bp, Enterobacter cloacae
atgtggcgctggctgattgcggcctgtttcgttgctgaaatgaagcgcgagaacggcacaacctccgttactgagtctgacggcacatcatcgcaggtagcgatttactccaatggcaaagcggcacttccggtttatccgttcgcggaacgtcttgcgatggcgaacaacatcgagggcgcaatgattgagcgatacggcattgagcagggaacggcgaacgccattgttttttatcaggccatgatcgacacggagcgcggcgagctgaccccgttcggacgtgaaacgctggcagagctacacgatcacttcattgctgatctggatgaaaacggctggcctgaaatgccagcggcgcactga

SEQ ID NO: 171352 - DNA, 492 bp, Enterobacter cloacae; identical to SEQ ID NO: 131575

SEQ ID NO: 171353 - DNA, 276 bp, Enterobacter cloacae
gtgatcaatgcgttcatcgtgaccatacagctcaaggaagccattacagatttcctgccagcccttacgccagctatcaagcatttcaggcttatcccactcacggacttttttaccaaagccggtagaaagaacctcacgggttgttcccatgatatggatatgcgggttatgaccattgatatcgtggataacaacatcagcaatgatgccttgctgggtaaagtgctcaagaacaaaagctgtagtcagttcaatgttctgttctggtgttag

SEQ ID NO: 171354 - DNA, 183 bp, Enterobacter cloacae
atgttctggctgatcctgcttaagacgacttggaaaacgcctaatttcatcagatgttggtttgtagtcatccttgttaaatctggcacgtctttcatgctcagcgcgtgggacgtagatgccttgaacttcatcaaagacatagttttcagaaatacgcttatcgtgttccgcatcgactga

SEQ ID NO: 171355 - DNA, 912 bp, Enterobacter cloacae
atgaacgttcagcaactgcattatgcgccacttctaaatcagcttcatcagcgtgcggtgaggtcggtggtaagtcagctggcattgcggagcaagtcgttgagtcaatatctggaatctcaatatttccagcctccaggtctgggggggtcactgcttgcagatccggtattcgaaagtacgtttggctggatgcccgcggatgaaacaatggaggatttgcgtgacaaactgatctccagcccgctggttgatgctttgagcaatgcgccagtgccgtttcgtcatcagctaactgcgtggcgaacgattcttgaagacaagcagtccctattagtgagcagtggtacagggtcaggaaaaacagaatgttttatggtgccggtgctggaagatcttattcgtcagcaaaatttgacccgacagtctctaacagggacgcaggctattttcttgtatccgttgaatgcgttaataaatagccagcaggagcggcttcgcgagtggactcgcgggtttaaaggcaaaatacgtttcgcgctatataatggcgaaacccggcataccaaatttgaagttcaggaagaccagcttaaagtacctgaacaggcattgagtcgggaagccatttatgaagccccaccatccatcatggtgactaataccacgatgctggaatatatgctgattcgtcgcaaagatgcccctatcattgaaaagtcccagggaatgctgaagtatatcgtccttgatgaggctcacagttatattggctctcaggcagctgagttggcactgcttttacgtcgcgtcatgcaggccttcaatgttggacctggtacagataaacctgtgcaaatcattgctacttcggccaccattggtgaagattctcctgaaggtaataaataa

SEQ ID NO: 171356 - DNA, 735 bp, Enterobacter cloacae
atgagtgaaaaaacattgatttttgtatgctgtttagacaaggcgaatataacactagattatatgcctgaacatcaaggtgtcaggttaaatagtttcaatagagatgagttgagtgacgattcaactgcggtttcaacgttttcaatagacatcaaagagtcagagttctacaatagagaatcccaaaaaggaaacttgtatgttcaaaggcatttcaataactttaagaatggttactgctatgttttattgaagtttgaaaattcaaatactgctgatgggtattactatcgaaattatcaaacccctgaagaaagtaaaacagatcaagagtatgaaaaaatcaaaatcacaagcttggcattcatttacccatcaaataaatttgccgcaaaaaacaacttgattcaaaactttctaaataaaaagaaagatcataatgatataaataaggagatcagtggtcaaatatacttaaatagttattctgtaggtcaaggaaatttagatagcgatcatcataggcttttatcttgggacccaaatatattagaaatggtgtccaatatatacattcctagcaatacaaatgatcttttctttaaagatgaattaacctttcagaaagttatagcctgctccatgattaaaataaaatttgctaacgggtttctgcattcgtatcgtactcaacctctttcttcttcaaaagaaaaaatgataatgaattag

SEQ ID NO: 171357 - DNA, 1068 bp, Enterobacter cloacae
atgatagatctttacagcgaagactcagtaattaatcattatgccgatcgttatcgtaactacatgccagttaatgttcgtaaggtaataagaagcagcattgatgattcaaattcctctcatgtatgggatgaagtattacctttaatcacaaatgaagatgtttcacgcgataaagcacttggggcgttagtgggtttggctgttggagatgcggttggcactactcttgaatttaaacgcagagacagtgaacatgtggcggatatgattggtgggggaccttttcaattaaaacctggtgaatggacagatgatacgtccatggcattatgtctggcagagacttatctttcagaaaacagaatgcacaccgatgtgcttagaaaatatctcctgaaatggtatctcaatggggagaacagcagtaatggtcgttgttttgatataggtaaaacgacgcgattcgcacttgaacagtatatgcgtgtcggaccttcctggtatggtaatacagagaaacacactgctggtaatgctggggttattcgtcaagcaccggtgtctatctttcgtcgaaaatcgctgcgtgcgatttacttcgaatcccaggctcagagtcgagcaacgcatggcgcggttgaatcaattaacgcatgccaatttctcggattggtattgcactatttaattaacggttatcaaaaaaaagaagctttttcccctcatgttttcccactgtgctcgcgtgtaatgatcataaatgcgggtgagtataagctaaaaactcgcgatcagattcgttcaagtggttacgttatcgatacgcttgaggccgcgatgtggtccgtatggaatactgacaacttccgggatgcaattctgctggccgccaatcttgccgatgacgctgacagcgttgcggcgacggcgggacaattagcgggagcattatatggttactccggtatcccgcaggagtggaaagataaactcgtgcaacacgaacgtatcgccacaatggcaggtgagttattcgatagatcacctgaggataattttttatag

SEQ ID NO: 171358 - DNA, 240 bp, Enterobacter cloacae
atgaataaacttacagatatttctaaaaacggattcagagtttgtgagtcacgcgaaaatgaacttgatattgcttttatttcactcaggcttgcgcttaaagcatatttttctacttatcgtgatctcaaactaaatttgtcatcccttaaaattattctctttcttattatgagtcttgtacagagactatcgttcattttcagcatttctttgaacttgcttgcaaacatattttaa

SEQ ID NO: 171359 - DNA, 507 bp, Enterobacter cloacae
  misc_feature (464)..(473): n is a, c, g, or t
atgcacgaagattatatcaattttgcgaaagcatatatcagatatcaacacacattgaaaccattgaaaaattatggggttattatgatggccttgcgatgtctcgaacaggcccttttgcaggttcagaacactggtctcatttataatgttacagccgttgttttcgatgaggcaatgcagatcgggagtaaatattttgaaggtaacgttttggctaaatgtggaatacagcttgaaaaaatatcaaagtttctgtgtgaacataatcttgtgaagtcaggatatatctcatggaaaaaccatgtaaaacagaaagtcaaaaacaattatcttcctgagattgaggattatcaccgaagcgataagttaccagatgaagaagcattgctcgctattgctgatattttttctcaaaatgatgagttactgagtccaagggataagttcaccagttcagtatnnnnnnnnnncacttctactttgttgtccgagcagaatttctga

SEQ ID NO: 171360 - DNA, 216 bp, Enterobacter cloacae; identical to SEQ ID NO: 142298

SEQ ID NO: 171361 - DNA, 216 bp, Enterobacter cloacae; identical to SEQ ID NO: 142298

SEQ ID NO: 171362 - DNA, 1071 bp, Enterobacter cloacae
atgaccaaaaaatatttagcagtcgtattgttcactgctttattggcaggcgtcgttgaaacgtcaaccgcgcttgaattatcgcaatacaataagctcaatacggtaagtcgcatcgttaatgatagcgaagtgacagacattctcaggaaaacgctgggaaatcattaccaggcctttattgataactttgatgtcttcggtgaaccgcataccactccaggtggaggattgtttgttgagggctggctaaaggatctctaccaggaaaatgcctcagcgctggttatcaatcctgacggcaaaatcttcgcggcctgggtggttccagaatcaaacgttatccattaccagtcatctgataatagtcagccgattaatgccgatattcagcaatgggccgccaggttcaatacgatgcagtttgcagcgaacagccaatcgagacctgcgtttgacggggtttgggcaggcggggttggcaacgactcgacgttaaccctgcagttagctgaatcaggcaaccgtatcaccgggtcatattgctatatctcccggagaggaaaccgcatcgactgcccggaagatgatgagcataatcttagcggtacgatcgcgggaaaccgtgcgaacgtagcgtttaactcatcgtttggcggcgcaggcggacgggctgttctggaaataaaggggagtgagatggaatggcttttagttacccctcctcaaaaaggaaatgattatgctccacagcgctatacgttacgtaaagccgcttcggttcatcacgctgaaaccagaaaactggacaccgaaaagttcactatctctctgataaacaagtgcgggcgtttcgagggtgaatgtgaccagatggtttatctcggtgtgcgcaaaagcgataacagtacgatctccttaaagggaaaaacgttgcacgaccccactggtaaaataatcggctcaacgtacaagaatggcgagatcgcttataccgtgacgtatgcacccgtgaaattgcttgtcagcaaaggcagccatgttttagggaaggtgcgaacaagttcctga

SEQ ID NO: 171363 - DNA, 1701 bp, Enterobacter cloacae
atgttgacgaaattttcgggaaaaaattacaaagcatttagggatttttccttcgacatcaaacctataacagtcttacttggagcaaatagctgtgggaaaagtgcgctaatcaattcattattgatgttttcccaaaccgcagaaacaataaacatttccgaatcagcattaagattaaacgggaataaagttggaatgggtgaatctctgaatgtcattagagaaaaaaacccaaaaaacactttaagtttttcattcgaagtatcaaatcagcagtttatacgaaacgacattaataaaagcaaacgcgattttattgatttctatttttcacttgtcagatatgtagggcaagtattaaaaagcgctgtatcaacaacatctactagtgccttagacaaagataagtttaacgaaacattaaaaacgattgatgaaatcgaatcgaattatatgtttagagatacttataactcagtacagctcaaaaaaatttctgacggcgtctgcgagctattatcaaaatacaggcaactacctgaagatgttgcacgaaaatcccgaccacacctcgatcgcttggctgattttctgaatattgcttctttcgaaaacattcaaagcagcttaatgtcattggcatctcttagtgcaaaaaaattatcgccaaaacaaattaattatgacttttgcttcgataaaaaatcgaatcaactaaaaataattggatgcgcctttcacaatcatttaggcgagtgcattgccagcctaggtatatctaaaggtaagttcttcttacgctctgaagttattaaaagatcacacttgagcaaatcgcgagaagaaatatcaaagttaattaattttaattcgctatctctaatagatgaaattcaaactattaatttcattgataaacacattttatctcttgacccattcgcaagtttattctgtaactatctcgaaaagttaacaagggcatttatctctgagtttaatggcgtgaaaataaaccatgtaagcccattgcgagcatttcctcaacgctactatcttttagataagtctatacaacatactttccttaacgcattggaaggtaatgaactagctgaagtactaaagaaaaacccagaaataaaaaacaaaataaacattttactggcgaaattcaatctcgaagtagacgttgtcatggttaatgacatcatccacaagataaatatcacccaagattccatttctttagaattaacagatgtaggctttggtatatctcaggttttacctattttggttcaggcttatttatccccaaaaaactccataaccattatagagcaaccagaaatccatttacaccctaaaatgcaagcatggctcactgatgctttgattcaaatagctttaaaagagaagaaaagatttattattgaaactcacagtgatgctctaatccgaagaattaggttgcgtattgtagatactaaatcaagcctaacaacgaatgacgtgatgctttgcaaccttgaaaggaaatctgaagataatgctactagtttaaaagtgatccctattaccgaggatggggatataacttggcctgcagattttttagatgttgaaattcaagatacaattcaaattcagaattttaaagttgaaaaacatcttaagagcaaagggattttataa

SEQ ID NO: 171364 - DNA, 1002 bp, Enterobacter cloacae
atgtattattcgcattgtataagccctgaatttttagggcttcacatgaaaagcatggatacttttctttcagttttcatgggggttttaatgcagccccaaaaccaaatcgttttagatgaagcaggtataattgaacaacattacttatcaagtcttaataacgataagtcagcttttttgctctatcaaacttgggaaaaagctataaaatcagatggatgccaaggaaagctgctactttcttccccccaaatatcttcctcaatacatgactatgtagtttcagccatttcatgcgctataactacaaacgacaaaaccatcctgactgcgaataataatctgtacagcacagctttatctattttatctagacaaaggatttatttgttaggattaagtcatcttaaccctcaatcatcggcaagcagtataggtaggcatatgtcttttacaaaacttgattatgatatcgcctggtctttagagagattagtccgactgcatcggaagggacatacagaagatgacttaaatgacttgcttcgtgaatatttgcttgcaaaagaatatgaaatcaaagaccagactcgcgaaggtatatccacaagcgggaaaagcgctggagagcttgatattatcgtcgagcataactcaagcatgtttgcgatattagaagcaatgaaacttagtcagataaacagggaatacataactgttcactataaaaaaatgcttgttaattataaccctctagatgtaaaaagattatttctcatcacctattatgatggaaaaaaattcgatgactggtgggataactacaccgatttcgtggaaaacattgactacacaacattaaaccccgaagctgaaaacacttctttcataaacacagaaaagattgacatgaaatttgggaatgttaaaaaaatgctacaccacggcctaagtaataatgaacaattttcaattatacattatgcagtaaaactgtga

SEQ ID NO: 171365 - DNA, 1218 bp, Enterobacter cloacae
atgattgagatttatttaaataatatagatgttgaagatataaaaaatatccggcaggaacctgatgctgatattgaggtttttattcctttagatagtgtaggaatatcaaactcatatattgacttatgcgatgattatcttgaagcaatatgggcaggggaacgactggccgacaattgtcaacacgcccgggcagtttcctattacgatcgtgaaaatcataaatcatacattaagttgtttttaacaaagccaaacaaaaaatttctcgaagcattgagtgattgtatagtcctttataaaagatatgatgacagtctttatagcgaagttccctcggtatatagtgagataagagatgctgtactctctatagaaaataatttagataattttgatgtaaaagtacctgccttgcatgattattattatgcgaatttaatagggggtaagtattttgagatgatgtctgatgcgcccgatgagcaccggagtgaaataaataaatatcctgaaagagctttgggtttttggaaaagtgcttacagtagtgtgataggagagagatgttatgcatcttcagataattgggttttcccaaatacagttgacttagataacttttttaaagttaccgagcaaaactacagttttgaaagtttcataccctctgatattttagtgttaaaaggagtctcttacattatatcggatgtgattatttgttatttcccaatgaagcattatttcaaatctaaagtttgtagcagtattgagttattaagagatgaagataggtggccattagatccatttgattggtctaattcaacttttacttattcgccctataatgattttcttagggggcagataggtcacgaaagtagtttgttatctccaaaacctagccaagaacgatgttatgttgatccaaatggaactctagtagttgttgatgacggtgatttttatcaccttctttatgataccgcagagctgaatttatcccagatgaaaagccttaacgaaacattaggcgttgctcttatttctaccggtgttaatataggtttttccgaaggtttaacatatgattggtctagggaaggtgcgaataagcaggtcatttcttcccaagctgactcgctgattaaaatttcgcggatctgggccgatttttttcccgcaaacacatcgaatcagcctatttag

SEQ ID NO: 171366 - DNA, 360 bp, Enterobacter cloacae
atggtcagtaatattctcaaagtaatgttaatggtgacattgacgtggttcccctgcgccaacgccactatacaaattttaacaactcgtgtggcattcaatgcaaacgagagtgaacaaaccgttcgcgtaaataacctcagtaaaaacccggagctggtgcaggtctggctttccagcaccgacaaaaccgatgggacggagaaggagaatcttccgttctttatcaatcctcccgctgcgcgcgttaaggaaggtgcgaataagcaggtcatttcttcccaagctgactcgctgattaaaatttcgcggatctgggccgatttttttcccgcaaacacatcgaatcagcctatttag

SEQ ID NO: 171367 - DNA, 309 bp, Enterobacter cloacae
atgattatgctttatctttacctgcaggctatgaaaaacaaatccgcccatggtgccgttattgactattcagccagcacgctcgcaaaagaattttttgtatcgcgcatccacgtcaaccggattatcaaatcagctcaggaggcaggctatctgaaagatcggggtgatggtcgactgtcggtctatccggcgtttatcgaactcgtcgaaaattatgccggattatattttgcgtatgtcacgcattacatcaacgtggttcctaaagagcgacgccaccctcacaacgtgacgtcaaccgtataa

SEQ ID NO: 171368 - DNA, 1419 bp, Enterobacter cloacae
atgaggttttcagaggcttttggagttgaaggcagacaagtagcgttagattttttggatattcctctgcacactgatttaagattttttttagatccaacatctataaaggttttaaaatcccaatgggggcaggatttagtttacgcgttacaagactattttacagaaataatggtgtctataaaaaataatgattttaaaaaagctgcttatttattgtcatcactaagagagtccaatgcctttcatttaggatattcaacaaaagaatcatccggaactgctcttggtgaaaaaactgctgaagatattttggattctctaaagagtagtcaggctgcaaaatcaggaatattaactgatctagaagatacagctttgactatcccaggtattggttctgaccgaatatcggattcagtttgtaatattcttaaaggtttttttatagaatatacaaaggatgtttgtatattttacggcattgagactaaagaggttacagaagtcaaaacgtgggataaggttagtagtaaatggcataaaaagcgttttcatctccctgtttttgaaggcgaggagattatccttattcctaagatacttgcacgtgaagagataatctattcacatagggatttatatcggagacatattattccggaaatgaaaaaggaattgataagctctggttcggcattagttaaagtgcttaaaggagagagggttgttaccacaacaagtatcattgatgagtatggtcagactaaggaatttatcgagtctcagctcgtaaaatatcctaataccttgaaagaatataaaaaagatctggagattaatcctccgaatcctctagcgcatagtgattttgataaggatgaagatcctgtaattctccccataaaagatctaatgaaagatattgatttagcaattaaaaacaacgactttagtaattacactaaagcatacaagaagatattgatttcaatattctatcctagcttgttttacccaaaattaataagtgaggatgaacggtgctgtctctttttattaatcaatgaggctaagaaaggtttcttttttgatttttcagtgtacaatattatttcagagttgatagttgtgaatgtcattgaccctcagcataaattgaacaaggaacatatttatactacacttagaaaagtcgaagaatgtaattctaagataggtttaatattctgcgaaaatcctgctgaggaaaagtatcttgatagagtgaaagaaatatcgaaagatcaaggtttgtatattttcttgattagccgaaatgacttaatggaaatgattaaggaattttcaaccataggtgaacagacatttgacgtattaaggagtatgtttaaaacataccccggaaaagtatga

SEQ ID NO: 171369 - DNA, 354 bp, Enterobacter cloacae
atgaaaaccaaaagtcttgaagacctacagaaggagctggctgactttgctaaggccagaaattgggataaattccattcaccaaaaaatctctcaattgcattgtctgttgaagctagcgaattaattgaaatattccagtggttgactgaggaagagagtaagaatcttaactctaagcagttaatagaggcggaacaagaagtggctgatgtttcgttatatctcttacagatttcagataaattgaatatcaacatcctcgacgcagcttataaaaagctcgaagctaacgataaaaaatatccaattgaagcctgctttggttcagcgaagaagtacaccgagctgtag

SEQ ID NO: 171370 - DNA, 858 bp, Enterobacter cloacae
gtgatttgggtagtatatatatcagataaacctcactcgaaaattaattttcagattggtatgaatcaaggagtttggggagtaaaggagacaaagaaaggtactgttcagaatataaagaaagatgatctaattgcctttgtttactcaatttcttggctgaaatccgagggagcatcccctcccggtttctcccgcgtgggtaaagaacacctgcaaaatttccgtggtttggtgcaaaagatcatagtcggtcaagtaacaagagactattataccgcctctacgaaagtttggcctgatgatgagatttatccacatcgcttcgacttcaaaattgttcaagattatggtgaagatatttactttggaacagagttcttcaatgaggctttcgttgaggctgtgcgttattctgcctgtacgcagggttcgattactcaggccatctcgatagagcagcttacagagattggctgtaatgtggatgagcaagctgatgaagagtcatctgctgtagtgtccagtttagaaggtatgcccataacgagattgcacctctctcgggagagagatcccaaaatcattaagcagaagaaagagcagacacttaacgtaacaggtaaacttgagtgcgaaatctgttcaatggattttgaggaaacatacggtaaactcggccgcggttttgcagaatgccatcacaaaaaccccctaagtcttcgagataaaaatgaagaaacagccctttgtgatctggccattgtctgttcaaattgtcacaggatgcttcacagaaaacgtccatggcttacgcttgatgacctgagggcaatttatgaaaaccaaaagtcttga

SEQ ID NO: 171371 - DNA, 324 bp, Enterobacter cloacae
atgcaaaacgcacaggtttttaagagacggtatcttcttctgataccgttgactgttatcgcctttgggatttacaagatgctgcacttctcaccacttgagcaagagattatcaagaaggtgaaagtaaacaacctggctaatctattcatcacggaagcgagtgcaggcgccaccacaggcttttcctaccgtttctatttgtatgatgctaaggaaggtgcgaataagcaggtcatttcttcccaagctgactcgctgattaaaatttcgcggatctgggccgatttttttcccgcaaacacatcgaatcagcctatttag

SEQ ID NO: 171372 - DNA, 348 bp, Enterobacter cloacae; identical to SEQ ID NO: 157391

SEQ ID NO: 171373 - DNA, 951 bp, Enterobacter cloacae
atgatgctgaatgcccgcaaggttgaagctgcgaaaggaaaagagaagagctacaagctgtctgatggaggtggactttaccttcaggttgaaccgaatggctcgcgttactggcgtatgaagtaccgttttgctggtaaagagaagcgcttgtcctttggtgtttatccaacagtcacacttgctgatgccagacaaaaacgagaagacgcaaagaaacttctcgcagcaggtgaagatcctggcgaagtgaaaaaagcaaaaaagcaggctttaaacgcagcgattgagacacttaacccattcagagacgtggcgttagagtggcacaaaatgaaatctcccaaatggtctgagggctatgcttcagatatcattgaagcatttgagaaagacattttcccgcatattggacatagacctatagctgatattcagcccctggaactgcttggagttctgaggttgatagaagcacgaggcgctatggagaaagcgaagaaagtccgtcagcgatgcggtgaagttttccgctatgccatcgtaacgggtagagcaatctacaatccggcaccggatcttgccagcgcgatgcaaggacatgaagcagtccactatccattcctcaaagccaaagagttgcctgagttctttactgcccttaatgcttattcaggaagtccaattgtattgttgggggcacaattgcttatcctgacaggcctaagaactggagaactaagggcaggtgagtggagtgaggtggactttaataatgcggtgtgggagatcccaaaggaacgtatgaaaatgcgtaggagccatattgttccgttgccaaaacaagcattatcccatctcaaaagtttgaaagacctaactgggaactacccgcagatgttccctggacgcaacgatcctagggaaggtgcgaacaagttcctgatatga

SEQ ID NO: 171374 - DNA, 720 bp, Enterobacter cloacae
atgaaaaacaatgaacgtcaaatcattgatttcttttgtgtggctatagagataattttccacttatttttcatttcacctaatcataattcgtccgttaaaatatgcatttttatagatataatatgtaaaaatgtgaatggaatgaattctggggacgcaggcattcttaagggacatgtttttaatttgattcatagttattttgagcggtgtgttgaggtggagaaaaatagtaaaattaaaaagatacctctagagaatctgaatttattaattgctttaaaattacttggtgaagattataaactaactcgagatttcttgggtaaaatctatgatatagagaatcgtactgattttagttatttcgaggtaataactctgttttattacatggatagagattctcactataatagtttaagggaaaagatgtttaagtatgttaaggttatgttggagaatgtaacagatattaagattgattcattcaagttttacttatttcttgatgttattaattgcccatttattgaagaacgaaagaggaaaaaattaacgtccgaagttgtgaagttacagcttaatagaccaccatctgctgatgagattgatagcggatggaatgctcttactcaaggctattggttcgttcaatgggataactttgatctacgcttatttttagagaaaaaagaattgcttagtgcttattaa

SEQ ID NO: 171375 - DNA, 534 bp, Enterobacter cloacae
atgcaatcaattaattataatgaaactgctggaatcataatcggtcctgaggttagcaggattttttctgaagtattgtttcaagatatagacagagaaattgaaaatttactcggcgagttagattatcttaatggtagacattatacgatcaggaggtatgttgatgatatatttattttcacgcttaatgaaaccattctaaatgatgttcggtttgtcgttgaagatactcttaaaaaatataagcttacagtaaataaacaaaagacatctattacgcagcgccctttttcaacagcgaaatcagggactataaatcatttaaatgaaattcttacttcattgacaagcaaatttatcgatccagaaaatccagaaaaagtgaagaaaatctatagcaagaaaaatacagtgatatcatatctaaataagataaaatcaatgtttgttcttgagcgagaaaactataacttagcttctggctacactatttcttctttggctaatattgctatagatttggatagctaa

SEQ ID NO: 171376 - DNA, 285 bp, Enterobacter cloacae
atgaaaccggcatccgttatcattatggacgaacatcctatcgtcagaatgtcgatagaagtcctgctacagaaaaataagaatatcacagtcaagctcaagtctggcgatagccatgaagtccttgactgtatccgtaatcaccctatcgatctggtgatccttgacattgaactcacgggcacggatgctttcgctttacttaagagaatcagaaacttaaacaaagacattaaggttctgttcctctcatctaaggaaggtgcgaacaagttcctgatatga

SEQ ID NO: 171377 - DNA, 174 bp, Enterobacter cloacae
atgaaaaaaaacacagacagtccggaacctcagctgaaccggtacaggcgggtttcggggcgcagccctgaccagagtatttgtgatgccatcgcgtacgcggtattacaaatgcacatcctgtcccgtggcgctgacaccctcaaaaaaactgaagccgtgaaaattccctga

SEQ ID NO: 171378 - DNA, 279 bp, Enterobacter cloacae
gtggatgtggactggctgatcgccgagcgtcccggcagggtaaaaaccttgaagcagcatccgcgcaagaacaaaacggccatcaacatcgaatacatgaaagccagcatccgtgccagggtggagcacccgtttcgcatcatcaagcggcagttcggcttcgtgaaagccagatacaaggggctgctgaaaaacgataaccaactggcgatgttattcaccctggccaacctgtttcgggtagaccaaatgatacgtcagtgggagagatctcagtaa

SEQ ID NO: 171379 - DNA, 990 bp, Enterobacter cloacae
atgttgttaaaagcattcccgggtgaaattctctttagtcgactctgcaggagtttgtcagtaagtggaatgccggtacggaaattcacaaggagccttgggctggaaaccaactcgtcatttcatcctttactgacacaacatctcccagaaattgctgagattagtcacgaaaatccaaggcttctctggtcggaacaaacgatgttccctctatgggtatggtcaatgcctggttatgcaaaagcactacgacaattgacaagctctccggcacgtctgcgatggtttaatcagattacaggcaaccacacctcccaaaggatgaaacttcatttttgccctgtatgttccagagaagatgcaatggaatatggtgtcccctactggcattgtgagcatcagatcccgggagtcaacatctgtaagcaccaccactgtcgattaatatcaagactggttccagcaagtcctcacattgctgccgaattttatcccgatcagtttaataacataacccccggagagaacatagaaaatgatttttcagcatttgcatgtcagatattgactcacctgtcgcatgatgaaaaaatgtcagataattatttctccgacttccccccaaccagaacacatataaataatcagaatcacagcgagaacgaaaagatatacatatcactgaacgatctgattaagcacttgtgggaggataattctgaccctgttatccatgacaaattacgcttcctctattacatcatctccaactatgaaaatatcccccccacacaaaaattacttctaaagttttatttactacaaataaaaaacataaatcaaaaaacaaaacaatattatgaaatcaaaaaccaaaagaataagaaagagttaaactgtgaaatccaaaagtctatcttggaaataaattccatgatgatcaggctttggccctccacaaaattcattatcgaatttcgaaactag

SEQ ID NO: 171380 - DNA, 2742 bp, Enterobacter cloacae
atgtgggacgtgaataaggccatcgaacatttaaatagtcatgcagaacagggatctgttggatattgcgcgaggtatgttaaaaacgcaatcagtgccgggggagatatcaacccatggccttcaatagagggtgcaaaagattatggcgatgcattgctgcatagaggatttcaggttatctcgtttgagagtagttttatttcgggtgatgtggtaattattcaagggattaggaaagatgattttccagaaggcgaaataacaagagatcacccttatggacatatggccatgtttaatgggcagcaatgggtgtcagattttaaacaaaataatggttattaccctggtggcgattaccgaaaagcaaagcctgcatgtgttttttatcgacataaagatgcccttggtgacggatcgcagagtaccagtgtagttggtggaaaaatgaatatctgttaccccgtcagggataaagacggaaaagagtttcgttctctggatgatataatgcgtctggttgacgcagaagtacacggcacctggctgctgggaggaaacgggctgtggcacggcgcagtacatatcagtgacgtgtctaatccttattctgccctgactccggctacgctcagctccggcaaaccggttccccttcagtttatggctgacggcaccattgcggcataccggataaacaatgactacctgaaaggcccctataaagggcaggaactgcgttacagcagcacgtttgttctggtgaaatcactgtgtcagccagacccgcaaaaagaaaaaagctggctggaattctacagcttgtatatgcatctggcaccggtgaaagattatccggcctccccctgctataaagtcagggtcggacacagcgggatactgctgcgtacatacgccgacgggataaatggccttccggacggccaggagagtggcgatcctgtaacgtatcaggcaccgccaaagacccgtaaaagtctgaaagcgggagatcgctttgtgtcatcgcgtaccggacgtttttacgtgacgaaagggaggcagtcgactctgatgacattcggcctggttcgcctgttgaccggcgaaaagatgggagatgaagagtactgggtaacgctggacccggaactgatggagccggatggtgaaatacaggcgctgatgcctacgtggatgcagaatgcgaagaaaaatggcatttttgactcggtgcagatgggaggggaaacggaagaatggaaggtcagcgccggaacgccagcaggatttatgggacgtgaggaatatcccggcagtgagggtggtcaggttgagcgcgagtggtttgtccatcttgaggtactaagtgcggacccgaagatgccggcatttttaggcaatccggcaggggtgaagggcgataaacaaacggtgctggccccgaaaggcaaagtactgtacacccgccggacgacagacgggcaggcgacatttaccgccacgccggccatcctggatgctcagcgcgttctcccgcgggaggccacaacgccggtgacggatgaagcgaagcagtggtggtttaacatcacgggcagcggctggctgccggagaaggatttggcagaggccggacagtacgattttctgaagctgggttttcagccgctggaggaaaacagcagcggcgatatgacaaagagtccatatgaagggtgggtgccggaagcgtttggagcagtaagccttgcggcagagcagggcgatgaatggtatgaacaggtgccgcccttttaccgtgacctgatagcggaaatggacgtcaaccatgacggaaaggtgacggaagaggaaatccgccaggcactggtggtgcgggacccgctggtgaggaatgtggtgaaccggctggtggtcagacaccacagcgagtggtacggcgggcgcacaacggggcggtgggaaggcttctataaggatctggacgcagaggaagtggcatactgtgagaagtggcagaccgatctggagtggatgagtgaggtatcgccctttaataatggtgagccggtgtggcattttcatccggttgtgtttttggatgcaatatatactaagtatcgtggttgggcgcatagctcatttgctgatttacttggtagcgtagaatcccaaaatgattatacggcttttaatgtgcatgtgacgtatagagcacatttcaatactaatttaaccagtatgactattcaggatgttatgacttctcaagcggatcttacctcgaatggcttatttgctactgggcgatttcagattgtgccagtaactctaaaggaagctgtaagagtacttggcctagatgttaatgttctttataatgaggaaatacaagataaaatattcgaagaatatttaattaaaataaagcgaccagcgataattaattaccttgaaggaggtggtaatgttgaagatgccatctatgattgggcgaaagaatttgcctcagcgggagttcgtcaaggtaaagaaattagtcgatcaaaaacggagtttgagacaaaccctgatggttctgttaaaacagatactaatggaaacagaatacataaaagaagatatgctactattgaaggaatgtcttattattcaggtgatggaataaatagatcgcatattactccggatgatatggttaaagtgttggaggagtcaaaaaatgaaggtaaataa

SEQ ID NO: 171381 - DNA, 597 bp, Enterobacter cloacae
atgaaggtaaataaaacaatgtcatctgttttttctatttttgtttttccgatatttgctgccgagaataatacgcctcaattttcagactatccagtaaatctattttttgactcttttacgaaaaaaataaacctttctaatcagcaggaaaactattcttcgaaatggaagggggtaattcaaaacgcacttttgagaccagttaatttttctggtcactatgtcatttatattagcaaaaaaggagaattgcctgaagaatgcggtaacgatggatgggtatgtgggtgggttattgataaactaaatggagaagtggtctcagagttgccatatttcaatgggagtacaaaatattattccaccattgataatggaacaccttctcctgatttatttgatatagagttttatggtaaaagtagtatgctatgggttagagggcaaaatattccagaaaatggaaaggtgaatgaaagtagatgcgctaatacggcatataattttaaagcaaatactttcataaaattattttctggcaaatgtgaagtcgatgttggtagtgatccaaatgctgaccactatctgccgtga

SEQ ID NO: 171382 - DNA, 594 bp, Enterobacter cloacae
atgaattctaaaacagtaagtttttatgaggtttttttcgctggctataacattaagataccgaatgaatttttagatatcactccggtaaacccagccgaaaagtgcgattttccattttctgagtttgtagtcttagacgatgagatggtatttttttataacgatcttgctatattttattttaataatcaggaagcattaaaatttcatgaaaagaaaaaagttgaaaaaagcatcattgtaggtaaaaaaacaacaggatcgtcgaaggtttgtaagcaaactgaacatgatcctgataattataatacttctcgtgagtgcttttataaacatatgaacctcataaatacttatcgagagtatagggaagaattagcggatgatagtgctaaatatctccaggaaaaaattgtctcaaataaggatttttctgttcaatgcgacggtggatgcattagtgttatctacaaatggaatgggccagataatcttgttgttacgcaacagtttgacggtggtgaaaccgaaatctccttcactaaagaagagctgggttctcgggttgtgacaaaattatttcctgattaa

SEQ ID NO: 171383 - DNA, 255 bp, Enterobacter cloacae
atgcggccgacagagaccattttattcaccttttctgtggatatagttgtgaagaagtgcggaattaccgatgaacaaccttgtagcccgacgagccgccaatttaccccgcttataataaatcatttaaattcatatgattatattgaaattaagggtatccagtgcgataaacgtgacgatcatcacatcaaagatcctcctgctgatgaaagatcgaacagcgtcggttttatccacagtttgtgccaataa

SEQ ID NO: 171384 - DNA, 1800 bp, Enterobacter cloacae
atgaacgatattcaaaaggaacacctttcaccttttttctctattctagttggttttaataaatcaaattacacagctaaatttttacatgaatccatcatgaaaatcattgatacaaaaattcataatgaaggagaaataaagaaatatttaaccactactgaaatcattaaagaatccaccgtgttcatttctccttactctataaataaagtacccagttggactaaaaaaaatgatatacatgatattgaaaatcatgttgcactgacttttactcgaggcaattatgttgctttttatttttctgaaaaaggaatgaaagattcgataagagaatattttaagagtaccatattgccaaatctacatcctgtagaaatatcgcatttaaatcatttgtttattgacgaagacaatatcaagatgctttggcttttaggcatacatggaaaaaatacatttaaggctgattcaaaagtactaggtggtaatagcgtagcagagtctttagatccacttgaagaccaatcttacatgatgtctgctgtaagaacagaaatcggaaataataataaaaccattggtctaaatcctttcaagtcatctatctggaagggaccttgcaaagactgggttacttttgaaaacaacgtcatagaaatattggacatgctaaattccaataatcaaaacaatttatctcctataggtattctcgctagcccaataaatgatctcaaaaatgtaattgatgcctatgatttttcgataattgacccagatttcatttcctatgaattgccacttaaaaaattagatttattaagggacatcagaaataaatatagaatagaaatttcattaacgcttaatgcatcatttaccctaaaggtgttttatgaaaattcctactgcggtgatattcaagtagcgcttaaaataaaagattatattactagttttgaaattattagccaacagcacgccccacaaaagaaagatttacttaataagtatgcgaaagtttttaaacattctgatttaattaagtgctggtatgaatcaggacatgcagtagtaaacagttggacttttaagactgactacaaagatgttacttataatggttttatctgggcagattttgaaaagtatgatatttgtaaagaaaaaccattaaactcagaaaaactcgatttaaaacaaataggaaaacaagattctctattttgttgggttaaaaaccgctggaatagccgctgggacacgtttgataaattcaacacaaccgaaaaaccgaatggatggctctattgtgacgatggcgctggtgagaaagcagactttatccatattgacgatcataatgatcaaacgatcatatcattgattcatattaaagcagccaatagtaatagtagcagcagaagagtatcagttggcgctcatgatattgtcttaagtcaagcagttaaaaatttgagatatgcaaaccgtaaaaatctcatccaagatcttacagaaagaactaccagctctcagaacaaaatgtgttggtttgagaataaattaattcaatcttcggactttcttaccaaactttcatcattgaactcaaacccgactaaaataaaaactcgggtcatagttatacaacctcatacaacaaaaagctattatacaaaaacacaaaataataacatcaaaagacagttggatgttttattagtcagttcagacaatgcgataaaatcatctggcgcagattttcatataattggttttaatgacgactga

SEQ ID NO: 171385 - DNA, 669 bp, Enterobacter cloacae
atgaccgccgctgatttcaaacgccctaaactgaaactcccgaacgaggcagataaactgctgttgcactcttgctgtgctccatgttcgggtgaggttatggaagcgatccaagcctcgggaattgaatacaccatctttttctacaacccaaacattcatcctcagaaagagtatttaattcgtaaggatgagaatattcgctttgctcaacaacacggcgtaccgtttatcgacgcagattacgacacggacaactggtttaagcgcgccaaaggcatggaatgggagcccgagcgtggcatccgttgcaccatgtgttttgatatgcgctttgagcggacagcgttgtacgctgcagaaaatgggttcagcgtcatcagcagttcattgggcatttcgcgctggaagaatatgcagcaaatcaacgactgcggacagcgagccgccgagcactatccgggcatggtgtactgggattataactggcgtaagcagggtggttcctcccgcatgattgaaatcagcaagcgcgagcagttttaccagcaggaatattgcggctgcgtttattcactgcgtgacagcaatctgcaccgcaaatcacagggccgtcctctcattcaactcggtaaactttactacggtaaagaggatgagcaggcctga

SEQ ID NO: 171386 - DNA, 351 bp, Enterobacter cloacae; identical to SEQ ID NO: 76656

SEQ ID NO: 171387 - DNA, 996 bp, Enterobacter cloacae
atgaatgatgcaccttcagacatcatatttcactatccaccggagctattcaatctcttggtggatgttgtgccgttgctcaatcgctctaagcaggatgtgctggttttcttccggggcgcaggagtacctgacaacataacttctgacattgcagttcacttgagggctgcaccaaaggatgtcaacaagtaccagatggttcgcacagtacttgaacgcctcaacgcgaagggggaacatgctctccgtgaacggcgcgaagtgctgcggcgcgttgtggactttgcgaactttgattcgtgctggcccgcagaccaacttaaggccaaaggtcttgtcgccagtatccgcgaagtcgtcaaccaaaaagacgctttcacgcgcatgaacaatgcccgcgaagaagaacggcaaacccgcctcgctgagtcacagcggatcgcagcagaaaaacgtgatcgtagttatagaatcgagaatgccaagcagggtttatataaattatttggcactactgcgactgcacaggaacgaggaaaattgctggagacggctctcaacaatctttttcaagcctacggtgttctcattcgtaaatcttttcatttggttggtgaggctggtgaagggatcgtcgagcagattgatgggatcattgaactcagtggtgttctgtatttcgttgaaatgaaatggtatcgcaatccggtgggtaagcctgagatttcagagcatcttgttcgcctcatgtcgcgtgccgaggttcgaggtatcttcatttctgccagtgactatacagaaccagccattcttacggcacgtgaatttctgcaacacaaagttgtagtcctatccacgcttcatgagatcgtccgtctgcttgagcagcaagacgacctttcagagttcttcacaaagaaagtccaggctgcgcagatacacaaaaacccgtatttctgcccacacgatagccaagcacaaggtgcgttatga

SEQ ID NO: 171388 - DNA, 1089 bp, Enterobacter cloacae
atgactgcgagttggatggacatcaataagccgccgagcccagcaaccgctgttacggcagctcaggtggcgaacggccccattattccaccgcagcaaaggctactgacctactcaccagacgagtgggagggattcgtcgaggaatgggcttattactgcctcacgacgaagtatgcacacgtcctgcgtttctctggtgctggcgatatgggtattgatgtcgccgggttcgttggcgatgaacgcctgctgggggtttgggacaatttccaatgcaagcactacggcaatgccatcaggcctagtgatgtttgggttgagttcgggaagatcatctggtactcgtacaaaggtgaatatacggtccctcgtcgctactactttgtttcgccacgaggtgctggtacgtcgcttagccgcctattttcgaatgacacgaagttgcgtgaggaattgttagctaactgggataagcatgtgaaagatgcaatcactagcacacaagaagtgttactcgacgcgaagcttcgtgcctatgtagactcattcgattttaccatcttcgacgccaagactgcgcttcagcttgttgacgatcacagagccacaccggttcacacagcgcgctttggtggtggactaccaacgcggcctgcatctgaaaagccgccccaagaagttgccgccaccgagagtcgctatgtgacgcagttgttcggcgcatacagcgaacacacaggaacaatagtgactgacccttcggccttgcccgtgacgaaactcaaggatcatttccgtcgccagcgcgaggcgttctatgaggctgagtcactgcgcgtcttcgcacgtgatagtgtcccgccaggcacgttcgaagctttgctggatgacattcatgatggcgttattgatacgcacgacgggaaccatgctgacggctacgaaaaggtctgcgctgtcaccaaggctgcccgcgacatgcaaattacggcaaacgccctcatcatttgtactaaccccaaggatagagacggaatctgccaccaacttgtgaacgaagagcgccttcggtggacacgatcatga

SEQ ID NO: 171389 - DNA, 495 bp, Enterobacter cloacae
atgagccaagaacataagccaattaccttcaatagcccacttgaggcgggtatccgtgcggtctcgattctgggtgctgcctatccgcaaacctacgacctccagcggcttgtggcctttgactaccttcttgttcacacgggcgatattggtggaccagacaatttgcacccaccgacgccaatgcgctctgctgaattgctcgtgcgccgcaagttagttgagcaatcactgcttctgatgatgacccgtgacctagttgagcgcgaagtcacatccgagggaatcaagtacggcgcgggtgaaaatgctgcaacgttcctgtcatcagtatcttccaactatttgctgtccctgaaggatcgcgctgtatggcttgtcgaaaccattggtgatctgacggatgaacagttcaaagccatgatgcgccgtttcttcgataaatgggtcgaacagtttcagagcattgagcaaagcttaggaggtgatgcatga

SEQ ID NO: 171390 - DNA, 1881 bp, Enterobacter cloacae; identical to SEQ ID NO: 76682

SEQ ID NO: 171391 - DNA, 141 bp, Enterobacter cloacae
atggaccgcagcgccgtgtcccgcgtaaaaatcccttcggctccggataaagagacctcgcagaaattcagaaatacctccctgattctcctttcagaggaaagttcttcgtcccttccggcctccaaaacacaggaatga

SEQ ID NO: 171392 - DNA, 1128 bp, Enterobacter cloacae
atgaaaaagaccgcctggcttatcagcctgatgcctccgatactgtctcttattattataagaacatatcttggttattttaataacggctcgttatttacagagaacctgtcagcaacggggatatttaattacgtctttatttttatggtactaactacaacaggggttgggttgatttttttcttaccttcactcattttttgcttgtccttgccgaaaaatgtgaaaacaattcacaactaccgtgacataaaaggaaggatttctctggctgccctgctgtcctttcctctgactgtatttacattttttctgtgggcttatctttccgctggccacccggattatgagcctgcactgggatggctcctgtcactggcagggatctcatcggtcgctctaatcaattaccttttcctcagactggcggcgaaaaccgctcaggaatttcagcgtactaaagctcgcagaaaaacagcgtgctggcttttcatcggtagtccgcttctcatttttaccattattctttgcttcacattttgcgtcagtaccattatcagatgggtagatacgcaggtagcgggagacagcattgtcgcaatactgaaactggccaccttgatttcggggttaggcgtattgttaatgttacccggtgtggtatatgtaaatactgataacgctgcacggaatgagtcatggcatatcagattcacccttgtctcagttagcctctggcttctcataaccagcatatatgtgtcatcgttttatcctgtcctcatcgacaaaacgatggcatttgcgggtatttcggactggcagacacggcgttttcaggttgaagaaagtaagtttccggcctcacatttcggccatcaggactggcatgttgctgataatatcccggggagaagttacacggtgcagggtattatggtttattcccttaacaacgtcagactgctgtgccctgaatccgtcagtaaacaatacaggaacatgcttcattttattccctgggatcgggtttatgaccagaacagatctaacgaactgaagaaggcctcagccagatgtcagccatttgtacagggtggcattacgcggctttctgaaaaatag

SEQ ID NO: 171393 - DNA, 984 bp, Enterobacter cloacae
atgactgatactgatacagctcgatggaacactgaaagcgctgctttgctagttctatcagaaatacgtggcgttagttattggtccctatataaggttgctcaaaaaggtatccgtttcagagatgttgtaacttgctcaacattatcaaaattcgaatcaattctcggagtgagactacatcgtgcaccatactctttgactgagaataattggtcgacttttcgtgatggaatgatttctgccgcgaaaagccttttaacacattatcatagcaacggttataaattaatacatcatggttctccagattatccggagaaattgaatgatttaaatgagcgcccttactggatttttgcgcagggcaatacttcgttgcttagtaaaaaatgtgttggtgttgttggtacgagaaatccaactactcttggaatttatttaacacaagcagttgtctcgcagtttattgcatcagattatgtaactgtaagtgggttagcttatggtattgaccaagctgctcatgaagcatctattttatttaaaatacccacaatagccattctaggaacaggtttaaattctaactatccaaaaaacagtgttggacttagggagggtattgtaaatgccggtggacttatactcacggagtatctcccacatcaaaaaccatcgcaagaaaactttgttcgtagaaacagaatacaggccgctttaagtgatattttaattcctgtcgaatggaacttgaaaagcggaacgtcgcatacggttcgaaatgctgctcaactgaagagaacgatactgtgtccattactaagaggtgaatctgttcgggaggagattaaatactctcaggacgaatactctgcaataatactggagactcctttgacgggatttaaagatgtgatggagttaattaaaacaaaatcgagtaataaattacaacaactgtcacttctgggggatgaataa

SEQ ID NO: 171394 - DNA, 1275 bp, Enterobacter cloacae
atgcatttgaaagctgttatattttcaatagcagatgttgttttgcccacaacatcaaatccgcaatctcagcaacttaagtcacgaatcgatgttgagttgaggaagttgttcgcttttttattatctaaaaatattaaagtcctttttctaacaaataacaataggaatgttaggactaataatggaaacattgcactggatgattatcttatgcaacaattcccagactcaatccattattgccgtgaacttaacaatgaaatacctgcgaaacaaacaggaagagccactgatttcatcatgaatgatttagatataaatcgtaatgagataatttatgttggccgttcagaagaagacttacaggccgcgacaaatggcaaaactttatttattaatgccacttggtatcaaccggtcactgagtatggttttcagttctctgaaccaaaagagattgcaagatttatcgatgtgttttgtttaagagaggaattatggggatggcagggccacttaaaccaagatgtccactattatgccttagctccctttagtactcataaccctgagtttacaatgtactctgccaatgcacgaaacttagctaagttatccattgggagccctgatttttggattaggtatcttggtgctagtatttacttctctggtttaagtgaaggtgcaagttttatcacaacttatgttggacataatgctaacgacccctataagttggcaaatatcatggagcatgacctcaaagggttggcagtatcatttaaaggtaaatatctcaaagatctctttataagacatactacagctgtaaaatctcagcaggaaagaatagagcgccgacaggttataataacatcgcaaactaatactgtgaatttaaacgcctctcctatcaaaaatcttaacactggagaacgatatgttaacaggccagtattacgaggaaagaaagtactagttattgatgacttctgcactgagggaaatgctcatgaaaccgccaggatgtatttaaaggctgcaggagcggaagttataaatatttcatggttaaaatttgttaatcgagatgtagccgtttgcgaacccaattgcagaataagaccatgggagacaaacaccctcacttctgaaaatattaattatatcggacgaatcggttatgcagcaaaccttactcatggcggtgcgcctcaagagttggcagataaaattagacaatatgatcattgggactggccgcaatag

SEQ ID NO: 171395 - DNA, 834 bp, Enterobacter cloacae
ttgattaataaaaaagaaactcagagggcaattaccgaagccaagcataactcctcatccaaagttcttatggctaattttttcagaaaaggggacctgaaacttaacagtgtaaaattagcatggtcagaagatctttattcgtggcttattgagtttgatgcagacaattcaccagcggaaacatgggttgattacttatactctcattatacttggccgataatatattggtccgtaaactcacgaagagttgtttattacattacaaatcaacaattcgaattaaacacattaggcgtagggacaagcttatcaataaaaaattgtgccatatgtgaaaagatgataccttttgattctgagaataattgtttgctttgcaataagaaaactgaagaatcgtcaccaaccaaacatgaaattaatgaaattcgcgagtttgatttaacaatctctcagggcaattttaattcagctgttcaaaaagaaaagagacgactattacccataccgttagcggcggctaatgcccgaagagtggcatttgaaaagtcatatagaaataaagtactaagcgaatcattacctggcggaaaacttctctacagaagtgcattagcttttatacaggcttgggttgcgttattaccaccagataaaacactagtattggatgagataacagacgcactacgtaaacgctatattcatctggagcaattaggtcgcactgaattacggaatgctttagcctgtgcactgtcaacttgctacaataaaaagcatcttattaaagttgaaaaaggggaatattcacctattgacgactaa

SEQ ID NO: 171396 - DNA, 1638 bp, Enterobacter cloacae
  misc_feature (1622)..(1631): n is a, c, g, or t
atggccaaaatgattccggcattcggacccattgataatgatagttatggagaaaaaacggtctataccctgttaaaagaagggttgtccgatgatttcaccgtgattcatagtctcccttggttgagttcggcggcccggcatttgggtatgaaattacctccaagtggagaaatagattttcttgttctccatcgtatctatggtgttttggttttagaggtaaaaagtgggatatatcgtgtagatggccctatttttgtacatatcaaaacaaatactaaagtagatgtagttaagcaaacacgtaacaatgtccatggattagcccgttggttagggggagcaacaacgttacggttgcgcattggttatggttttatttttcctgatagctatttcgatgataaagttataaatgcagcaatggtggatgcgtctgtcagaccatttagaagaatattcattgataaaagccaactcccggaaattgcaaagtatactattgatataatgcactattggaaacatgcattaggaaataatcctttggggagtgagaaacttcaattaataataaaatctctatgcccagattttgatggcactcctaactgggggacccggattatttatgataaccaactctggttaagactcacacatgaacaaatcaaggttattgaacttttgtcagaatatcaacgatttgttgtatctggatggcccggaacaggaaagaccctgattgggattgaattcgccagacggttggttaaagaacaaaaaaaagttttatttattactttcaataaccgcctgtctgaatatattcggcaacaaactcctgattcattatgcgacgtttttacctggcacaaactctgtcatcaggctcgtaatagattagctctgcctcccgagtcgccaacaggctggtttgaatcaggatgctgcgaggatttgcttagtgcattaaataaaaataagctaaaagattatgatgctttaattattgacgaagcacaggcgttacattcttcatggttggaaactttattttgttggtttgaaaataaaaagattattgcattttgtgatgaaacacaaacgttctcttttgaaaaagggacgaatcacgctgatcttcaaaagattattaactcccaattttccttcaacttaactattgtgttaagatgccccaaaaccgttactgattatttaatggctatcagaccctcttcatatcaaattacttcccccaggaataacgaaccagatacgttaaaggaattagttgtaagcgatccatatgccacactgcttgatgaaatcttacgactgaaaaaaagttctgtaccatctgatgaaattacagtccttgttcctactgatttagtgaaaaactttcttcaggacgacatgaaaacttttgatataaatattgaaactgtatctcgttttcgtggtatggagtcacctgttgttattactctggattcctcaaatatggaggatgctcaattgttttgtgcttactcaagagccacaactgtttttattgcaatttatgactcggagaaattagcatggagagaaaatcataattttttacaacnnnnnnnnnncagttga

SEQ ID NO: 171397 - DNA, 1197 bp, Enterobacter cloacae
atgtttaaagtcgatcagcccagcaatagtctacaaccgctccaagaaaccaccttcactaacgcgggtttcaccgagcgctaccacttacaggaatggctggcaaaacacccgcaggcattgacccgcaacagcgatgacgaactacttatcatacagaaagaatttgccggatttgacgacaccaaagagcgcctcgatctgctggctatcgacaaagacggcaatctggtgatcatcgagaacaagctcgatgactctgggcgtgatgtcgtctggcaggcgctgaaatatgcgggttactgcgcgaatctgcgcaaagaacatattgttgagatcttccagcgttaccttgatcagaacgaaccagaagaaacgcgtcctgcggctgacgtgctggctgaatttcttgagcacgatagcctggaagaggtgcaaattaaccagaatcgttcacagcgcattatgatggtcgcagcaaatttccgcaaagaagcaaccaataccgcactctggttaatgcaattcaatattcgcgtgcagtgctttaaggtcacaccttaccgttatggtaacgatgtgtttattgatatcaagcaggttatcccaacgccggaagcggaatcttacatgatcggtatggcgcagaaagaggctgaggagcagtccacgactggagaatccaaagctcgccaccatttacgtaaggcgttctggacccaggctctggagaaattccgcgttagctcatgttcactctacaataatatcagcccgtcaaccgaccactggttaagcgcaggttctggcatcagtggcgtttcgtacaatcttatcttcagcaaaaaagaaattagggttgagctttggattgccaaaccgtcagcacaaaccaatacatttgcgtttgactggcttcatgaacgcaaatccgctatcgaaaatcgctttgggcatgaaattttttggcaggccttaccggataagaaatcctgtcgtattacttacagaaaacccatcaacggcatcgcagatcaggataagtggccggagatggtcgactggttggtagaacatatgacggcatttgaaaaagccttttcaacatgtctaccggaacttaatcagttgattaagcgaacctttaacgggcatgatgaagctgaaattatcactgaagaagccgaacacgtttaa

SEQ ID NO: 171398 - DNA, 1347 bp, Enterobacter cloacae
atgagttctgaatggccactaaaaaagatatctgagattgctgatttcttaaatagtaagcgaattccattgaaaagtcttgaaaggcaaaaatgtcaaggcccatatccttactatggtgcttccggtatcgttgatagtatagataggtatatttttgatgggacatacctgttaatttcagaggatggtgaaaatttacgcactcgtaaaacaccaattgcttttaaagctcatggtaagttctgggttaataatcatgcacatattctttctgagaaagaggaaggagcacttgattatcttgagtattatttttccgcgctagatcttaatccttatattactggcgctgtgcaacccaagcttaataaagccaatttagattctatagaaataccatttcctgacaaaaaaactagattgtttatcaattcaacgttgaactctttgactcaaaaggtagcaataaataataaattaaaccaaactctcgaacaaatggcacaagccctgttcaaaagttggtttatcaattttgaaccagttagagccaaaattgcggtactagaaacaggtggttcgcaagaagatgcaactcttgctgccatgacggcaatttctggaaaggatgcggattctttggttgtatttgagcaagaacatcctgagagatattctgaactcaaggctacggcagaaatatttccatctgcaatgcgggatattgaatccgttaaaatccctgaaggttggcgtttagttcaattaagtgaaatttcctctttcgcatctggcaaaattaatgtagctgagttaaccaaagatacatatatctctactgaaaatatgcttggtaacaaaatggggatagagtgtgctacatcactaccttcagctaataccacaccatcttttaaatctgggcaaattttaatttcaaatatacgtccttattttaaaaaaatctggcttgcccgattttcagggggacgctctgcggatgttttagcgttcgagcataaaaaaaatatcacagccgaatatttatacaatgttctttatcaagactcattttttgacttcatgatgcaaacctcaaaaggtgtgaaaatgcccaggggagacaaaaaagccataatggaatggtcatgcatagagcctgatatacgattagttaaacttttctcaaataaagtgaaagagttttattcttatattgaaagtcataatagagaaaatactctgctctcacaattacgcgacaccctgctccccaaacttctctccggtgaaatcaccttgccggaagccaaggaattagcaaaggaagctgactatgtttaa

SEQ ID NO: 171399 - DNA, 1707 bp, Enterobacter cloacae
atggacaacgctgaacagcaatttctgaacgatctggatactaagttctggaaagccgcagacaagctacgcgccaatatggacgcggccaactacaagcatgtggtgctggggcttatctttctgaagtatgtttcagatgcctttgacgcccgtcagaaggagctgaaagagctttttgaagacaagtccaacccggacaatatttacgcgctgtctcgtgacgattacgacacggaagaggcgtaccagcaggcgatcgcagaagagctggaagttcaggattattacactgagaaaaacgtcttctgggtacccaaactggctcgctgggaaacgctcaaaaccaacgcagctctgcctgtagggacggttctggggaaagacgatagcggcaaagatattgtcatgacgtcagtatcgaagctgattgatatcgctctggacactatcgaaaacagcaacccgaagctgaaaaacattcttaaccgtatcgggcactatcagcttggcaatgacctgttaatcagcctgattaacgtcttctccgataccagtttcagtgaacctaaatacaacggcgtgcagctcaatctgaagagcaaagatattctcggtcacgtttacgaatatttcctcggtcagtttgcgctggctgaaggcaaacagggcggccagtattacactccaaaaagcatcgtgacgctgattgttgaaatgctccagccctacaatggccgcgtttatgacccggcaatgggttctggtggtttttttgtttccagcgatcgttttatcgaagcgcatgctgatgaaaagcattacaacgccgccgagcagaaacgtaatatttccgtttacgggcaagaatccaacccgaccacatggcgtctggcggcgatgaacatggtgattcgtggcatcgattttaacttcggtaaacagaacgccgatacgttcctgaacgaccagcatccggatctgcgtgccgattttgtcatggcgaacccaccgttcaatatgaaagagtggtggaatgcaaagctggaagatgacgtccgctggcagtacggcacaccgccacagggcaatgccaactttgcctggatgcagcatatgatccaccacctagctccgaaaggttcaatggcgcttttgctggcaaacggatcgatgagttccaataccaacagtgaaggtgaaatccgccgggcgattattgaggcggacttggtggagtgtatggtagcgctgcctgggcaactattcaccaacacccaaatcccggcctgtatctggctgctgaccaaagacaaatctggtagtaacggcaaagcacaccgtaaaggtgaagtgttatttatcgacgctcgtcagattggttttatgaaagatcgcgtgctgcgtgacttttcgacggatgacatcaaaaagattaccgatactttccatgcctggcaggcggataaagattatgaagatgaagcaggcttctgctttgcagccacgctggacgatataaagaaaaatgattttgttctgactccggggcgctatgttggtgctgccgagcaggaagaagacgatgagccgttatccgagaggatggcacggctgacggcgcaacttaaagatcagctcaaagatagtgcaagactggaagcgcagattaaggcgaatctgggagggctgggttatgagttctga

SEQ ID NO: 171400 - DNA, 1197 bp, Enterobacter cloacae
atgaacaataacgacaacgttcctgtaaacccagttttgccgtcggaagagcataaaggtaatacttattcagagaatattcccctgcccgggcatcaaacccacactttcaatcctgctgcagccattgacacgccactattcagggctctaaatcaactggaaaaattatcatctgcccgttccccaatatttacgtcactggcagagctgaacaaatcccctgtctttcaggcaataaacaaacagcaaacaatgctggatgcgatcaagttacccgaggtaatgaatgtggtagccaattcacaagcatccaggatcatcgatagaattaacactttcacccactattatgaccgcaccttcaaatcacttgcgaggcaggcaattcctgccatggatgtactaaaccggatagcgcgaaattaccggattgaatcccgaatcaactatctttttaactcctggtccgcctctccctcaggtcaacgcgctagacagttcgcagaacaattgcaaaaaataaaccagcgagctctaccgctggataacattctcagggatgttatccagcaagggaaactggaaccatcccagtacgaactggcgttccagtactgggaagcggcattttcacggctcgctcagcaagctgaagataacgcgcctttgcatcggaatgaaatcctatcctcatatgacaacggaggttcttctcaggaacaatccccgacagccggttttttgagtcttctcagcacccaggcactggtcgacggattcaaaaaattacctgtccccctccaggcattcatttgctggttcttttatcaggtaattgtcagcatggttgaggacagtataaaagcagctgtgcttgatggaatcaatgaagtgaaaactgaattcacatcccctgcgaagccaaagacattacgcaaaagtactattgttgcctctcatccggactttaactgggagcagctgaatcacttccgccttatcaccggtacgaatgtcaggctcagactctcgccgacaatgaacagcgaaactgttgaaatgcttaataaaggcacggtggttgcgatcatggatacgcagggcagacaatggctttacgttcaggtcgatgttgatggagaaaaaatctacggctggataaaccgctcttacaccagcagactcaggaactga

SEQ ID NO: 171401 - DNA, 3513 bp, Enterobacter cloacae
atggcgaaactcggcacaatcgattttgacgactgtattcttgacgctttacgggatggccgactcgttgtcttcgctggcgctggcgtttcaatgggctcgccatcgaacctctccagtttctggaatctggcatccgacatcgcccaaggcaccggatttgttcccagtgaaccgctggatcggtttctggggaaactgcaacatagaaacgttaacgttcatgaacgtgctgcgcacctcctctcacctgcagatagtatcccaaacactcttcattacgacttgttgcgattgtttcggacagctgatcgcgtcagattagtaaccacaaattttgatttacatttcgaggccgcagccgatgaattatggggagatattcccgatgtttataaagcccccgctttaccacgaggttatgatttttctgggatagttcacgttcatggtgccctgccaaaagcacaggatttagtgctaactgactcagattttggtcgcgcttatctgactgagggttgggctcgacaatttcttgtggatgtctttcgccaatatacggtgttattcgtaggctacagtcacaacgatgtcgttatgaattatctggcccgtgcgctgcctgcagacagtgttgcgggcagattcgctttaacggaagaagatggaagctgggagctgctggatattactcccattcgctttacgaaaggctccagcgaagatccatttagagaactctatgatggtgtccagcgactctccgagcgtaatatgcggggagcgctggactggcagtcacgtcttgctgaactgggtagccgtactccgccaacagacgaagaagcgatcagtgaggtcgaacaggcactgcgcgaagtgtacactacacgttttctactaagcgttgcgcgcgatccggaatggctgcggtggctggatgcgcgcaagcatcttgatgcactatttggcaattctgttctcaatgagcgggataaactgcttgttcagtggctgacacaacattttataatcgagcactcacacgaagttctggatattgttgcagcgcacagattgcagatgagtccagaactctggtgggctgttggccgtgagctcggcatcagtgataaatccatagagacgtcggcgcttaagcgctgggcctctatcatgctggcaactgcgcccaataataatgcggatcaccacgtatttatgtggttggctgaacgatgtgcaggccaggaatgtattgaaatgacgctggcgatgtttatggctatgagcgagtatcggcttatagttaaacagagcgttgcattttctaatgatgaggggcctgaaagccgccgtcttgatgcagagtgtccattgcaagctgatcactggtcactgaatgaagtttggacgaagcatctgaagccgtatctaccacgtatagctcagtccgtcttatcacgggttgttctgcgcctggaaatgatgcacgttgaattaactgcttgggataaagccgcgccagtgtgggaccccatcagctatgggcgttcggccatagaaccgcatgaacaggataagtatccgaaggctattgacgtcctgattgacgccgcgcgcgatgcgctagagtggttcgcaacagattgccctgcactgctaggtgcgtggatcgagagtttggtgagctcgagtattccgctactgcgtcgcctggctatacactcaataacggcttatcccgagtggtcacctgaagagcgtctgaagtggttgctgggccgtacaggactccatcaaagtaccgaacatcacgaaatccgccgcgctgtagcaatgaattatccagctgcgacagagcctgcacgtaaagccattgttgatgcaattttagcgcacagtcttgaggaatataatgactggcctgctgagaagataacggcttactctcacttcgactggttatcctggttgctccagtcaaaacctgattgcgagattgctggtgcagctttggcgcctatcaggatgcagtatccggaatggtgtccgtctgaacattcagacttcactcactggatgggatcagtaagctgggtggaatcagagagtccttggtcagtcgagcaacttctttcacaagaacctcgtgaacaactcgatgaattgctaagtttcaagcgcaatggcttcgaaggaccaaatcggggaggtttgttgactaattgcttggaagcatgcaggcagaacaccagttgggcttttgcacttgggcacaccttggtcgatcaggctctatggtcatctgatctttggccagtgctgattcagggactgcaggaaagcaaactttctgcagaaggctggcaagacttgctaaccttggtatctaaccaggaattacagtcagcacatacttacgacatcgcaaatctactatttagcttagtgaaagatggcggcaagccatttgcgctggacttactggagcaagctaactctatagcactaccagtttggcaagccctggaaaacgacgctcaggacgaaaatattactgactggctgggccgagccatcaaccaccctgcgggagttattacaaatttctggatcaatggactgtcgttaattatacgtagtgaagcaggatccgagcgggttatgtctgagcgttaccgccattggtttacaatggtactgcaagacgctacttcaaagggagggatgggacgatgtttgctggccagtcaaacggcattcttttatggagtggatgaagcatggactcgccaatacattattccactgttcagcgatccagatcagcagaagtttgtgcaggtatgggatggttttcttatgtggggacgtttatatccagctcttgttgaagccttgttgccagcttttgttaccgctataccgagactcactgtcgatctgggcgaacgtcgccaacgatttgttgaattctatacttttctcatcgtattccatgtctcagatccaatgcttcaattattaccgacgctgtttcaatatggttctttggatgaccgattaacattcgtatcgcatatcggaaatatcctgcgtcagatgcaacagccagccaaacagcaattgtgggacggttggttacgtcgctattgggagggccggttacaaggagtgctctctgttctggatgaagcggagatctgtaaaatgctggagtggctacctcaccttggagatgttttccctaatgcagtagcctttgtggtccgctgccctgcaattcgaatagagcacagccatattttttacgaattgtgtgacagtgaactggtaacacgatttccgacagaaacagctgaactgcttatttatctttctagctgcactattggctaccatacgagggacttatccaaaatagaggcacgtctgtcccaagtacctagctatgtccgtagtagactcgatgaggcattagcacgtgctggagtgatgaaccggtaa

SEQ ID NO: 171402 - DNA, 129 bp, Enterobacter cloacae
atggttgttcagatctccagcaaaaccggagatggtagaatttatatcaataatattgatattgaaaatgagtattttgccaaattacaattgcacatcaatgtgtgcacttcgtggcttgactcgtaa

SEQ ID NO: 171403 - DNA, 612 bp, Enterobacter cloacae
atgattgatgatattaatctcgaccaacgtcatgccccgttcaatacaaggtatctgcaacggatacttcgtgtaataactcaggccactacgcaacacccacggacgatggctgtccgtatcgatctcagacttcctgataaacacttcaacatcaggaccggccttttatcgcgatttatagaatctctcgacgcaaagatagaagcgcgatatcgaaaaaaaataaagctggggattcgtagttacccgtgtcacttgcgttacgcctgggtacgggaggtgggggaggtgaacgagaagtcacattaccatctagtactctttgtgaacaaagataccttcaatggtctgggaggatacggggaagagggaacggggttagccagcctgatacgcgaggcctggctgagcgctttacaactgagcacatgccctgaataccgagcgctggtccacatcccggataatccactgtattatctggatgtaaacgcccaagactatggtgcagtttacgataaactcacttttcgtctgagttactttgcaaaagagcgcaccaagtcctatagccctgatgaacgctcatttggctgcagccagtcatga

SEQ ID NO: 171404 - DNA, 906 bp, Enterobacter cloacae
atgaacggatttagcgatgagaggaatgcaattctttacttatatttcaaattgaaggagagaggagcagacatcactcctgaatcatcagaaacaaatatccgcaattatgaaaggaaagttcgggcgtttttgttgaaaaataataatgtcactgaggcatttgtagatactctcattaacaatatccgggttgaggctaaaaaggcgatcccttccgaagaggagctggagtggttcaccgaagatcctcgcgcaagttactggttactctgtaaagtagataaaactgagataggttttacctttgataacggacctcttcctggtcagaacgaaaattcgcttttgaaggaaccatctgtttacgggtttaatcttcctccgacgcatgaggcacggatgcagttcctgaaaaagaaaataattaaaacaattcccgttgggccaaccagagacgtcatactgaactggcataaagaatgggttgagttaattacaaagggtaatctcttttctgatgtcaacggaaaaacgggcgtcactattgaatggttgctgaagtatttgcaggataatggtattgcactgcaatggtaccagcatgccgaaagtactgatgagaaaattgcttactgttatgcatcctattttctctggcgtgagaatctgatgactggtcaggctgaaaaagagttattcattaaaaagttcaaaagtgcattaagcacgcaaaaaagcagagaaaagaagcgcgcaggtaataataaagtccttaacgtgacggtatcacaggaaacacatgacaaaatccgggatatctgtacccgtgaaggcatttcaaatgctagggccattgagtatgcgataaatctggcatggaaacaaaaagcaaacccacactga

SEQ ID NO: 171405 - DNA, 789 bp, Enterobacter cloacae
atgcaacagatacgacagatatcagaatacaggccggtaataggtatcatgggaaaaaccggctcagggaagagcagcctgtgtaatgccctgtttgccggtggggtatcaccggtcagtgatgtagctgcctgtacccgcgagccccttaatctgcatctgcaactcggtgaacgagccatgacgatagttgacctgcctggtgtgggggaaagtagcgctcgcgatgctgagtatgctgcgctgtaccgtgaacaacttccccggctcgacctggtgctgtggctgattaaggctgatgatcgggcgctggcggtggatgaactcttttaccgtcaggtgattggtgaagcataccggcataaagtgctgtttgttatcagccagtcggataaggccgaacccaccagtggtggggggcagttgtccatggagcagaagcagaatatcagccgtaaaatatgtctgctgcatgaactgtttcagcccgtgcatcccgtgtgtgcggtgtcggtccggctgcagtggggactgcgggtgatggctgaacgaatgattaagtgcctcccccgtgaggcctccagcccggtggtggcgcaactgcaatctccctttcgcacagcggcagtccaggaaaaagcgcgtgacgattttggtgaaaccgtcggcgcggcgctggataccgtgagtgccctgccgctgataccggctccggtgcgggcagtcatacgcgcggtgcgcgacactgtggtgtcggtcgccagggccgtctggaatttcttcttctga

SEQ ID NO: 171406 - DNA, 687 bp, Enterobacter cloacae
atgacacaggcagagcgccgccacgacaggctggcgatcaggctgtcgctgattatcagtcgcctcgtcgcaggtgaaacgctggatatgcgcaggctgaccgcagagtttggtgtatctgcacgtactttgtaccgcgattttcgcgaacggctgatgtatctggatcttgaatgtagcaatggttgttatcgcctgcggacgggcgtgagtggtgcccaggccgagctggatgtgctgaccttcgctcaccgtaccggtgtggccgatctgtttccagggctggatcgtcggctggtcagcctgctgctgaattgcaacgacgtgccctgtctgaccggtgaagccgtgggtataaccagcccgtcagcgtcagtgtcattttacaggctggtcaaagccattagtgcctgctgtcgcgtaacgctgcttgctgacggacagcgctgtgaacggctggcaccgtaccggctgattatgcaggaaggtctctggtatctggtcgctgaatatcaggaactacccacagttttcacgctgaatgaaatccatgtagtacagcccacgacggaagtatttaaacgtaacgagaggctatggcggatggcagagaacaccggttttgcccgggccctgccgcatttccgctgcatccagcagtcactgaatgcattttcttcaccctga

SEQ ID NO: 171407 - DNA, 2832 bp, Enterobacter cloacae
atgaagcgaaatctgaataccagttatcgactggtctggaacgaagttcttggcgcatttgtggttgtttcagaactggcaaaagcaaagggaaagcggactggcgcagtactcgcactggccgttgccgggctggcctcgagtacggcactggcggcagagacctccgtacctgtcggagagacggctgacggggtggttctcagcaatcacgacacgcagctggtttacgggcggacgaataacaccaccattaacacgggtctggagtacggccgcaatgatgaagataacaaccggggcggccagttcgtgcaggatggtggcgtagccaaccacaccaccataaacagtaacggtcttcaggcggtgctccatggcggcagtgccagcgatacaacggtcaatgccggtggtggtcagagcgtacacggtcagtcttccggtacggtactgaacggtggcgaacaatgggtacattccggcgggattgccaccggcacgatcattaatgaaggcagctatcagctgattaaagaaggtgctcaggcaattggttccgtcgtgaataccggcgcacagggtggtccgaatgcggagaacagcgacgggatgtttgtggcaggttcggcgatgaacaccactgtcaacgaaaatggtcgccagattattgccgcaggaggaacggcagtcaccacgacgattaatgctggcggtgaccagagcgtgcatggtagtgcagaaaataccacgctaaatggcggctatcagtacgttcattccggtgcgtcagcaacggataccgttatcaacagcggtggctggcaggtcgttaaggacggtgctcaggtcagcgacagcacggtcaataacagcggcaggctcagcgtggcggcgggtggtaaggcctcagatatcattatcaatgcaggtggcgcgctggtgacaaatacggctgcggatgtgtccggcaccaaccgactcggcaacttcagtgttgattcggtttccggtaacgcaagcaatgtggtgctggaaaatggcgggagactggatgtccttactggtgatgctgccgacacaacaacggttgataaaggcggcgtgctggcggttaacaatggtggaacggcgacaaacgtgaccatgaatgaaggcggtgccctgattgctgacagcggttcaacggtcagtggtacaaacgcgcatggtgaattcagcattgatgctgcatctggcaaagcccgtggactctggctggaaaacggcgggcgcttcagcgttaaagcgggtgccgtcgcggcaaacaccaccgtgggcaacggcggcgagctgagcgtgggaactggcggcggcctgagcggcaccaccagcctgaccgcgaatgcaaacctgacggttacgggggatgttgtcagcctgggcaccattaaaaatgccggttcaataaccttcgccccggagcagagcggcaaggttatggcgcgtctgcccgctaacgcctttactccccgtacgctcaccacgacaaatcttgtcgggcagggcggcaccattaacatgaatatcaacctggcgcaccctgattttccggcggacaggctggtcatcgacggcggacaggcaacggggaaaacctggctgaacttcaccaactcaggggatgccgggctgggtctcgctaccacgggtgacggtatcaaagtggtggaggccatcaacggtgccacgacggatgccggggcttttgcgctgggcaaaaaactgcaggcaggcgcgtataactacgtgctgaaccacggtactgcggatgaaaactggtatctgtccagtgaagctggttatcgtgctgaagttgcgctttatgcttcgctgtttgcgcagagtatggattacgaccgggcgctggcgggcagttacagcaagcgcagcgccgtcaaaggcgacagcggcgtctgggggcgcattcagggcggccacatggggcatgataataacggcggcattgcgcagggtgcgacaccccaaagcagcggcagctatggttttgtgcaactgggcggcgacctgctgagcacgccgtcgctgaacgccggtgtgtatggcgcggcggggcactcttcagttgacgtgaaagatgatgaccgctcccgtgccggaacggtccgtgatgatgtgtacagcctggggggatatttgacggcggtacatgcgaacagcgggctgtgggcagacgtggtggcgcagggttcccgtcataatctgaaagcaagctctgatgcagacagtttcgctacccacggctggggctggctgggttcgctggaaacgggcctgccgttcagtgtgaccagtggcctgatactggagccgcagcttcagtatatctggcagggactgtccctgaataacggccatgacaacggcggctatgtgaacttcggcgacggtagcgcacagcacctccgcgccggtcttcgcttcggcagccagtcggagctgaccttcggtaacggtgcttccacgcaggccgcttttggcgacagcatgaagcacagcgtaagcgaactgccgattaactggtgggtgcgcccgtcagttattcgcaccttcagctcagacggtgatttgagcatgggaacggccgctgcgggcagcaatgttacctttaccccgtctcaggatggcacatccgttgatttccaggcgggtattgatgcgcttatccgccagaacgtaacgctgggtattcaggggggttacacccgtagcgttagtggtagcagtgccgacggttataacgggcaggctacactgaaagtctcgttctga

SEQ ID NO: 171408 - DNA, 465 bp, Enterobacter cloacae
atgaattcattaaacaataagagtgttgcgtccttgaatgaacagtcggcagtaacacgtattaccatctctgctgtacctgatcatcagcggcttgcattctggccgacacactttggttctgtcccacaatggatactcctggagccccgcatcttcggatggatggaccgcttctgtgatgagtacagcggtggtatctggtccttttacaccctcagcaatggcggcgcgtttatgacccctgatgctgacagtgacgataaatggcatctgttcaacagcatgaacggcaatggtgctcaaatgagtgcagaagccgcaggtatcgcagtctgcctgattgaatacagccaccatgcctgccgtacagagtgtgacgcaatgaccacgcactattaccgcctgcgggactatgccctgcagcatcctgaagcccacgccattttgcgtatcattgactga

SEQ ID NO: 171409 - DNA, 204 bp, Enterobacter cloacae
atgcaaactgaagctgaagtattaaccgatcatagcgagctaatttgctcgaccagtattgaacgtattgttactggtcgtgataacgcgcttaaggaaattgaagctctgattcttcaacttgaagaaatctcccgactgacttccatgattggtggcaatactgcggatcactgggcgatgagagagggggggctcctttga

SEQ ID NO: 171410 - DNA, 795 bp, Enterobacter cloacae
ttgcaaaacaaaatcaaagaacttcgtacccaactatcaattactcagcgtgagttagccgatatggtcggtaccagccagcaacagattcaacgtatcgaagcagggaaagtagcggctaagttagggttggcacaagcgatcagtgctgttttaaaaaagccgttgaacgctgtttttcctgatagtgataagctgctacagaaattgcgtaatcaaggtagtcgtagtagcgatgaactgaaagatattgccgctagtggtattgaaatggatggctgcttttggacggtgaagctctggctacgagggcagaaagattatttgctgttacctatttccccggctgataaacgtcgttttttctcttactttcaggaaagcgcagcgccagactacgagcatttttttgtttttgattcagaacaacatcgttatgccctaaacacccgagaagtgattttccaccaattcttgtttgatggctttccacctatctctgatgaagaggatgacgatgcaaatgaaggatgctatggcaatgttcatatcaccatggcgaatggtggcccaatcattgagctatgctgtgaatcggagacatcagatgatgagttcgacgatatcggccagttgaatgcattttttagtattcttgagtcagaaccggaatcaacggagagatatcagataaccgacgaagatggagaggatgctttcatccgtattggctctgttgcgatggtccgagccgcgcttgatgtgctggattcggttgaggaagagaatgaatga

SEQ ID NO: 171411 - DNA, 684 bp, Enterobacter cloacae
atgaacatgaacaaactgctgatactttcattactgctgaccgcctctggctgcagcccacaaaaaccccaccctttacagtcaaaacaggccgccagcggggactggacgatgccttatggcaagtggattttcgcttttatcacccccagtgagttgccctcaggtgtgcagcatgccagggtgatcgataccgatggttacttgtatacttttaatacacttaaccagccctctaccgacccagattccgtcaacaaatgggcaaaaagtgctcatggctttggcgatcagttcaacaaagtcaacaagcccccacagtacattgttttctgctgggattcctatattgaccagcaagcctatgaaaccagcgccgtctttggcccggacacctggctgcgcatgaaaacacctgcagatcatatcagtcccacgggcagaactgtctggtacaacagaatggtatttggcctctcccccggaggtaaagtcaaaatctggttttcagatgtcgccggacgccccagcctgcccgtcaaaccgctgaaactgacgacccgctccggcaaggacctgaccctgtgcaaagactatgtcgttcccggtggtacgtttaacgtcatcccttcaacgcaggaatttatcaaaggcaaaacctatccctatggcaactgggattaa

SEQ ID NO: 171412 - DNA, 882 bp, Enterobacter cloacae
atggtgctggcgaaccggtacgactggcagctgttcctcgagataacaggggagggcggcagcggaaaaagcgtctttactcatatcgccacgatgctggccggcgcgcataacaccgccagcgggaatatggcggcgctcgacagcgcgcgcgggcgggcgcagttcgtcggaaagagcatgataacccttcctgaccagcccaaatattcaggggagggtaccgggataaaggcaatcaccggcggggatgccgtggagatagacccgaagcacgagcaccagtacaccgctgtgttgcgggcggtggttgtagccactaacaacacgccgatgattttcaccgaacgtgccggcggcgtttcccggcgtcgcgtaattttccagtttaaccggcgcgtcagtgaggaggataaggatcccgaactggcagaaaagatatccgctgaaattcctgtggtagttcgtcggctcctggcgaactttgcgaacccggaaaaggcgcgtgcgctgctgctggagcaacgaaacagcgaagaagcactggaggtgaaacagaaaacagatccgctgtatgccttttgcgctcacctcgagcggctggctgactgtgcgggaatgatggtaggaaaccgcaatccgcctcactatccgcgtatttatctctatcacgcttatctggcatttctggaggcaaatggattcgataagccgctgacgctgaataaatttgccgaggggatggaaagcgccatgcgggagtttaatcatgaatatcgtaaggagaggaaaaatcggggcatggtgactaacgttgagctttcggaaagcgcggaggactggctgccgcaggcgcacccattagctgagaaaaaggaatga

SEQ ID NO: 171413 - DNA, 135 bp, Enterobacter cloacae
atgaaatcgttatttcaggcgataaagtggatgttgacgcatcgcaggctaaacaaaattctgctggtgctggtgctggtgctggtgctggtgctggtgctggtgctggtgctggtgagcatcacaatgcactga

SEQ ID NO: 171414 - DNA, 1746 bp, Enterobacter cloacae
gtgagcttagattggatacttcaaaaaaaagaaacccaccgcctttattctaatgcgacttgggttccattgcgggcagttaaaacaaatgaacaaggccatgtatataaggttggttatgagagtgatttcttcggttgtggttctatagctgttccaattgagtttaaagaaaaagccgaaaaccttagttggaacgatattggaattgtagaaacaaaaccttatgcatacaggaatggtcaatattctcctgtagaccaatatgaatatcatgataatgaacctataggcctacacttggtttttgattattcccttccagtgttgggtgggaatatatggatgctaaatcctgatttgattatggctcttcggatagtcaaagaggggaactcttgggttagaccagaagaaaattttgttgaagttgttcgagagttttatgatagtcaaggtgaaccaaatttaattgaaataaagcgagagtatttaattgattatcttgctgcaagaaatttatcattgcgtttatcgtattataagcagcgtgttataaacgttgcatctcttgaaaatagtcaatttagtggattggcagatcatcatgaagaacaaagggatggtggtcgtttccaactaagagtctgtagtaataacgacgtgtttggtggtaaatgggctatgttccggacttggcgaacagatattgatgaggatgaagatgcacctgttatggggccggaaaacgaaagtaatactgcttacgaaaaaaaggagggtaatcatagtggatatgaagggactcgaattgaaggagagttctggcgagatgaatggattgaacatcacggcttaagcaaacgtgtccgaggcgatgatgatcctaatttgcctcattttattattgaaactgatgggacacgattagcgtcctctaaactgaataacgaagatatcgggcgctggttatggtttcgttcaagtatcgtaaatgaacttttaagctttcgcggattttctatcaaatggtttacgtctgaaacaggagccttaatatcggcttcgcaaaaaagtgttcattttgggataaatgctgcagatctcattaccgtctatgcttgcgacattgctcgtctagatggctgggaacaacatgtctgggccgcgcataatgttgtccctgatggcaaagtatcttctgagcttttggctgcgcaagttaaagcgatgccagctgaaacttatgcagttgagttcttgttttttgaagttatgaaaatgttggaagatatatttaaagaaagacttggaattgcattgttctcacatgatattgatattaatgaggctaaaaaaaatattctaaggtttgtaagcagagatcaggcatccttacttcggttggctaaagaaattgtaagatatttttcagatagactaaatgtccgagaattaagaaaaatatcaatgcatccagataaggaaaaattaggttcaaataaattattgcaaaatattttatctcaaaaagtaggggaagagaaagctcgagaaatttttggaccgatagttggtgcctatgatatgagattgggagatgctcacccaacaagttcgaaaattggagatgctcttagactcgctggagttgaagatgatatctcctatttacgaaaaggtgaacgattaatttccaatgtcggtcaatctatttggtttattgggaagtatattaatgaataa

SEQ ID NO: 171415 - DNA, 729 bp, Enterobacter cloacae
atgaataaaaaaacaatgcaaaatggttcgaaagtaatcattgatctttctaatccattagagcttcctcttcactatattgaacggctaaataatatcaaggaactttgtgaatccattgaattttctgatgaatttgttcagcatcaaaatgtaagaggattagtgagggatataaatgaatactgcctgcaaaataaaatagttggtattcactatacaagagctgaacctgaaagcattttaaaaaaagggttgctgatacgaaatggtagagatataagagaaacatttcttaatgaatatggatatcttttttcagaagatgaattaatctatatgagaaaagtttggcataaatattaccgaaatcaacaagaatcagttagagatggaagggttttcttcaacttcactgaaacagcactggataatcgtggagcggaatttttactgggcatgtatggtggtgaacaaatcaatatgtgttttgagcctgaagagcctatcggttcaaaattaaactcaattggtaaggctatggttatcaggtgttcattagacccccatagaattaaaacatttattgaacacccatggggacaaatacttatgtcctcatttcattcactacataaccatgaagttcatcaaatcgatcaagatggttatcaatttgtaccagtaaagcctgaagatatccttgagatcagagtattggatcagtga

SEQ ID NO: 171416 - DNA, 441 bp, Enterobacter cloacae
gtgattggctacgattgcagtctgcacgatgcagtagaaaaaggccgtgccgcagtgctttatccccatgggttgcatgtgttgctgaccggaccttccggtggtggtaaaaccttctttgctgaacagatgcaccgctttgcctgtgagcacgttgctggttctctgccgccgctggtctattttaactgtgcggaatatgcccataatcctgagctactctcttcgcacctgttcggtcatcaacagggtgcctttaccagggcgagtgagaataaatctggcctcgtggagcaggcggacggtggctatttgctactggatgaggtacatcgcctgccgtatgaaggacaggaaaagctattctccattttcgataaaggcgaattccgtccgctggggtcggggtttgagggccaatggaacgaaaacgtacgctaa

SEQ ID NO: 171417 - DNA, 339 bp, Enterobacter cloacae
atgaagatgagaaggattgaggtagttctgagtgaactagaacgactaacctgtgggcttgatactgtcgatctggcaaagggaacggcatttaccgcggaagtcattggctttaacctcgggctggcgcgcaactcggtcagtaaagatctcaatcaactctgtaatgatggtctggcgattaaaagccggggtcgcccggttttttcctgcatcgtcaggcgctggaaacgctgctggggcgtaagctggatgacgccgaacgtgaagtacgtacgattgccgatctgttgccgcgtcaggaaggacatacaatcgacgatccgtttaccgatgtga

SEQ ID NO: 171418 - DNA, 618 bp, Enterobacter cloacae
gtggatattcaagtctggttttacttcgccgtagcctgtttcggtctggccattacgccgggccctaatgcgatgctggttatggcacacagcgtcaggttcggcccgtcaacagcttttttcacaatctgtgggggggtgcttgcctttattttgttgatggtgatttctatgtttggtattgatgtcctgctgaagacatatccgtcactattggactatatcaaactgtcaggagggacttatcttatatggctgggtataaaacagtggagacaaagaaaagtggagatcgacgtttcgatgggctgtcggggaaacgtcaaacggctcaatctgtttgttcagggagccatttctgctgtatctaatcccaaagtttttttattttttggcgctttcttaacccagtttattaacccgcaaaaagatatcatgatccagttcatcatcatggcagcgactttcgcgtttgctgaattctgtgttgagatggccatcaatctgacggctggtcgctttcgttcctatctggcgagaaacgggcagctgttttgtatgttttgcgggctactttttatgattttaggcgggattgttcttactgcaggcctgtga

SEQ ID NO: 171419 - DNA, 1020 bp, Enterobacter cloacae
atgttaagaaatgataatgcagttaagaacagcgttaaattcactctcctgcttatgccgggcttctcattactgtccctgggcggttttcttgataagttaagattctcgggagattgcgaggattacgggcggcaaatttcgtgcgtgtggaacattgtctctcttgataatctgcccgttcaggcaagttgcggtgcagtcttactcaacgatactcctctcaatgaaacggctataacccccgacctctgcgattacttcgtcatcttcgggggtaatcatccttccagggttatgcaaagtacgtccaggtatctccctctgctaagacgcctgaacctgaatgctattaaattagtgagcattgataatgcggcatttttactggctgactcagggatggtcagggatcgaatcctggtgcactggcggcacttttctgaatttcaggacacatttcccgctctcacgcctgttactgatcaaaatgtgatggaaaatggccgtatttattcctgtcccggcgggaactcaaccattgagcttgcagcatatcttatcgaaaaaaaactgggtcgcgaaaaggcgattaaaggactttccgatatgctggtcgccgggttttctcctccaacgtgtaccagctggagcaatccggatttagagaagctaacaacaccagtgcgtcatgctattacatttatgcggcaaaacattagcgcacatctatccgccgagataattgcatctaacagcggtttgtctagaaggcagctggacagggttatggtcagtgaaaccgggctaacggtgcgacagacattttcggaaattagactggattacgccagttggctcatgctgaagacttcaagaaagctagcagagatagcaaatgattcaggttttactgattcctcgcatttcagtcgcctattcagaaaaagaacaggtctgacgccggcaaagtggcgtcaggagaacaggctgagcagaaatgatgagtacacatgttaa

SEQ ID NO: 171420 - DNA, 2067 bp, Enterobacter cloacae
atgatgaaaaacgtggtgaagcctcttatggctggaattgttatggtcacggcccccgctgctgcgggtgccgtgacgccgcgcccgatgttgaccacggatattgcgcgtgtggctactctggatgaacccgctctatcacctgatggcagcagagtggtgttcagccgcagctttcttaacagggccggggacaggcgtgaaaacgagctctggatcatggatcttgacaaacgtcaggccgcccccctttttgaagctccgcttaatgacagcaatccggcatggtcaccggatggtgccagcctggcctttcttcgtaatcaggatggcacgatgcagctttatctgcgttcggataacggaggaactatctgtgcactgacggcactcaaatccggagtgggggactttagctggtcccccgatggccggcaaatcgccttcacatcggctataccggccagacccgacattcccgatttacccccgggcgtccgtattttcacccgggctgactttcgtaacggcaacgattacctcgatggctccaccctctcacagatttgggtggtggatgtttccgcctcctgcaacagtccccatcccaggcagataacccaggcggcgacttctgcaacgctgtctttctggtcgaatgatgcgaagacagttttcttcaccactaatgatacaattgaaacctattatggcggcgggaaatcctcgttgcgcagcgtcactgtggccgatggcgcggaatcactgatacgtgtgctcaaagagccgggcagcggggaggatatggcttccgccccggcgctggtgccaagcccggacggcagaaaaatcgctttcacctatggcagtccggacgctcccaccgactttgcccaggacgatatatttgtcatggatttgcagactggcataaccagcaatgttaccgccgggtatgatcgggaggctggcggtgatggctttgcatggctggacgatcgccacatcatcgctgttggctacgatacggggaacaccggccttatcaaagtgggtattgataacctcagggtgacgccggtatggacgggagatcgcgaagtccgggattttcgtcttgcatcccgggcaaatcggctgattgctgttgccagcgattccgtcactcctcctgagctctatgagattaaagacggtgagggtgtacgtttaaccagtttcaactggcacctgcagactgagctggcactgacccgacctaaggcaataaactataagggtcctggcggacagataatacacggctggctgcagtacccccacgctttcgatgccgcgaacaaatatcctctgattgtctgggcacacggtgggccttacgcccactggagcagcggcttcaatgcagatgttcaggctatggcggctgccggctatctggttatgtatgtcaatccacgcggcagctcgtcctatggtcaggattttgcgagcgcgctggccggagtatggcccggaccggagtacgatgacatcatggcgggcatcgactttctgatatcacgtccctatgttgatgagacacggcttggcattgcgggggggtcggccgggggtattcttactgactgggccattacccggacccaacggtttaaatcagcggtttcaatcagtgacattgcggacaactattcgtactggtttatcggcgatcagcctgatttcaattattctgacaagcaaccatggctggataaaggtgagattgcccgttcccctataatacatggacttaacatcagtacaccaaccctgtttataagcggaacccgtgacttccgtacccctgcggccgcaggcggggaaatgatgtttcgtcttttgaaatatctccgtgtaccgacggctctcattcagtttgagggggctggccatgtcatttatggtagccccgaccctcgccaccaggggttaagcatttactatctgattcgctggatggataaacatttgaataataaatctgttcctgaatttgaagagctacctgaaaaggcgcaatga

SEQ ID NO: 171421 - DNA, 477 bp, Enterobacter cloacae
atgctcattaaagcagctattcctgctaatgctacagaacttgaacaaatctattcattatcgtttgaatctaacgccgctttttttcctgatgatatggagcaagaagatgacgatagtgaagaggatttttcatttgagtcagcaataatgatgcctgacaaaactgtgctgggattatgggtgaatgatcacctcatcggaggtgctgtgatttcctgtaactctacaggaatactcacccttgacagattattcattctgcctgaacaacagagcaaaggttacggtttgcaagcatggatgggaattgaaaatatgtatcctgacgctaaggaatggagactaagaaccccgacatgccttattaataacgtgtgtttttacgtaaataagtgcagttttaccattgtgcgggttgaggacatgggaaatgatggagttggcatgtatgttttctcgaagaaagcgagctaa

SEQ ID NO: 171422 - DNA, 267 bp, Enterobacter cloacae
atggaagtggtcgaaggcaattttacccacggcgttgggggtgttgacgcgggcggcgctgatataggccatgttcttgtccatcgacagcgttattatctcatccaactggcgatcgctcagacaacgcagatgacgggcaagactctcaacaacgcggtcatcagtcagtttcagagcacggccctgccggtcggagatgactgtgaagtactgacgaccttttttgaaagccacttcatccacgcagaggtggcgggccgataa

SEQ ID NO: 171423 - DNA, 759 bp, Enterobacter cloacae
atgaagggatataaccgtctggaaaagattatggactatcttaagggccataatcttgtcacagttgatcaactggtagcggcgaccgaggcgtcgccggctacgatccgccgcgatctgataaagctcgatcaggaaggggtaatcagccggacccacggcggtgtgaccctgaatcgttttattcccacccagcccaccacgctggaaaaatcccaacagcatctggccgaaaaacaggcgattgccgaacaggccgccagctttattaaagccggcgattcggtggtgctggatgccgggaccacaatgattgaactggcccgctaccttactcatctgccgctgcgggtgatcaccagcgatttgcatatcgcgctgtttttatccgaatttaagcagattgaagtaacgattatcggcggacgcatcgacgacagcagccagtcctgcatcggcgagcatggccgccatttcctgcataaagtctggccagatatcgcctttgtcagctgtaacggatgggatatcgaaaaaggcatcacctctcccaccgaagaaaaagccgcgctgaaacgcgatttaattgccaatgccacccgccgggtattattagccgacagctccaaatatggagcctggtcattatttaacgtggcgaatcttgattctctaacggatattgtgactgactcgggaatttctgaggccgctaaagaggagatcggacagctcgatgtaaaatttatcgtcgcctga

SEQ ID NO: 171424 - DNA, 987 bp, Enterobacter cloacae
gtgtctaatatcattgctgtaaccatgggtgacccggcagggattggcccggaaattatcatcaaatctctggctgaaggtgagctggcaggcgcgccggtagtcgtggtcggctgcgccaaaacctttgagcgcatcctggcgttggacatcgtcccggcgatccagttacgggctatcgacagtgtggcggacgcgcactttgcgcctggcgtgctcaacgtgatcgacgaacccctcgataacccgcaggcgttacagccgggcgtggttcaggcccaggcgggcgacctggcgtatcgctgcattaagcgcgctaccgatctggcgatgtccggcgaagtaaaagccatcgccaccgcgccgctgaataaagaagcgctgcatctgggcgggcatcattatcccgggcataccgaactgctggcgaaactgactaatacgcaggattacgccatggtgctgtacaccgataagctcaaggtgatccacattaccacccatattgcgctgcgcaagttcctcgatacgctgaaccaggaccggattaaaacggtgatcagcgtggcggatgatttcctcaagcgcgtcggctatgagaatccgcgtattgcagtggcgggggtaaacccgcacgccggagaaaacggcctgtttggtgatgaagagatcaacatcgtcggcccggcggttgaagctatgaaagcggaaggatttaacgtcaccggcccttgcccgccggacacggtatttatgcagtgccacgaaggcatgtatgacatggtggtggcgatgtatcacgatcagggccacattccgcttaaattactgggcttctatgacggggtaaatattacggccgggctgccgtttatccggacttccgccgatcacggcacagcatttgatattgcctggacaggtaaagccaagtctgagagcatggcggtttctatccaactggccatgcaaataacccgggaataa

SEQ ID NO: 171425 - DNA, 1263 bp, Enterobacter cloacae
atgaacggacagggtttaccaggcagcattctcgtcatggcagatgactttaccggtgcgaatgacgcgggcgtcagcctggcgcagggtggggttaccgtcgatgtgatgctgcactctagctatcaacgcgatggacgcgccacggcgctggtgcttaacagcgacagtcgggcgctgccgcaaaacgccgcgggtgagcgaatttcatcattaatgcattctgcgcttaaacagcaaacgcctgcgtggatgattaaaaagattgattccacgctcaggggcaatcccggtgcggaaaccgaggccatgatgacggcaacgggcgcaacggtggcgcttgtcgccccggccttccctgcggcgggcaggctcacgcgtaacggagagtgtctggtgcacggccagcggttaacggataccgaatttgccagcgacccgaaaacgccggtgctgagagctgatgtgcgggaagtgttccagtcacagagccggatggcggctttatatgtcgaccttaccacgctgcgcgccggggatttaccggcgcttatcgccgggtacccgacgccgctgatggtaatgatcgacagcgaaaccgatgccgatctggacgccgttatcgacgccgcgcgtcaactgtcgacgccgccgctgttggtgggttccgccgggttgtgcgatgccctggcgcgccatctcgcgccggttcgccgcaaacgcgtgctggcggtggtggggtcgatgagtgaaatggcgcaaaagcaaattcaccatctgcatcagcaccccgaggtcagccaggtgtttatcaacattgacgatgtgttcaccggcgacgcgcaaaactatcgcatggccatcagcgaggcgctgagcggcggccggcattgcctggtgcacacctgcccggatcacgccgctcgccatcaaatcatcgcgctgtgcgagaaatggcagatttcccgcagcgaactgggggaaaagatcagcgcctttttaggcgaactgacccgcgaggtgattaaccagagcgaacccgatgcgctgtatctgtcgggaggcgacgtggctatctcagtttcgcgcgcactgggcgccagcgggtttcgaatcacaggccgtgtggcgcagtgcgtgccctacggcaactttctgggttgcggctggcataagccggtaatgaccaaagcgggcggtttcggcgatgaaaccaccctgctcagggttttgcattttatcgaggagaacgcgagtgtctaa

SEQ ID NO: 171426 - DNA, 1146 bp, Enterobacter cloacae
gtggttactattaatagtacgttgattagcggtgccggggcgatccccgcgattgcgccagttttagcaggcaagcagagcgtgttgctggtgtcagacagcaacatcattaaacttgatgcgacgcgccagatcgttgcgctgatcgacgccgaaggccgccgtgtccatgtaattgacagcgtaccgccggaacccagccagcatgacgtcaataaactgttgggcgagctgcccgatcgggatatcgatctggtggtgggtatcggcggtggtagcgtgctggacgtggcgaaactgctttccgtactgtgcgacagccgctctcctggcctcgacgcgctgctggccggtgagaaaccgagccatcgcgttgcttctttattgatccccgcaaccgcaggcaccggttcagaagctacgccgaacgcgattctggctattcctgagcaaaacaccaaattcggcattatctctccggtgctgctgccggactacgtggcgctgctgcccgaactgactaccagcatgcccgcgcatatcgcgtcctccacgggtatcgacgcgctgtgccatttgattgagtgctttacctcgaccattgccaacccggtcagcgataacgtggcgcttaccggcctgtataaactgctgcgcaatatcgatgtggcagtgaacgagccgaccaaccttaacgcgcgtctcgaaatgctctgggcctcttattacggcggcgcggcgattacccacgcgggcacgcatctggtacacgcgctctcttatccgctgggcggtaaataccatctgccgcacggcgtggcgaacgctatcctgctggcaccctgcatgcgcgtggtgcgcccccatgcggtagaaaaattcgcccgggtgtgggatttaatcccggatgccgatcagagcctgaacgacgaggaaaaatcccacgcgctggtggcgtacctggcggcgctggtgcagcgtcttaacctgccggacaacctcgaatcccttggcgtaccgcgtgatgacatcccgtccttaagcgatgcggcgttgaacgtcaaacgcctgatgaataacgcgccctgcgtggtcagccacgacgacgtgcaaaaaatctatcaaaccctttttccacaaaattaa

SEQ ID NO: 171427 - DNA, 885 bp, Enterobacter cloacae
atgagtaacgatatcaaaggggtactgacggcgatcgtcacgccgttcgacgcggatggggcgcttaacctcaacgcgttgaagcgtcagatcaaccgccagctcgacgccggtaacggcatcttctgcggcggtaccaacggtgaattttttgtgcttaacgagcaggaaaaaatcgccgtgaccgaaacctgcgtggcggaagtggcggggcgggctaacgtggtggcgcatatcggcgagatctccacccgcgaaaccattcgcctcggcaagcagattgaaaaactgggcgtggatgccgtatcggtgatcaccccgtatttcgtcccgctgaagcaggacgagctgattgcgcactacgcggcgattgccgatgcgctcagcgtgccgatttttctctacaacattccggcgcgcgccggcaacaccctggagccgcaaaccgtgcgccagctggcggcgcacccgaacatcatcggcatcaaagacagcgcgggcagttacgaaagcctgagcggtttcctgaatgcggtgaaagagttcgacaacttcgacgtgctcaacggcccggattcgctaatccaccagggctttgttgacggctgctccgcctgcatctccgggctggcgaacgtcgcgccgaaagagatcaacgctatctggtcgcgcttcaatgctggcgatatcgcaggctccttcctggcgcaggagagcgtcaccgatttgcgcaccgatttgtataaagtcgcgttctccccggcggcagtgaaaaaagcgctgcaaatacttgggcatgacgtcggcgaaagccgctacgcggtgcactttactgaacaacaacagcagcagatccgccagattgtgacgcaatacctccaataa

SEQ ID NO: 171428 - DNA, 1416 bp, Enterobacter cloacae
atgaaccatttttccgctgaagataccctgataattgtcggaatagtcattgcctatattctttttacctcctggcttacgttccgtttacgcagtaaaaatagcggcgattttatggaaggctcccgtgcgatgcccgcctttgtcgtcggtatcctgttgatgtctgaatttatcggcgcgaaatcgaccatcggcaccgcccaggcggcgtttgaagacggtttcgctgcctcctggtcagtaattggtgcggccatcggtttcccgctgtttggctggatcctggtgaagcgcatttataacaccggcaaaatcaccatctccggcgcaattgccgagaaatacggcaccagcaccaaaaacattatttccatcatcatgatttacgcgctgttgctggtgaacgtgggtaactacgtgagcggcgcagcagcgatttccacggtgctgaaagtgaacctgccggtggcggcctttattaccgccgttgtcagtaccttctatttcgcgtttggcgggctgaagggcatggcgctggtgaccatgctgcacagcgccctgaaatacttcggcgtactggtgattttaggcttcgcgctgtcacagaccggcggttttaccccgatgattgagcagatgcccgcttattactggacgtgggacggtaacattggcgcgacaacgattctcgcctggctgatcggcactattggttccatcttttgtacccagtttgtgattcaggcaatctcatccaccaaagacgtgaaatccgccaggcgcgccacctgggttgccttcttcttctgtatgcctatcgcgctggcgattgccgccattggcgtagctgcgaagtacctgcacccggaaatcaatagcctgtatgcgatgccgatattccttcaggatatgagtccgtggctggcaggcctggtgacaacgtcccttgttgcctcgatttttgtcagcgtcagtaccgttgccctggcgattgcctcgctgatcgttaaagacttttacgtgccgtaccgcaagccgactccggagcaggagtttaaagcgacccgctggctgtcactgctgattggcttcctgccactgattttcgtgctgctggtgccggaagtcctgaaactttcgttcttcacccgtgctatccgcctgtcgatttcagttgttgccgtaattgccttctacgcgccgttctttaagagcgcccggggcgcgaatgcgggtctgattggtgcctgcgtgatgacctccgtctggtatctgatgggcgacccgtttggtatcaacaatatgtatatcgcgctggtgacccctgcggtgattatgctgctggaccgcctgatcccgaacaaagccgataacgcaaaaatgaccacttctgtagaaaataatggagcctga

SEQ ID NO: 171429 - DNA, 1170 bp, Enterobacter cloacae
atgaccgtaaccgtaacccgtgatggcgtagtacgccccctggaacaggatagtggtgttgtcactgcgatgttgccgtccgaatgcccacaaaaccatgccgccaacgtactgccattgccggatggtagcctgatgtgcgtgtggttcggcggtacacaggaaggtattgccgatatttcggtctggagctcgcgtttagcgccgggcagccagacatggagcgaggcggtaaagctttctgacgatccgacccgttccgagcagaacccggtgctgttcctggccccggacaacgtgctgtggctgatgtggaccgcgcaggtttcgggcaatcaggataccgctattgtgcgctatcgccagtcgagtgacctgggcaaaaactggggcgacatcgccacgctgctggataaacccggcacctttatccgccagccggtcacggtgctggaaaacggcaactggctgctgccggtgttctactgccgcacccagccgggggagaaatgggtcggcaatgatgacatcagcgcggtgaagatttcgtccgaccagggcaaaacctggcgtgatgtggcggtgccgaatagcctgggctgcgtgcatatgaacatcacgccgctgaaggacggtacgctggtggcgctgttccgcagccggtgggcggacaatatctactacagccagtcggtggataacggcgaaagctggtcggtgcctgaacccacgccattgccgaacaacaactcgtccatacaggtgacgaccctggaaagcggcgagctggcgctggtgttcaaccacatgagcgccgccggagcttccgaacgccgcgcctcgctgtacgatgaaattgacgacggcgacggacgcaaggagccggaagtgaaagaagggcgctcggcgttctggggggcgccgcgtgcgccgatgacggtggcgatttctgccgatggcggtaaaacctggccgtggcagcgtcatctggatgagggcgacggctattgcatgaccaacaactcccaggaaaaactcaaccgcgagttttcctacccgagcatcaagcagggcgcggagggagatctgcatatcgcttatacctacttccgccaggcgatcaaatacgttcgcgtttcgcctgagtgggtgaaaggacgccgcgtatga

SEQ ID NO: 171430 - DNA, 471 bp, Enterobacter cloacae
atgattatcggcaatcttaacgccctgccgctggcagggctgcccgccgcgctgcgggcaatccttaccaacccggcctgtagcctcgcggcactgcaggctcgtgaggacgggcgctggcagccggagggcgcagcgtggttctgcaatatcggcccggcagcgacccagccgcgcgagctgcgccacactgaatatcaccataagtgggcggatattcaggtgatccttgagggggaagagaagatgtacgccggaatggtcagcacagcccagccggacgacgagcagcgtaaaccggatctgtttatcacgtctcaggcccccggcagcgtagcgatgacgctaaatcccggtgatttcgcggtatttatgccgggggaaccgcatcaggcgctgtgtacggtgaatgcgccgtcggtagtgagaaaagctgtattcaagatcccgaaagccttactggagggttga

SEQ ID NO: 171431 - DNA, 681 bp, Enterobacter cloacae
atgccgcacgccatcgtaacaggagccagctcggggattggtgaagccattaccgggcttttactggagcagggctggaccgtcaccgggctgagtcgccggatcgtgacgcggggcaacccgcgttttcagagcgtcagcgtggatttgatgaatgctgaggtactgcgggaaacgctgaggcaactggacgcgccgcaggcgattatccactcgtcgggaatgatggccgccgcgccactcggggcgctggacagcgaaacgagccagcggctgtggacattgcacgttcatgcagcggaaatcctgattaaccactttgcgccgcgcatggacgcgggcgggcggattatcgtcatcggcagccgcacctcgcgcggcgcggccaaccgatcgcagtatgcggcgaccaaagcggcgctggtcgctatgttgcgctcatgggcgatagagttggcgccgaaaggcatcaccgccaatgtggtttcgccgggtgcgactcaaacgccgatgctgacacaaccggggcgtgaagcgtcaacgcctgtgatgccgccgattggccggttaattaaaccggaagaggtggtggcgctggtcagtttcctgttgcaaccggaagcaggggcgatcaccggtcaggaaataatgatttgcggaggggcatcgctgggacggtaa

SEQ ID NO: 171432 - DNA, 426 bp, Enterobacter cloacae
atgagtatgtcaggcaactcgcagttcgagagtgaagacgacgggctggtcaacgatatcaacatgacaccgtttatcgatgttatgttggtgctgctgattgtatttatgattactctgccggtaatcaaccatgcggtaaaagtcaatttgcccaaggcgaacgccagtccgctggaaaaagcccctcaggacattgatatttcggtgctggccgacggcagtatcgtctgggataaacggcccattgacgacgccactttaaaatcacggatggaagaaaccgccaaacggtcacagttgccccatctgcgtatttacgccgacaaggccgcggaatacggccgcgtatcctatgtgatgaccagcgcgcagagcgtcggcctgacgaagtttgatttcgtcatcgataaaaatgctcagtaa

SEQ ID NO: 171433 - DNA, 756 bp, Enterobacter cloacae
atgaatgagtttggcattgagcacgtttggcagcagggcgacatggttacccgctcggtagctctggttctgctggtcatgtccgtgatgtcctggtcggtgattgtgattaaatgcatacagggagcggggttacgcaaaatcgccctgcgcaccaaacaccatttctggagcgtaaaaacgctgccggccgccatcgactcattgggcaacagcgcgaataacccattccgcgatctggcgatagccggccatgcggcgatgtctcaccagtacaatatcgaggccggcatcagtaacaatcttgatatcagcgactggctggcgcgcgagttgaaaaacagcattgacgacaatagcgcgcgcctgcaatcgggcctgggtatcctcgcctccatcggcagcaccgcgccgttcgtcggtttgctgggcaccgtgtggggcatttatcatgcactgctgtccatcagcatggtcgaccaaccggatttggcccatgtcgccggcccggtcggcgaagcgctgatcatgacggcgttcggcctgttcgtggcgatcccggccgtactgggctttaacgccatcagccggcgcaaccgcaccttgcagcatgccatcgcccgctttgcccatgacctgcacgcctattacctcaccggttcgcgcattacctccagcgaggttaccgaactgcgcgctgtcgatgtggaaaccgcccatcgagcccaaccgttccgtgccggccagtcggtgtaa

SEQ ID NO: 171434 - DNA, 891 bp, Enterobacter cloacae
atgcgggttaaggtagtcaggattcatcgagaggtcgtggtgaaagcacagcacctgatagtgaaagaaaggattgacgcgccgaaaagcgcagcgcccgccatgcttttacccattgggcttgcggcggcgaaaaaagatcgtgtgccaaggctggcgattgcagccgtcgcgttggtccacttcgtgctgattggcgcggcgattacgcgcaccacacaataccggccgctggacatcatcaatcctgccgaacaaagcagtgtgcaggtgaccatggtcgagatgccggcgcccgaaccaccgccgccgcctcaggcggctaccgaagcaccggcgttgttgacggcggaaaatagcgaacgcgaagtggcgcaaagtaaagaggcaccgccagaacctacgcctgtcgcaccgccggtgccggaaaagccaaaatccaggccaaaacccaagccgaaagtcgagccaaaactcaaaccggtgcgtgaaatcactcgcccggagaacgatgagaagccctcgccaatacaaaacgccagggtcgccgacaaggccgcgctgcaggcgacggccaagggcgagatgctgaaaagcgcacccaacgccacgccgaaaatggtttctactgttggttgcatggtgcccgcgcctgtctatccccgtaaggccaaacggctgcgccaggaaggtgaggtgctcatccgcctgacgatcaccgccagcggcagtctggggcgcagcgaaatcgcccgtagcagtggttatcaagatcttgacctggcggcgctggcggcggtttccggtatacgctgtaatccatatctggaaaacggccaggcgatttccgtgatgaccattcaacccattaccttcaagttaccccgttag

SEQ ID NO: 171435 - DNA, 957 bp, Enterobacter cloacae
atgagagcataccaacgccccgaccccaccgccctgcaagccattgaatggatggtgttactacgctccggcgaagccacggatgaggatttccgtgaatacgaacgctggcgttatgccgatgccagccacgacgacgcctgcgcccaaatagaaaccacgctggggaaaatccaatcgctgacgcacaccctgccaaaagaaaatgtgcgcctgaccctgctcgccccctccagccgccgcaaatttttgcagaacgccatgggcattgccgccgtcgccgtggtaggcggcgtggtggtgaaccaaaaataccctgtgccttacctgttggccgatattcataccaataccgcccaacggcggcggatcgaactgaacgatggcagcgtgctggacatgaacgcgcgcactgcgctgaatatcgcgatcaacgatagcctgcgcagcgttgagcttcgcaccggcggctttattgccgacgtggtgaatgacgccaggccgtttactgtgaataccagcatggggcgcatcctggcgagcgaagcgcgttttaacgtgcgccaggaatccggcggcatccatctggcggtgctggaatccgtggttaaagtgaccaacctgcgcggcgaaaaccgactgctcgaagccgggcacggtctgtggttcaaccatgacacgctaataccggttgccatttccccttatgccgaaaccgcctggacccaaggccggctggaagtgcaggatgcgtcgctgagttcggtgatcaattcgctaagaaattacagcccggcggttatccggctggatccggcgattgccggtctgcgcgtcagcggcaacttcccgctggacgatgtgccatacacgcttgacgccctggcgcaaaccatgccgatcgccatcacccgtaccacggggtattggatccgtatcaacgcggcgagcgtttga

SEQ ID NO: 171436 - DNA, 519 bp, Enterobacter cloacae
atgcctgccgaatttaccagccgaacagatgcgttaacgcttatttttcgtagcgattaccggtggctcactgataagttgagacggcggatcacccacggtaccggcgcggaagatatagcctctgaagcatttgcgcgcctggcggcaatccccgatttgcttaacatccgcgagccccgcgccatgctcaccacgctggcccagcgaattttgtatgaaacctggcgccgccgcgatctggagcaggcttatctcaacgcgctggcgagcaacccgcagctctgccatccttcaccggaagaacaagagatggtgatcgaatccttgctggccattgaccgcgcgctggatggtttgtcggttaatgcgcgcaaggcgtttttgtttaatcaactagatggtatgacctacgctgaaatcgccaaagagttgaacgtttcggccagcatggtacgcaagtatgtggcgaaagcactgaccaactgttacctggcgaccaccgatcagacagagtaa

SEQ ID NO: 171437 - DNA, 2421 bp, Enterobacter cloacae
atgagtgaagcactgcagagcggttggaagaaacgtattagctcaggccgactggcgttggcgattaatatcacctttgccgtggcaaccagcgctttattgctgccgcaggcagccgccgcgccgatacacttttcggtgccggctggttcactggaacaagggctgctgacgattgcgcgtcagagccagcagaccatttctttcaatcccacgctggtggcgccttatcaggctaaagcgattgatggcaatttcacgcttgaacaggcgatcgtgcaccagttgcagggcacgccactttccgtcaccacaacggccaacggtacgctgaccattgatgctgttaccacgacaataccgatggctgccgtatcggatttgcaggccgcaaaggacagcgggcaaacgctgccgaccattaccgttgttggcagcgcggatcaaagcgaagacgccacggtgtataatccgtcgatgtccagcaccgccacccgcactaatttatccttgcagacgacggcgcaatcggtgcaggtggtgagccgcaagttgcttgacgatcgtcaggctacctctgtggaagatgctttgcgcaacaccggtggtgtgacgctgcagggtggcaaccggggttctaaatcaatatatatccgcggttttaacgtgacgggcggttcgaccgacggcgtttctaaccccaacaacaccgtgaacggcaatgctaccggctataccagtatcgacggtattgagcgtgtagaagtgttaaaaggcccacaagccgtgctggcaggcaacagttcgccagccggttcggtcaacgtggtgcgtaaagcgccaaccgccgatccgctgcacacttataaatttgaggtgtcgaaatatggcgaagtgaaaaacgccatcgatctgggcggcccgctgaacgacgacaaaaccttcctttaccgttttaatgcttccaccatgcgggcggataacagcttccctgattttaacggcagacgtggtgagtatgtcgccccggtgctggcctgggtgacagataacacccattttaaagttggggcggagtttaataccggcagaacgtccgggccggcggccaccttgtacagcaatggtcgtatccaacgcctgcctgaatatcgcttgggtgataaagacaaccatttttccgttaatgccaagaccgtttattatgaattgaaccggtatttattcgacgactggtcctttaacagcaaagccacctatcttgacaacaccacgaactatcgcctgcatgaagtgtacggcgcaagctccgatggcacattaaccgttcatgaactggggaataagcaggatttgaattccatcagcctgcaaaatgatatccgtggtaagttttctatagggccgatgacccataatattctggttggttacgacttccagcgtgcgaaaaccaccagttgggatttaccctacggcagaatttacaccaccgctaattataatgatcccgacagcatctcgttccccgcgatcccggatcccagctataaatcctataccatgcagcagtaccagaagggactgatcctccaggatcaaatcgatttctgggagcggctgcatttccagatatcgctcaaacaggccaaatggtcgttgcgcaccacgacaaccaaaacgtctgagaaaaatgcaacccaatgggtgccgggctatggcgtcagcttcgatattacgccggaaatcacggcatatgccaacctgctacgcagttttgcgaccgtgggtacggtgaatacccgtaccggggaacagttagatccctccaccggcaagtcaaaggagatcgggcttaaattcagtctgttggatgataacctgaccatcaccaccgctgcattccatatcgtgcagaagaacgtagtcgtgactgatatcaccgggaatgcggtcggcgcggaagggcgggaaaccaaaggctttgattttgatttgaacggtcggattttgccgggctggaatattacctccagctataccttcgctcagccgaaggatccggacaactcttctgttaccggtgcgacatcgcaatcaagggttaccgcacagccaaaacattccggcagcatctggactacatatgaactgcaggagggacggttccagggactgggggcgggcatcggcgttcaggcggccagtgatacctggaacggttcgaccaagaattacttcaaaatggggggctgggcgcaaactgacgcctcagttttctatcaccagccgaagtacacggtgacgctgggtgtgaacaacatctttgatcgcgatctctactattactcaacctcggtgaattatatcggcgtgaagccaggccgtagcgcgcgcttatcgctgacctattcattctaa

SEQ ID NO: 171438 - DNA, 1716 bp, Enterobacter cloacae
atgacggaacaatcaatcgataaaacgctgcccggcgatggcaaacggccgggcatatggcagctcattagccctttttgggcatcgtcggaaaagtggctggccttatcgttaattgccgttgttttaacgattaatttcagcagtacctatgcccatgtcgccttgaataagctacatgggcagttaaccgactcgttggtggcgctagactggccgctgatcagcaccaccatggtggaaagcctggcgatcggagtggtcacgacgttattgccgctgattagcgtattggccattgattatctgacgctgcgctggcgcacctggatgactgcccgctatgtggagcgctggacccagcgctccgcgtattaccagttggagcgggataatttaatcagcaacggcgatcagcgtattgcggaggatattaatctttttaccgacgtcaccattaacctgtccaccaacattatccatgtggtggtaaataccataacgtttaccgttatcctgtggagtctgtccggcgcgttatctattcccctggggagtgagacgttgtcgatccccggttacatggtctttgccgtctatctctattcatttctccatctggcgctgagccactggttaggcaaagtgctgattggcgtcaatatgaataaacagacggtggaagcggatttccgtttcctgggtatgcaggtgcgcgaaaacgccgagcaaattgcctttttcggcggaggtgaacgcgaggggcaacggctgctgtctcgcttcgatcgggtgcgggccaataccctgttgatgatgcgcaaaacgtttaagctgaaatttttccaaagtatgttctcccaggccttttcgccactgccgaccctgctggcgctgccgttattgctatcggggaaaatcaccctcggcggcatgacccagattaccctggcctatggcacggtgctcggtacgctggcctttttccctcaggcttatcaatcctttaccaactggatggccctggctaaccggttgcgggatatgctgtgggcgttaaataaggcccgcgatcagcctgccggtatccggctggaaaaccgcggtacaacgcttacctgcgcgggggtcattttgcaacgcccggacggcgcggtgcttacgcgcctgccggactggcaggtcgggggcggcgaacgctgggtggtgcgcggccgttcaggcagcggcaaaagtacactgctgcgtgcttgcgccgggctatggccgtatggtgtgggtgagatcacccgccccgcgtcggcgaacatgctgtttttgccgcagaaaagctacatcccggtcggcacgttaaaaagcgcgctggcgtaccccgatgagccggaaacctttaccgataggcaataccgccaggtactggtggattgttgcctggcggagcgggttgattcactgacccatttcgagcgttggcaacaggtgttgtccggcggcgaacagcagcggctggcgatggcgcgggtgctattacatcgcccggaagtgatcttccttgatgaagcgaccagcgcgttggatcctgaaacggagggccagctctatcaggcgctgatcgagcaacttcctaacagcaccattatcagtgtagcccaccgaaaagagctggagcgcttccaccagcatacacttaccctgacgcccgaacagggcagttaa

SEQ ID NO: 171439 - DNA, 1254 bp, Enterobacter cloacae
atgttgaataaaccaaacgaattaaccgacgccagcctggacagtttcctggccaccgcgaaattgccggtgctggtcgatctgtgggcgccatggtgcgtgccctgtcgcacgatgtcgccgattatcgacaagctggcaaaaaacagcgcgggcaagctgctggtggccaagatcgatgtggaaaaatacccgtcggttatggcgcgttttggcgtacgcggcattcctacgctgctgttgttcaagggagaggcgcagccggagcggcaggtgggggcgttgtccctggggcagcttaacgcctggctggccggacatcaggtggatgtgagcacgcaaccgagggtgcagcatgctgaagcgctggactggggcagtttttatggcgatgaggggctgcacgatttcatcgcccagcgtgccattgagcatgccgcggcgggcgatatcagcgtggggctgggtagcttctggattgacggcaagggtagcacgtcggccgcgatggtccatcaggccgaaagtcatgtctttgagcgcatcaccgggttgcctgtcgccattgggcggctactcgatatctgcggttatctggcggcggaacagatggcggcgttgtttgcggcgctgaaagtcggcaaggattaccggctggtgccgctgcgctttatgcactggtggttgagtgaggaatcggcgccctgggccagctatttgcgcgaaccgcaactggtgcggttgcttacgcgctggcaggcattatgcgccgatcggcttgcggaccgtgaaaccgcccccggcgtctgggaggcgatgggcgagcaggcggcgttgttactacaggactatcagcggccggatcgccaactggaacaactcttcgccacgctgctgcaactgctgtcgccggtgccagtcaccaccgagggcgataaatggggccagatcgcgatgaatatccactgggcgcagttccagcacctggagatcctctcagggtggagtgatgaggatcgggcgacgccggataaacgcatggcctggtttagggaacaagagcgccagtcgccagcgggtaagctgagccaggatgagatcgcggtgctcagggcggagtgggcggcggaaaatgcggaattcctcgctaaagaaaacgctttccatcaaagtatcccgcagcttctcctgccggtgaaagtgcggatgcagcaggaactccaccgcttgctggccgaagcgccggagttttaa

SEQ ID NO: 171440 - DNA, 1350 bp, Enterobacter cloacae
atggtgaatctctttgcccacagccaacggcaacttgcagaactggccgacagtgtgattgcgcaggcgatccaggccggcgcttctgccgcgcaggtgatgttttccgaaagtaacggcctgttgattgaaatgcgacagggccggctgcgggcgcgcacccgtgatgcgcagtccggcatgtcgctgacggtctatcgcgggcagcatcagggcaccaccagtaccactgatttttcaccggcgcgcctgagcgaaaccgttcaggccgcctgccggattgccagctataccggcgaggatacgtttgccgggctgccgccggcgcagtatctgtgccaggcgccgcgcgaactggatctatggcatccctgggaggtggacgaaaccggtgcacaggcgctggcccagcgcatagagagcggtattgcgtcggcgggagccggggtggtcagcgacggcacctgggtgcgtaacggccaatcccagtggttcctgatgaacagcctgggttttgcccagggcggtcggcaaaccagtcacgtgatgagtgccaaggcgctggccagaaaaacgggccacagccaactggatttctggtattcacaatcgcctcttgcgccgtcactgatgacgccggaggcgatcggccgacgggccggcagcggggcgctggccgcgctcgacgttgcaccactcagcggtagccgccgttgcccggtgctgtttgatgcgcgcagcgccctgtcgctacttgagcatttggtgcaggcggccggcggcgcggcgttgtatcgcaaaaacagtttcctggccgggtgccttggtcagcgtattttcagcgaacatatcagcgttgaggaagatccgtttatcccgcaggggctggccagccgggcattcgacggcgacggcatcagcggactggcgcgcagggtggtggataacggcagcctgcgcggtttcttcctgtccgcctatgccgctcgccgcctggggatggaacccaccggcaacggttccgggccgggcaatctgagcttacgcagccgccgtacccaggccagcgatgatttctcagcgatggtgaaaaaactccataccggcctgctggtgaccagtttcagcggcggcggcgcacgtttgattaacggggattactcccgcagcctgcgcggcttttgggtggaagaaggcgaaatccgccactcggttgacggcgtgacggtagcgggcaacctggcggagatattcctcaacatcgttgccgtcggcgccgataccctgacccagggcgcgttgaccagcggttccgtgttaatcgatagcctgcaggtggcggggcgctaa

SEQ ID NO: 171441 - DNA, 1458 bp, Enterobacter cloacae
atgagtgaatcagtaacaacattgcatctggcgcaggcgaaacggcaattgctggagccgcacggcgtcagcgacgccgatttgcaggggataatggatcaggtgctgacgcatcgggtggactatgccgatctgttcgttcagagtctgcgacgcgaaacctggtcgatggaaaacggcgtggtgaaggacggttctttttatgtcgatcagggcttcggtctgcgggcggtggaagaggaccagatggcattggcgtattcccagcatatcgaccggcagcatctgctggatgccgcccgctcggtcaagaccattgctgcgccagggaaacgcctccgggttgcattgccagccgagcgcgcgcagcggctgaattttatcgccgacgatccattgttggcctgtgaggctgtgcagaaaatcggcctgctggagaaaatcaaccacatggcgcgggcgattgatccgcgggtggtgcaggtgaccgccagcatggagttgacccattcggttaactatattctgcgccatgattgccatcaggcggcggatatccggccgatgttggtgttgcgcatgagcgtggtggttgaacaacagggcgtacgagaaacggccagtagcggcatcggcgggcgtggcgatttcacgctgtttgaggatgagcatgtgcaggctgccctacatacgatcgtccatcgggcgttgataaatctggcggcgatcgccgcgccgtccggcagtatgccagtggtgattgccgcaggctggcccggtatgctgttgcatgaggcgatggggcatggttttgaaggcgactttaaccgcctgggcacctcggtgtattccgggcgcattggcgaacgggtggcgcaacccggcgtgaatatcgtcgacgacggcaccgtggctgggcagcgcggttcattgaatgttgatgatgaaggccacccggcccagtgcaccacgctgatcgaagacggtatcctgaaaggatatatgcacgacagcctgagcgcgcgcctgatgaagctgccgcctaccggaaatggccgccgccagtcttatgcgcatttgccgatgccgcgcatgaccaatacctttatgcgcaacgggcaatatgcgccggaggaaattatcgcctcggtgaaacgcgggctgtatctggccgatttggggagcgggcaggtggatatcgtcagtggccagtacagcttccagacctcgctggcatatttgattgaagacggaaaaatcaccacgccggtgaaaggcgctaccctgaccggcaacggcccggaaaccctgcagttaatcagcatggtcggcaacgatctggcgctggatcacggtaccgccgtgtgcggcaaggctgggcaaagcgtgccggtgtgcgtggggcaaccgacgttgaaggtggacaatctggtggtgggcggcacgcgccgggggtga

SEQ ID NO: 171442 - DNA, 3042 bp, Enterobacter cloacae
atgcgttcgaggaacgggtggtggcgccgggcagtgccagagctgacaacccttcattacacctcattctccatcccggtgacatcctgcgggatggctctggtgttaaataacatgagtgccgccagattacgggtatgcacttacacgaaagttctgtcattttactcatcaggcatctcattcttttgcatagaaatagtgtatgttctgaacaatcatttattttttagcggtaaaactatgaggcgcattgaggtaatactgggagaactcgaacgactaacgcgcgggctaaatctggcagatctggcacaggagatggcatttacggcggaagctataggctttaacctcgggctggcgcgcaactcggtcagtaaagatctcaatcaactctgtaatgatggtctggcgattaaaagtcggggccgcccggtgtttttcctgcaccgccaggcgctggaaacgctgctggggcgtaagctggatgacgccgaacgtgaagtacgtacgattgccgatctgttgccgcgtcaggaagggcatacaattgacgatccctttaccggtctgattggctacgatcgcagcctgcgcgatgcagtagaaaaaggccgcgccgcagtgctgtatccccatgggttgcatgtgttgctgaccggaccttccggtgttggtaaaaccttctttgctgaacagatgcaccgctttgcctgtgagcacgcgactggttcccggccgccgctggtctattttaactgtgcggaatatgcccataaccctgaactactctcttcgcacctgttcggtcatcgacagggggcgtttaccggggcgagtgagaataaatctggcctcgtggagcaggcggacggtggctatctgctactggatgaggtacaccgtctgccgtatgaaggacaggaaaagctattctccattttcgataaaggtgaattccgtccgctggggtctaacagcacggcgcgttcgatatcggtacgcctgatttgcgcgacgacagaaccaataagttcggcattgttgcgtactttccagcggcgtattcaggtctgtatcgatctgccgggtattcgccagcgttcagtcgaagaacaggtggagttgattgtcggctttcttcagcgtgaaagtcgcaaaattgagcgtacggttagcatcgataaaacactgctgctctggctgctgaacaagccgctggaagggaatatcggccagcttaagagtgatatccagtttctctgcgctcaggcgtgggcatcggggatgacggagcataatgatacgctgcaactggataaacggctggcggaaatgccgtttaatgccaccccggaacaacgtctgctggtggacgcgctgtttgatggcaaagagaagttaactgttaatgcgagctcgttgcccgcgttaaaaacgaccctggcgactgactctcagattgaagagagcgatcttttttacagtttcctgacacgcgaatacgttaatttgcgcaacagtaacgtgccaccggcggaaatactggcagtcctcaaaaataagctcagctcaatttttgaatatggtctctatagtcgcgataattttgcaaacccgccgcgttatggcgaccagattgaggaacgcgtgacgttgctgattggttgtgtggagcaggtgctggagtttactctgccagaaaatctggtcaacccactgcgtaagcattttctggcgctaattagctatgttcagcgcgggctgatcccacagctttactcttccagtctgatcgtcgatcgctgcaaagatgagtatgacaacgccacactgctgtgtcgaaaaatcaatgaattgttgcatattcagtgtccggcaacagaagtggtctggttatgtctgttcctcaaagagtgtcgtcattatcgccagcgtattgatgccagtccggactgtggggtaattctgattgcccatggcacaacgacggcaacgagcatggcgcagtatgtgaatcgggtgcttgagcgtgagttgttcagcgcgattgacatgccgtttgaacagtcggttcatgacacgctggaaacactgatccgaatgattcagacccgacattatcagcggttgatccttatggtggatatcggctcgctggtgcattttggtggcatgatcagtaaaattttccagattgatgtgttacttatgccaaatgtaaccctgaccagcctgctggaagtggggcttgatttaagctatgaaacaagtgacctgccgcaacttgcggcgttaatgcagagtaaaagcatcccttgtcaagtttgcacgccacaacaggaaagcggcggtaaggtgctggttatttcctgtattaccggtatggggaccgcggaaaaaatcaaaaaggtactggaggagagctttggtgagctgatgtctcaggatacacggatgatgatccttgattataatgaggttcgcagcatggagcgcgtccagcaggcgttacatgccagtgagcggctagtggggatcgtggggactttccagcccgggctgccggatattccattcatttcccttgaggagctgttctcagagcaaggacctgaactggtatttagcctgttaactcccgagttctccagcgctgaacgtcgcctggaaatggaccgcagtgcgatgcgttttatcagcgcactgacgatagagagtatcgtcaatcatatttcagtgctcaacccgcagcgcattctgaaagaaatggaaggggtgtttaatcatctgaccaccgcgctttcactgaaaccaggccgtcaggtgacactacgcttcctgatccactgctgctgcatggtcgagcgtatcgtgattaaccgaaaaccgttacagatggcgctggaaaacagacctgatgtggatgtccgcgtgtttagtgtcatcaaatcgactttccatcctatagaagaggcatattccatccgtttatcggacgcggaatatttttatatctacgaattactctatagctga

SEQ ID NO: 171443 - DNA, 426 bp, Enterobacter cloacae
ttgactaccactgaattcttgcctcagatcctgctgctgacacatggcggctggggacaacaactttgcaatagcctgcgtatggtgacaggtgaaatcaagggcgtgaccgaaattgcgctgatgcctgtggatacgctgggcgaattttatcagcgtgtcgaagcccaggtgaaaaccatgccggaaggttcacttattctgaccgattttattggcggtacaacctctaatgttgcggcacgactgagcgcggattatccggtggcggtagtttcggggctaaacgcctctctgttactggaagcactggatttacgggaacagggtctgctgactaactgcgtgggcgaactggtggaagccggacgcagcagttgcctggatgtcgtcgcccacgtgcgtcagttacaacaatcaaactaa

SEQ ID NO: 171444 - DNA, 486 bp, Enterobacter cloacae
atggcaaatatcgtgttatgtcgtattgacagtcgcctgatccatgggcaagtggtgaccaagtgggttggacagtctcaggcaaaccggattgcagttgtcagcgatgatctggatgctgatccgtttatgaaaaacatctacctgatggctgcgcctccaaacatcaaagtggattgctacagcaaccagagccttgcggcatcatggaaagaaaaccagctcggtgagggcaacgtactggtgttattcccgtctcttgcggccattcaacaggctgtgcagcagggctttgatatcaccaccattcaggttgggggcttaggtggtgggccaaaccgcaaagctgttttccagaacataacactcgatgaaaaagacgttggtattcttaacgacctgaaaagtcgtgggattcaggtgttcttccagactatcccggaagataaaccacagtcactggacgatatcctgaaaaaattctaa

SEQ ID NO: 171445 - DNA, 750 bp, Enterobacter cloacae
atggatactttagtttttgcaagcctgatgggattgtattactggtttgcccggttacggcttggctacactttctccgccatgctgcttcagccagtggttatagcggtgtttgtgggactgctactcggtaatatgcagacggcgatgatcatcggggcggggatgcagcttgtctatctgggggtgacctctacgcccggtggtaacgtgccgtcggatcctgctctggccgcctgtatctcaattccaatcgctgttaaagccggaatggatcccaatctggcgattgcgctggcgatcccgtttggggtgatcggtgtttttctcgatcagttgcgacgtactctgaatgccgcctgggtacatatggccgacaaacacgcggaaacggcgaacatgtcgggcattatgcgctgtgccttcctctacccggcattacttggtctggtgctgcgttttcctgttgtgtttgccgccaactatttcggtcagggcgtagtggaaagcttcctcagactgatgccgcgctggctgacccattcgtttgaaatcatgggagggatcctcccggcgctgggttttgcaattacgattatggtgatcggtaaaaagagtcttctaccgtggttcatcggtggattctttgcggtgctgtacctcaaagtggacatcatggcgatggcaatcttcggcacctgtgtggctttcctgattaaaggtctggcgaaaaatgaaggagcagcatga

SEQ ID NO: 171446 - DNA, 858 bp, Enterobacter cloacae
atgaacagcgacgtaatgcaacatgaactgattgagcgcgcacggacaaccagaacgctgaccaaagcggatattacgaaagcctggtttatctactggctgggtgcggaagtatcaagctcgtatgaacgcttacagagcctgattttctgcgcctcaatgacgcctgtcatcaaaaaactctacccacaaaaagaagagcaggttgaggcgctgaagcggcatctaaacttctttaactcggaacagacttttggcgcagtcatccaggggatttccatcgcgatggaagagcagaaaacccgcggcgagcccatcaacgatgcctccatcacggggattaaaaccggcctgatgggtccccttgccggaatgggggattctattgtctgggcggcggtgatgccgctgttgattgcaatttttatcccgttcgccgccagtggcagcgcattcggtggtattgcacctctaatcctctatccggcgatcaccctggcgatcagttatggcctgatccacaaaggttacactctgggacgcgattccatcgtcgggctgttgcaaggggggcgaattaaagagcttatctacggtgctaatgtgctggggctgatcatgatgggtgcgctgtcagcaagctacgtcaagatcaccacaccgctgaaaatcagcgccctgaaaggttcagaagtggtggtgcaacagatccttgattctattgcgccaggcctgctgccgctggcggcggtgtttgccatctacatctatctggtgaagaaaggcccgcgttacaccaccattctgttgtcgattgtagcgctcagtgtggtttgttcattattaggagttctgtaa

SEQ ID NO: 171447 - DNA, 1110 bp, Enterobacter cloacae
atgacacagaatatctatcaacaactggggctgaagcaggtgattaatgcttgcggcaagatgacgattcttggcgtctccagcgtcgcgccggaggtgatgcaagccacggcacgggcagcttcgtcctttgtggagatcgaccggctggtggacagaacgggcgagttgatttcccgttataccggtgccggtgacagctacgttacttcatgtgcctcggcgggaatcgctattgctgttgccgctgccattacccgtggcgatcaggctcgggtcgcgcagatgccggacagtaccggtatggccaacgaagtggtgatgctgcgcggacataatgtggattacggcgcgccgatcaccagcgcgattcgtctgggaggtggtcgcgtcgtggaagtgggatcgagtaatctctctgccctctggcaactggaaagtgcgattaccaatgacactgctgccttgctgtatgtgaaatcacaccactgcgtgcaaaaggggatgttaagcattgaggatttcgtccaggttgcgcagacccataacctgccattaattgtcgatgctgccgccgaggaagatttgcgcgcctgggtagcgagcggtgcggatatggttatctacagcggcgcgaaagccttcaatgcgccaacctccggatttattactggcaagaaaccgtggatcgctgcctgtaaagcgcaacatcacggcatcgccagagcgatgaagattggtaaggagaatatggtcgggctggtgtatgcgctggagaattatcaccaggggcagaccgtggtgactgccgggcagttgcagccagtggctgaggcgatttctgcaattcacgggctggatgctgatattgagcaggatgaagcagggcgcgctatctggcgtgttcgtattcgggtcaatgccaatgaactggggctggatgcccgtgaagtcgaagctcagttgcgtggcgggaacattgccatctatacccgtagatataacctccaccagggggttttcagcctcgacccgcgtacggtcgcagaaggggaaatggcgttaattgtggcaagactgaaggagattgcagagcatgcaaaaagttaa

SEQ ID NO: 171448 - DNA, 744 bp, Enterobacter cloacae
atgcaaaaagttaatttctatcgccagcgtgtggcgataaacgtactggcaaaagatatcgacaacgctaaagaaatctatgatgcagccgaaggatgcgctgccattggcgtcctctcagcacagttttcctccgtagaagagggcgttgaggaggtaaaacgctggatgacggaggttccgtccatctctgtggggttgggagcgggcgatccggcgcagtactacaaggcagcgatgattgcagcaagggtgcacccggctcacgttaatcagacttttaccggaagcggttttgctgccggggcgctggcggctacgggaggcaaagacacgtacatcaatgcgctggttagcccgacaggcacaccgggtgaggtgcttatctccactggcgtcagcagcagtcaagggacgccggctcgagtttcctgcgacgctgcggtacgtatgattcaggatatgggggcgcatgcggtgaagtttttcccgatggatggtgaaaaatcattgcatgaactgtccgtgctggcgtcctgcgcagtacgtaacgggatgacactgttcgaaccgaccggtggaatcgatctggacaactttggcatcattttgcagacttgcctggaggcgggggttcctcgggtgatgccacatctttacagctcggttatcgatccgcaaaccggtaatacccgtcctgaagatatcagaagactaatggtgataattaaatctctggtataa

SEQ ID NO: 171449 - DNA, 201 bp, Enterobacter cloacae
atgggctacataattagtataaaacttgatatggctgcggtagatattttaagtggggaggaggatttatttaacacaagcgaaaaatacagttttaaaacttacgatattttcctgaaagaactaaaaaaaagatttgaagagaggcctgagatttatgacgttatagaaaaatacacatattgcagggcaaacctataa

SEQ ID NO: 171450 - DNA, 1689 bp, Enterobacter cloacae
atgagcgagaagttttcagataatgagagattaaaaaaagaaagtgatttattacgaggaacgataaaagatgatttatcaaataacctgaccggtggttttctaggggataactttcagctcataagatttcatggtatgtaccagcaggatgatcgcgacatccgagcagaacggacagctcaaatgctggaacccctccacactgttatgcttagggtccgccttccagggggaatcataacacctcatcagtggcagggaatagatgctttcgcatctgaacatactaattacggtagtattcgaatcaccaaccggcaggctttacagctgcacggagtgcttaaacaaaacataaaaccagtacatcagttacttcatcatcttgggctggactcgcgcgctacagcgggtgatgtgaaccgtaacgtgttatgcacatcaaatcccgttgaatcaggtattcaccagcaagcctatgaatgggcaaaaagaatatcggaacaccttttgccaaaaacaaacgcctatgctgaagtgtggcttgatggcgagaagattaaaagacctgaagatgaaaccattttaggtaacagctatttacccagaaagttcaaaacagcggtggtgataccgccccagaatgatgtggatttacatgcaaacgatttgagtttcgtggcaatcagtgacggagataaactgacaggcttcaatattcttgtcggtggagggctggccatgacacagggagaccagagtacctatccccgtctcgcaagtgagcttggctatatcactctggatgcggcgctttcggtcgcagctgcggtggtgaccacacagcgcgactggggtaacagaacaaatcgcagaaatgctaaaacaaaatatacgattgatcgcgtcggggttgatgcattcagggctgaagtggaaagaagagcaggcatcaaattttgcgaaaccagaccctatttatttactgagcgtggagaccgtatcggctgggtggaaggtgttgatggcaactaccatctgacgctgtttattccgagtggacggctgattgataaacctggcaagccgataaaaacaggtctcgcaaagattgcccaggttcataatggagatttcagactcacacctaaccagaatgtcattatagcgggcgtttctcctgacaaaaaagaagagattgataatctggcgcagttttacggattgatcgatcaaagcatttctatgcaacgaaagaattcaatggcatgtgtatcttatcctacatgtccgttagcaatggcagaggcagagcgtatattgcctcagtttattgaccatcttgaagagatactctttagtaacgggatatcacatgacagtattattttcagagtcacaggctgcccgaatggatgtgggagagcaatgctggcagaaattggactcgttggcagagcgttaggtcgatatgatctgtatattggaggtaataaagagggtacaagaattcctcgcatgtatcggcaaaatctggcaatagacagtatttttgatgaactgagtgagttgataaccaactgggcgaaaaaccggattgcagaagagagatttggtgattttgctgtacgtaccggtataatcagacctgtactgaattccaccatagatttttaccaggcataa

SEQ ID NO: 171451 - DNA, 714 bp, Enterobacter cloacae
atgcaccggcctctgttacttatacaaattggagaaccgccggaggcggttcaggaaactcagggacaacagagtgactggtttgttcgcgcgttatcattgaaaaaagatgatgttattatagtaagacctgacttaggtgaagtgttacctgatgcaaatattgtaagcgcaacgatcgttacaggttcatggcggatggtaaccgaaccggatatcagtgtagaatatacagcgaaatggttacgtaaagcccatcagcaaaaccatccgctactgggcgtatgttatggtcaccatttattatcttatgcacttggcggtaaagtaggttataaccccgcaggaactgaacaggggctacatttgctgaaacttatttctgtcactgacgatatcttgttaaaagatatccctgttcatttctcagcatggttatctcaccaacagactgttttgtcgttgccagatggtgccaaagcacttgcattttcggccatggataaatttcaagtaatacgatacagttttaccagttattcattacagtttcatcctgagtttacatgggatattatgacagaatgtattattaattccgggaatataccacttgccgaagatggaatgttccagccagtatggccaatggtgattttaaaacgattttattttctctattgctcatcaataaatagttcttgcattcattaa

SEQ ID NO: 171452 - DNA, 924 bp, Enterobacter cloacae
atgcttaatagcgaatggttattagataatctgagaattgagaactccgtttaccacgcaggcaagtattgtggctcatggaaaggcgggacttctggcagcggcagggccagttatcatctggtgatggagggtcactgctggctgcaccgcaccctgtcgccctacccactgcgtctggaaaaaggcgatatggtatttattttgcaggattgtccattcgttctttcttcccatgacaatgcgccaggtgcctggcgggcaccggtgcgaaaaatgcaaccgctcgattataaagatgagaacagcaccacattaacctgcggttttattacctttaaaaccgccattacccagatgctgttgagctttttaccgcaggttatcgtatttaaagcgcaggacgacctgtccggctccatcggcaaactgatggcggtgattaatcaggaagcgaggcaggcggcacctcccagtgaaaaacttgtcgcttcgctgacggaaatactcttttttatggtgatccgccactacttatccagccatacggttaagacgccgctggataatattccactgacgacggaattcctcaatctgatggcggagatcgtcttgtttccggcacgctcatggacggtggagaccatggcgcgcgcgtcgggcctgtcgcgctcgtggtttattcagcgctttaaccaggtttcaccactaccacctgccgaaatagtgcgccacattcgcatttcgctggcctgccagcacatcgcgaacggcgtaagcctgacgcagagcgcagagcttgtcggttatcagtctcaagccgcctttaaccgggcatttcaacgcatcacaggtatcacacctggtcgttacagccgggagcactcaatgaacagagcggctcaggaaggtgatgaatga

SEQ ID NO: 171453 - DNA, 552 bp, Enterobacter cloacae
atgacaagaattactttacagactctggcgggcgctccggaggaatcaaaaccttatctggaaaatgcccggcgcgcttcaggttttattcctaatttattactggcgctgtctaattcaccgcaggcgctggaaacatatataacagttggtgcgataaataataataacagcctgtcagcagcggaacgagaaacggtgcaattaattgccgcgaccgtccacggctgtggtttttgcgtagcgggacacagtgcgacagtcgaaaagaaaaagattatgccaccggccgatttacaggcgctacgcgcccggcagccgctgcccgacccgcaccttgaggccatcgccagcttcgcccgcgaggttatcgccacgcgcggcgcggtcagcgaggcggcatggcaggcatttcgcgccgcgggctacggcgagcgtcaggcgctggatgtgatcctcggcgtcagcctggctacgctgtgcaacttcgccaacagcctggcgcaaacgccgctcaataccgaactaagcccgtgggcctgggccgactga

SEQ ID NO: 171454 - DNA, 1059 bp, Enterobacter cloacae
atgctagatcgctcattacgcgagtggcttgacgaacgggcggcggaactcgaccgctccggcgaacgcagccacgcgctgttgcaaaagctggcggaagcgaacctgtttcggatcgggatcgcgccggcgtccggcggcagcggcggtacgctgctggacgcgattgacgccatcagcgcggtggcccgccattcgctgacggcggcgtttatgttctggggacaccgtacctatatcgatatcctgacgcaggcgccagagagcgcgctgcgcgatcgcctgttgcccgatctgctggcaggccggctggcgggagcgaccggtttatccaacgccatgaaattcctctccgggctggaagagctgcaggtgggtggcgtacccgacggggaagggggctggcggctctccgggcagctctactgggtcaccaatttgcaaacccgcggtttccaggcagtaacggtggttcagcccgatggcggcggcgagccgtttatcgccagcatcggctccaggcttaccggtgtgtcacgctctgacgatcttgcgctgatggcgatgcagggcagcgccacggcggcgttgcgctttgacgatgtcgcgctggagcaggacggggtgatccaccctgtcgcccgggcatttttgcccgcggtacgcccgcgctttctcgggttgcagtgcggaatggcgctggggctggccgaacgtattcttgacgagtgccgcgaccggctaagcgacggccacgtgctgcgcgacgaatggcaggcgttgacccggcgctatcgccagatccgcagcgacatttacgccggcgtggagagccagcgctttgtgcagcagcccggcgaactgtttcgcctgcgcatcgggctggtcgaactggcgatgagtggcatacagctggagctcatgctgacgggaggccgggcctacctgtcgccgcagggcgatgggaccgcgcgccgctggcgcgaatgcgccttcctgccgctggtgacgcccagcgttgtgcaactgaaacagcagctggcaaggctgccgtcatga

SEQ ID NO: 171455 - DNA, 801 bp, Enterobacter cloacae
atgagcgtgttgctgcatgccagccgcctggaggtggggtatcgccgcgggcaggcgacgacctgcctgctgcaggatttcaactttgcgctggcggaaaatgaaattgtcgccgtggtaggtgccagcggcgtcgggaaatcgagcctgctgcggatcctggctgggctggaaaagccgctggccggtgaggtgaactatctcggccagccgctggacggcccgcatcctcacctttcggtggctttccaggaccccacgctgctgccctggcgcactctggaacacaatgtcgcctttggcctcgatttctgtcatcagccgcggcttgacgcgcgggaacgacgggagcgggtgcatcaggcgattgcgtcggtcggcctgagcgcccatctcagcaagctaccgtcccagctttccggcggaatggcccagcgcgcggccttagcccgatgcctggcgcggcggccgaaggtgatgctgcttgacgaaccgttcagcgcgctggatgaagtgacccgccacgatatgcagcggctgctgatcgccgtgctgaatcagcaccggatgtcggcgctgctgattacccatgatattgacgaggcgctgctggtagcagaccgggtcattttgctgggcggcgccccgggccgcctgatgggcgaatggcgcccgcagatcccccatccgcgcgataatgcactggaggcgctcgccgccctgcggctggaaatattgaagaaactgcgcgatgcgcgcgcggataccgatgcggagaaacgctatgtgcctgatgtgtga

SEQ ID NO: 171456 - DNA, 1191 bp, Enterobacter cloacae
atgtgcctgatgtgtgatgcgatgtcgcgccgcgactttctgagactgagtgcgctgctgagcgccggagccgctctgccgctggtgatgcagcagcaggcgcgcgccgccgctgagccggacgcgccggtcagagtcggctatctgccgatcaccgacgcggcgccgctgctggtggcgcacgggatgggcctgttcgataaggccggggtgaaggccgagcgtccagtgatgttccgcagctggtcgcagctgaccgaggcgtttattgccggccgggtgaatgtgattcatatgctttcgccggtaacgatctgggcgcgctaccaggcgaagctgccggccagggtggtggcctggaaccataccaacggttcggcgctgaccgtggtgccgcagattagccgcgccgaagagctggagggaaaaaccgtcgccgtgcctttctggtactcgatacacaacgtggtgctacagcaaatattgcgcagcgccgggctgcaggcggtcaccggcgcgccgggggaaaagcaggttcgcctgctggtgctttcgcccgcggatatggtgcccgcgctggcggccgggcagattcagggctttatcgtcgccgaaccctttaacgccctggcggaagcgcgccgggtagggcggatcctgcgctttaccggcgatgtctggcaaaaccacgcctgctgcgtggtcatgatgcacgacagcgatctcagcacgcgccccgcatggagccagagcgtgaccgatgcgctggttaacgcgcagctgtggatccgccagcaccgggcggaaacggcccagctgctggcgcgcggcgacgagcatcgctatacgccgcacgatgccgacgtgcttcgccaggtgctgctgccgacgccggcgatgcaggccggctggcaaaaggacggcgcgatccggcacgaagcgtggcaccagcagcggattgatttccagccctggccctacgccagctatttcgcatcgctgaccgaccagctaaagcagacggtgatggaggggaatcgcgattttctcgcccggctcgacgggcagcaggtcgccgccgatctggtggcgtcggatttcgtgcgtcaaagtatcgtccgcgccggcggcatgaccgcgtttggcctgcccgacggggcgtttgaccgtgaggaaacgatcgcaccatga

SEQ ID NO: 171457 - DNA, 744 bp, Enterobacter cloacae
atgaagccgattttcattcgtattggctgggcgctgcccggtctggcgctgctgctgctgatctggggggcaatcacccactttgccggcggaatggccgggctgttcgcgccggaaaacgccttgcgcagcctgcaggagatgcttgcccacggggagctggtgcgcaatatcgccatcagcctgtcgagggtggcggtcggcctggggctggcgatgatcgtcggcatcccgtgcggcctgctgattggctgctcggcggcaagcgaacgtctggcaatgccggcgctgcagtttctgcgcatgatctctccgctgtcgtggatgcccgttgcggtgatgctgctggggatcggcgatcggccgatctggttcttgctcagttttgccgctgtctggccggtgctgctcaataccgccagtggcgtcaggcagctgcagcccggctggctgcagctggcccgttcattgagcgcgacgcgccgggagacgctctggcatattattctgcccggcgtacgcgcccacgttctcactggcgtccggctggccatcggcatcctgtggattgtgctggtgccctgtgaaatgctgggggtcagctcaggactcggctacgccatccttgatgcccgcgaccggctggactattccgccctgatggcggtgattgtgaccatcggtgcgattggcttttttatggactggctggcccgatatcttattcaggtcatagctgactag

SEQ ID NO: 171458 - DNA, 933 bp, Enterobacter cloacae
atgaataaaacagaacaattgacgacattgccctcctttgcggagagtcgccttgccaacgatcctccgctgcgggcggtgcgcgcctttgaagccattgcccggttaggaagcgtgacgcaagccgcgagggaactggcgatttcgccatctgcggttagccatcagctcaaattacttgagggatatctgcaaatcgcgctcaccgaacggcatggacgccgactggcgctgagccagcaagggcgtgaatattatcgttcgatccgtgcggcgtttaacgttttacgtcaggcgacggagcatctggtggcgcaggagcagacccggcaggtaacgattagcctgattccgctttttgggatgggctggtttattcctcgcctgccgatgtttatgcgcgcgaatccgcataccgagattaacgtggtgtatgccaatcaccgcaactatctgagtgacgcttcagacatgtcgatccgcttcggcaatggcaactgggcgggataccagagtaacaaactgatttccgggcgtatggtgccggtatgcagccaggcgtttttgcgactgcatggtcatattgatacccccgagcaactgctgcaaatgccgctgctgcatgatgaagaacgaaccacctggcatcaatggtttattcagcagggcgtgaagcgttctccgccgcgcagcggccccttgtttgaggacggtctgctgacgctggcgagcgtacaggcaggactgggatgcgccctgatgcgcgaacccctcattatgccgtacctggacaaaggcgagctggtgaagattttcgatctgccaatagatgacgggcgcgactactatttgtgcgtccgccaggatagtgaaatgacgcaggatggcaaactattacagaactggttatggcgcgaagcgtccgtcatttaa

SEQ ID NO: 171459 - DNA, 1224 bp, Enterobacter cloacae
atgatccgcgtgaatgcagaacgtttatggtcgacgcttgagataatggcgcaaatcggcagcacgccagccggtggcgtcacccgactggcattaagcaatgaggatcgcctcgcccgtgatttactgcgcgactgggcgcaggaagccggatttcgctgcgaaatcgatagcatgggcaacatgtttattcgccgcgccggtaaaaagccccagcttgcgccggtgatgaccggttcacacgttgattctcagccgctgggtgggcgatatgatggaatttacggcgtgctggccgggctggaagtgctgcgtactttaaacgatcagaacattgagaccgaacgcgatattgtactggtcaactggaccaatgaagaaggcgcgcgcttcgcgccagctatgctggcctccggcgtctggagcgggcagttcacacaacaatacgcgtggtcgcgtgaagatcaggacggcatcagcgtcggcgaggcgcttgaggccatcggttaccgtggcgaccagcccgccgtcgccttccctgtctacacctgttacgagctacatatcgagcaaggcccgattctcgaagaggaagatattgatatcggtctggtccatgccgctatgggccagcgctggttcaacgttgtaattcgcggatttgccgcccatgccggcaccacgccaatggccagccgccgcgatgcgttgaccgccttcgcccgtctggcgctggcggtggaagacattggtaatcagcacgaacctgacggcagagcgacaatcggcatggcgcagatttcaccgggatcgcgtaacgtagtgccaggggaagtacattgcagcgtggagtttcgtcatccacagactgccgctctccaggcaatggaaacggcgcttcgcaaggcaacagcagatctgaatcagcgcggcattcagctcgacgtggaacgtatcttcgattacgcccccatcgcctttgacgagacctgcctgcagcgcagcgcaaacgcggcccaggcactgggatacagcagcaaacggatggtgtccggagccggtcacgatacctgttatatcagcaaaatcgcatccgccagcatgatctttatcccctgcgaaaaaggcatcagccataacgaggcagaaaacattcagccggaatgggcagaaaaaggcgctaatgttctgctgcacagcattctgtcggcgtcgcttgaataa

SEQ ID NO: 171460 - DNA, 147 bp, Enterobacter cloacae
atgaatagggagcctggcgtcggactgtacattcgaatcctggtactgatgttttccgggctgaaaggtgtaaggccggtatctctgtacgctccggtcagtacgaacgagcgtcccgttttttatattaaaatacggcgctgctga

SEQ ID NO: 171461 - DNA, 1401 bp, Enterobacter cloacae
atgctcaataaaatcaccagccgctggatatggcatcagacgcaacaaacccaacgtcccgcttacctgcttatcgccgatatcatcgcggacggcgtgaacaatagtgagtttcaaccccgtgagcgattgccgccgttacgtgaattagccgcagcgctgtcgctgaattacacgacggcaacccgtggttatgccgaagcaaaacggcgcgggctgattgattccagccccggattaggcagttatattcgcggcaaagtcccctccgttcctctgaatggcggcagcagttatgaaatgacgatgaactcccccatcgagccaggcgcggaactggccctggctatccgtgacggcaccgtgaatctgttttcacagaaaaatatcctgtcactgctgcgttatcaggattttggcggcaacgcagaggataaagcgatggcgaaagtctggctggagaagcaactgccgcccattcatcacgatgaagtactcattgctcccggcatccatagcgcgctcgtgggtcttctgaccctgttctgccgtaaaggcgggagcgtgtgcgtgagcgacctgatttaccctggattgaaagccatcgccagtcagttaggcatcactctgcaatcgatccgttgcgatgaaaatggccccttacccagagcctttgaaaatcagtgccagacgggaaccgtcagcgccctgtatatcaatcccacgatacaaaatcctaccaccctgacccttcccttaagacgccgggaagcgctggcagatattgcgttgcgttacagcattccgattctggaagatgaagcctatgcggcattagcgacacaacatgtccctgcatttgccgaactggcgcccgaattaacctggtatctcaccggaatgtcaaagtgcttcggcccgggtctgcgtaccgcgtttatcaaaggccccggaaaacggaatacccagttgcttgccggcgcgctgcgggcattgaatgtgatggcaagccccataaccaatgcgttagcgtcacactggatcatggaaggcacggcggatcgggtgcttgatgccataagaaacgaggcgaggatcagacagaaaatggcggcggacattctgggagaatgtcagtaccgcgcgtcaccggaaggatttcatctttggttattattaccaaaacatttcaactggaacccggctgaagtggcggtaaaactccgtgaacaaggcgtcagcgccgtttccagcgcggcattctgtacggataataacccgcccgatgccttaagaatttgtctcggcggagcctggtcccgagaaatgtgctcagagaacctgcaaaccatcgcgcatctcattaaacatccggaacatttcagcagcgccgtattttaa

SEQ ID NO: 171462 - DNA, 483 bp, Enterobacter cloacae
atgccagaagtaacttatccagcccataaaaccggcgatttctttgtcgactacgaagagaaagtgtttgaagacgtaaaagcggaagcagggcaaaaagcgcttgtgacgtttcatactgtcgctttcgaagggtcgattgggttcgttaacatgttgcaggccacgcgtctgcaacgtaaaggttttgaaacctccattctgctctacggtccgggcgttatgctgggcattcagcgtggttttcctacactcggcgcggaagcgtttgccggtcatcagaactacgccaatcaactgacaaagtttatgtcggaaggtgggaaagtttatgcctgtcgttttgcattacaggcgctgtatggccatggcgaaccttccttgctggaaggggtgaggccgattagcccgctagatgtgcttgatctgaaattattacacgtgcgtgataacgccgtcattattgagacctggacactgtaa

SEQ ID NO: 171463 - DNA, 996 bp, Enterobacter cloacae
atggctcattcacgcattatccgcgctgcagcggctcaaatcgcgccagacctccatgaggccagcaaaacgctggcccgggtgttggatgcgattgatgaggcggcgtccaaaggcgctgaaatcatcgtttttcccgaaacgtttgtcccgtattacccctatttttccttcattaccccggcgattgccgccggggccgcgcatcttcgcttgtatgaacaggcggtgacggtgccaggccccatcactcatgcggtaggggaacgggcgaggttacgtggcattgtcgtcgtgctgggcgtgaatgagcgcgatcacggcacgctctataacacgcaactggtgtttgacgccagtggcgaattgttgctcaaacgccgcaaaatcacgccgacctatcatgaaaggatgatctggggccagggggatggttccggattaaaagcggtagataccgccgttggacgggttggtgcgctggcttgctgggagcactacaacccactggcgcgttatagcctgatgacgcaacacgaggaaattcactgtagccagttccccggctcgctggttggccccatttttgctgaacagatggatgtcaccattcgccaccatgcgcttgaatccggctgtttcgtcattaatgccaccggctggcttaccgaagcgcaaattgccgagctgacggatgatcccgcactgcaaaaggggctgcgcggcggctgcaatacggcgattatcacgcccgaaggtcggcatctggtcacgccgcttactgaaggcgaaggcattcttatcgccgatatggatatggcgttgatcactaaacgtaaacgcatgatggactcggttgggcattatgcgcgccctgaattgctgagcttgcgattagatgatcgcccggcaaattacgtcgtgcctcgtgaaactgcaagagaaggggaaaatgatgccagacactccgttgactcaacagcaactgattactga

SEQ ID NO: 171464 - DNA, 1113 bp, Enterobacter cloacae
atgatgccagacactccgttgactcaacagcaactgattactgaactgctcacacagggcgttaacgtcatcaatccgcagcagcagcatgtcagtcgtcatggtggtgccggcccttctgatcatcaggcggtggtcattgatggcgtgacggtgatggtgccgatctatacccattcggctcaccgctcgccctgggaggttcgccatcagacctcgggcaatacgacgctttataacaatgccataccggtgagagatatcacctttgcgcacaagccacggttttatgatcgccagacggctgatggcgtgccgtattcaaaaattgcgaccctgcatgggacggatgtactggctacaacggtgttacagacgtgcattcgttatgaaaaccgcgcgaaggcgtgccagttctgcgcgattggccagtcgcttgcggccgggagcaccatcgcccgtaagacgcctcaacagttggctgaagtcgccaaagcggccgtggaactggatggcgtcaaacatatggtgatgaccaccggaaccccttccggcagcgatcgtggcgcaaaagtcctggtggaaagtgcgctggcgattaaagcggcggtcgatttgccgctgcaagggcaatgtgaaccgccgggggacgcaaagtggttcatgcgtctcaaagacgccggtattgattctctcgggatgcatctggaagcggtgacgccggaagttcgcgcgcgaattatgccggggaaagcacaggtcagcattgaacgctatctggaggcttttgcggacgcggtggcggttttcggcaggggacaggtcagcacctatattctggccgggctgggggatacgccggaagccatcctgtcactttctgaaacgctgataacgctcggcgtttatccattcgtcgttcctttcgtgcctatcagcggaacgccgctggagcatcatcctgctccggacagtgcctttatgtcaggcattttgcagccgctgggcggcatgctgaaccgtgcggggctacgttccagcgacattaaggcaggatgcggacgatgcggcgcctgctcctccctgtccagttttgaacaagcgatggcgtga

SEQ ID NO: 171465 - DNA, 564 bp, Enterobacter cloacae
atggaaaactattcaggttatacgatcaaatgggtcacgttgccatgggagcgagaacaggcttacgcgctgcggcagcgggtgttctgccaggagcaacggttatttgacgatcatgacattgatgccattgatggcagcgctcgcctgattgtcgcgctgggcaatgtggggggctggcatgaagaggtggtgggcaccgtgcgtattaatgaagacgcgccgggcgtctggtccggttcacggctggcggtggatacgcgtttccggcggcaggggcagctcggacagatgctgattcgtctggcggtgtgcagcgcgcatgcgctgggatgccagcaattctttgctcaggtacagcatcaaaacgaaccgctgttcagacgtatgcactgggaaacactggggtggattgagctacgcgggatgacgcatgcgtatatgcaggccgatcttgattattaccccgcgtgtcatgacccgtttagcggcatggtgattacatcggcccggcgcggacgcatgtcagcggaaccgacatggctggcagggagcgtattatga

SEQ ID NO: 171466 - DNA, 963 bp, Enterobacter cloacae
atgagtattgacctgcaggtcctggtttcacagttgaaaacatccggtggcatccagcataaacaggatatccagcgggtggcgaataaactgcgcgaggcatggcccaacccttttcctaacggtgatgacagcgcgcttatacccgatggcgaaaattttaaattgctggcgatggagggatttattaatcgctttgtggaggccgatccctggtttgccggctggtgtggcgtcatggtcaatctgagcgacatcgcggcgatgggcggtcgaccgattgccgtggtcaatgcgttgtgggatgcgacgattcctcatgcggagcagatattacagggaatggcggccgcctctcatgcatggcgggttcctgttgtggggggacataccaacctgcgcagcgagcaggctcaactggctgtcgcgatcctgggcgaaacccgtcatccgttaagcagtttcagtgtgcggcccggccagacggtgatggctgccattaatctcaatggacgctggcatccgcccggacttaactgggatgccgcgacgcaggctgaacccgctcacttacgtcgggcgtgggcgctactgccgacactggcggaagataccctgattcatgccgccaaagatatcagccaggccgggctggccgggacgctggttatgatgctggaaagcgccggaatcggcgctgagattgatgtggaaagcattccgcgccctgatggcgtcgggcttgatgactggctgtgcgcctttcccagctttggttttctgatggcggtggacgacgccaatatcgagcctgttcggcaacagtttaccgcttgcggcatcacggcggcggccattgggcgctttatccctgagcgccagctttacttgcagtatcaggcgcagcgcgcgtgctactgggacctggaaacacaaccgcttaccggaatgaccgcactctga

SEQ ID NO: 171467 - DNA, 285 bp, Enterobacter cloacae
atgcctgcgatgcattttatcgtctgctggccagacggcagtaaagatacctgttactccccctcgacggtggtggggcgatattttcagataaaccatccctatccgttgcatgactttgtcgagataacgacgaaggcactggaagaagccagtgagcgtgtcaacgcgaaatttggttattactgctccagcgcccaggatcagttgtcgtcaattatgaccagggcacaacgttttaaacctgaacaaaccgtaacgatcgaaaaaatcacagcaatttaa

SEQ ID NO: 171468 - DNA, 1266 bp, Enterobacter cloacae
atggaaaacagacactatcctgtcatcatcattggtggcgggcaggcaggactcgccatgagctggagcctgacgcaaaaagatattcctcacctgatcctggaacgtcatcgtctggcatgggcatggcgtgagcaacgctgggataacttctgtctggtgacgcctaactggcaatgtaaattgcctggatttccctatgacggtaacgacccccacggttttatggtcaaagacgaaatcatcgactatatcgaacgctacgcgcggcgtttcaatccccccctccgtgaaggcgtgaatgtttcccgggtgagtaaacaaactggcggtttccttattgaaacgtcagaagggaactattccgccggacaggtggtggtggcggtaggcaactatcatcgtccgcgttttccggatctggcggcacagttgccgccgcacatcatgcaggttcattcggcgaattatcgttccagtcaacaactgcctgagggggaagtcctggtggtcgggtcggctcagtccggcgcgcagatagccgaagatctgcatctcgcaggccgtaacgttcacctctgcgtgggaagcgcaccgcgagtggcccgcttctatcgcggacgtgacgtggtggactggctggatgatatgggacattacaaactcacggtagacgatcatcctctgggagaagatgcccgtcgcaaaaccaaccattatgttaccggtcgggatggcggacgcgatattgatctgcgtgaatttgcccgtcagggcatggcgctctatggtcggttactgggctatgctgacggtaaactgcaaacgggtgacgatctgcaacgtaatctggacgccgctgatgccacgtcacagaaaatcaaggacagtatagatgcatggattgcgcagcagggcattgatgcgccggaggaggcgcgttatcaggcggtctggcaaccggaacagccgtcccgcgctatcgatctcagccgtatctccgcagtgatttgggcggtgggattccatactgattttagctggatagatattcccgttttcgatgataaagggtatccggtacatcgtcgtggcgtatcgacccataacggcctttattttctggggttgccctggctatggacatggggatccgggcggttcgaaggggtgggggaagatgctgtctggattgctgacgccatcgaagcgttattggttgcaaggtcgccggtggagaatgactatgcacagaccgtccgttga

SEQ ID NO: 171469 - DNA, 1728 bp, Enterobacter cloacae
atgcacagaccgtccgttgatcgcagagaatccacgccatcgcccgcgctgaatagcgatttctggcgggaggaagctgacggattgtactggcggcgtccttttgatcaggttgtcgaggctgtcggaacgacgccgcgctgtcgctggttctccgggggagaaaccaacctctgttacaatgcgctcgatcgccatttgccttcacgcggggcgagcaccgcgattatccatcgcgatttttgcgggcagacgagccgtatcagttaccagcacatgtgggaacaggtgaacgccctgagcgcgttactgtgtgattatggcgtgacgcgcggcagccgggtattgatttgcttgccggcgacgtcgcttgctgccgtcgcgatgttggcctgcgcccgactgggggcaatacatattgttgtttactcagggttaacgaccgatgcgttgagccagcgtctggatgcctgccggccattgctgatattgcattgcagcgacaaacgtgggcgcagcgcgttgccggatattcaggctgtagtgcaacagagcgctcatccggttgtggcaattgacacggccggcaaacaattttcggcaagcatgaaagcgcatgagggacagtatgtcccttgctgctgggttgaatcatcgcacccctctcatctgctgttcacgtcaggaacgacgggtaaacccaaaggtattgtacgggataccggcggttatgccgtggcgctgttaacgagtatgcgccatctgtttggcatcggtcaggatgaggtattttttaccacggcggatgttggatgggttacggggcatagctacggcgtttatgcgccgttgctcgcgggcatcacgacggtgatgtgcgaggccagcgcggtcaacgcgcccggcaagcgctggtggcaaatggtcgatgaacttggcattacacgtttactgacgattgcgggcgctattcgtctggcgcggcagcaagggaagccgcaggcggcgctacactcgctgaagtgtctgtatctggcgggcgagccgctggacagcgcgacccagcagtgggtcagccataacttgccgacgccgctggaaaatcattactggcaaaccgaatcaggctggccgctattggccgggaagggcgttggattatcgccggttttcagtcgttcagtgtctgttatcgacccagtgaagggggaatactgtgcggaaggcgaaaccggcatgctggtcgttcatgaaacgctcggacctggcgggatgacaacgctatggcaggatgacctccagcacgatcagaaatactggctgatgttcaagggaaaatggtgctatgcgacccatgactgcgcggtggtcagtcaggggaaaatccagctgatggggcgcatggatgatgtgatcaacattggtggcaagcggctgtcaaccgctgaggttgagggcgttctggccggtatgaccggcatccttgaggtcgcggcaacgcgaacgccgcatccgctgctgggggaaatggtggcgctctatgtcgtcaccgagtggattgaaacggaggctttacggaaactgaaaaagaatatccgtgaaaaggtaatatcgtgctgtggccgttttgcgcaaccacgacatatcttttttattccctccctgccaaaaaccttttccggaaaggtgttacggcgacaactgaccgggccatcatcgtttatatga

SEQ ID NO: 171470 - DNA, 924 bp, Enterobacter cloacae
atgcaaacaaaaacgcttgccgcattacaactcgggtcgtcgccgctgggaaaagcggcgacgttgcaggatatactcagctttgagccggacatcaccgcgcaagaaatcgatctgctcgtcatgccggaagcgcttctgggcggataccccaaaggcagcgcgtttggcacctatctgggcttcagattaccggaaggccgtgaggagtacgcagagtattacgcgaatgccattgatgtacccggacctgaaacggatgaactggccgcgctgtcatcaagaacaggaacggatattgtcattggcgtaatcgagcgtgctggcagtacgttatattgcagcgcgttgtttttttccgctcaggatgggctggttgccaaacatcgtaaactgatgccgacggggacagagaggctgatctggggacagggcgatggctcaacgctgcccgtcatcgagacgtccgcaggaaaaaccggttcggcaatatgctgggagaatcatatgcctttgctgcgggcgacgatgtacgccaagggtattgaattctggtgcgcgccaaccgttgatgagcgcgacatctggcgcgcgtcgatgcgacatatcgcccatgaaggcagatgcttcgttatctctgcctgtcaggttcaaccgtctccggctgcgctgggtctacaggttcccggctgggatgatcagcgcccgttgattaacggtaacagcatgattgtcggcccgctcggcgaaattctcgccggaccgctggagaacgccacgggtttgctggtagcgaaagtcaatcgcgaagatctggtaaaagcgcgctatgactttgacgtatccggccattacgcccgccctgacatcttctcgctcagggttgacgaacgcccaaagcataatgtggagtttacgcgttaa

SEQ ID NO: 171471 - DNA, 795 bp, Enterobacter cloacae
atgaatagaattaatatcaatgaactagaccttaatcttttcaaagtgctggaagcgttgtacgaagaggaaagcgcagggcgtgccgcgctgcggttggggatcacccagtcagcggtgagcgcggcgctcaatcgtctccgaaagatttatggcgatcatctgtttgaaagaacgggcaggggacttaaaccgaccaccaaagccagcgagttaaaaagtgctgtcggtgatattttggaaaaatgccgtcagacgctgccgccggcagtgggcggccccgatgattttaccgggcggaccgttattctggccgtgtctgatgactttgagatagtgtggggtaaaaaaatcatccagttattacaggtgctggcatcgggactacgattgcagttccggcaaagtaacgctcacctggttcaggatatgttgatgcatcgcaacgcggatatcgcagtcactgccggtggcattcgctccaccctgctgtcgaaggagctgcttgggacgggaacctattcgtgtatttttgacggtgaacgacgtgaaatggatatcgaagactatctgaacagaaatcacgtactggtttcctctggcggttttgtcggcattgtggatgagaaactggcggagatcggcagaggccgaaaggtgattgcatccaccacccatttctccgcattgccctggctgataaaaggcacggatgcgatagcgaccgtaccacacggaggtcgcaggacttcatgtggtggcctgtccgctgatattgcctgcctactctgttga

SEQ ID NO: 171472 - DNA, 957 bp, Enterobacter cloacae
atgaacctttactattcaacagattccgtcgaatgcaatcaaagactcggatactggacagatgtcatttgtaaacattgcattccggcaaactccaggtttgaggcagtaaaaaacttcagcgcctcgctgaatgtcagacgctttgacgatcttgaggttacaactattcgttcatcgccgcatgattgggaaagaaccacaaactatttgagaaaaacgtcggaagatgattactggttgggatttatcgagaaaggctacaccttcttcgagcaggacgggagaggggttcacttgcgagaaggcgacatgacgctttacgatgcgtcgaagccgtttagaaatcatattgatgcatcggccatgcatgtggtacgtctgcctcgtgcggagatagaaaagaaaatccctggcatcgataattttatcgcaatgatgctggataaaaatgccccgttcatgagaccagtgcgtgaaatgctacttgagatgaccagacgtggggccagtgaagagctttttttgtcggggaatgcttatgccggggaatgctccaggctgcttttggagttgataagtagttgcatcaatttgcagtcggcagggtatggaaataaagactataaatcttacgcccgtattatgaattacatccagagaaatattggcgatagtgaattaacgctgaagaaaattgcgggcgataatcatatttcaacccgaacactgacgagaatttttgccagatatggacagtcgcccatgagtattgtctggcagaaacggctggatttatgcaaaaaaatactcagtgatggacatgcaaaaaatattactcaggtagcattggagtatggattcaaagatatgtcgcattttagtcaggcgttcaggaaacagtttggtatgacgcctaaagaagtctattccagaaataaattctattttgtttaa

SEQ ID NO: 171473 - DNA, 1443 bp, Enterobacter cloacae
atgagtagaatgaagtcgtggtttcaaggccctcaaaatatttccaaagccgaagctgtcgaagactatgccgtaggacgtgttccctcccactaccgatggcctattcctgcgatcattgttgtgcttcttggaaattctaccgccatgttctggttcagttttggtgccgacatgagttaccaggttggctggccatacatgttactgcctgtcacctatatggtgatatttgccacactgattggatcctgcaccatgaaactggccagcaaggaagggttatccctgaacctgctcacgcgtggattgggatttggttatatgggttcagccttaacgtcctttatttatgctattaacttcatattctattttctctttgaaggcaccattgtctcgcatgcaatagctaattattacggcatcgctatcaattctttcgccggcattgccatcttttctgtcattggcctgtttgccattttctttgtctggaaaggcatgacgtcattgcaattcttgcaaacctggggcggcccaatttttcttgtcctgttcgggttttgtatctggcaattggttcaccattatcccgttgtaggctttgacggctggaaagcgagaaacgaagtcgacagtaacgcgctatggctggtattcagcatggccaacggacaaattgtctttcaggggctgatgggcaccgactatggccggtttgccagagcgaatgtgagctataaaggaaccatggctattatgctgggtatgctgttaccggtggtggcggtcatgctgtttggatcgttcattgcctatacgcttattcctcatattaccaatggtgatccctggtcacttgccatggacccggggttcgtatttccgttaattatttccgctatcggcgttatctttgccattgttacacagatacgaattaacgtactgaatctttattccggttctattgccttatccaatacgatggacatggccttcaatttccgaccaggacggcaatggtggatgctcctcgtcttgattctcgggatcgtgttttactctttcaacgtattagaacacacggcaacatttttaacgattagcggaatccttaccaatacgtgggttttcattattcttgctgactactatatctgcagaaaaatgcttaatcttgcaccagccgattttgttgaatacagaaaggagtacctatacagatataaccctgcaggagtggccgctctatttatttccgttgtcgtcggtgccgctggtgttttgggaatatatcctatggtatatgcttcatttatcgccatgatccttggccccattattcatgttattatcagcgttatgaccaaagggaagttttattttaaaagatttcctactgacatgaccacacagtgggtaagacagaaaaaataa

SEQ ID NO: 171474 - DNA, 966 bp, Enterobacter cloacae
atgaacaatttgtcacagacgacagcggatttattaaagaatgatctgctggtcgatacctcgccgattatggttgcggcagttaacgcggagtccgaacttttcgatctacaggtcgggctggttaaagcggacagaatcacccgtgctgcaaaggatgccggtgctattttggtcgtattcccggaattatggttaccagggttcattaacggtagccctgtcggcaagcggggtatgccgccgaaaccctttaaacactatctggataattccctggaagaagggacgcctgaatggcatgcgttgctgaaaattgcgatggaccatcaggtttatctgtcaattggtattgctgaaaaaaatatgaaagaaaagcatctgtacatgacgcagttgcttatcgggccgaatggtacagtgctggataaaagaagcaaaattaacccatcgggcgatgaaagaaattatttttcagatgtccccatgaacggtaacctgagagtggtcaatacgccgttggggcgcataggtcagctttcctgcggcgaacattttcgagcgcatatgactttcaatatgatggcgcaggcggaaaatattcacattgcggcctggccgtataatatggtggaaggcgaaggggtgtggtgggaaaaatatcatatgaatatgattaattccgcctattatgccgaaaactccggtgcctggacaattctggcggcagtcggtcggtcggctatttttaatgcggatggtgaaattgttgtagaagcggataattgtgatagtgattttgctattgcggagatcgatcgttctgcattcaacagtatttcacgtaaaaacgcatactacacatataatatcattagtctgattaaagaaaactatcctcagcaggtggattctgacgctgcggtggaagaattaaaccagcctgatgtcactaaagtggaataa

SEQ ID NO: 171475 - DNA, 963 bp, Enterobacter cloacae
atgatatccactgtcctaattcttttgccggttttcgcattgattcttgcaggctatatctgccgtcggtgtcaggtgttcgggccatcgtcggcaacggaactgaatcgtttcgtggtctggctggctctgcctgcgttgctgttcgatattgtggcgcatacctcgtggacgaaaatctaccagcccggttttttctggtcgttcgtgcttgcgggcgcggtagtattcatcgccgtgttcgcgatccagtgctggaacgggaaaccggcagcggacgccagcgtggacgcggtggccgcctcttaccccaataccggctatatcggcttcccgctgttgctgctggtgttcggtcagaatagccaaattccgacgaccactgccacgatcgtcgtcgcctgcatgtttttcgcggtggctatcgccctgattgaaatcggcctgcaagcggaacgtcaggtgcacaaattggtgttcaaggtgggacgtgctgtgggtaaaaacccactgattatctccccgttgctgggggcattgtgcgccggttccggcgtgaccatccccgccagcgcggaaacctttctcaggttgctgggcggggccgccagcccggcggcgctggtatgtttgggcgtcttccttgccagtcagcgcgaggcgaaaaccgatccgacaccgcgcggtcaggggaaaactgtactgacgattgtgctggcgaaactggtgcttcaacctgtactgaccagcatactggcggtatgggttttcaagctgtcagcggaactgagtgcgatcgcggtactcctggcagcgctgcccacaggcacagggccgtttatgctggcggaatactatcgccgcgatgctctggtgacgtcgcgtgtcattctcatctcgacagtgttatcaatcgctaccctgattaccatcatgcgcatgatgggcgtagcccccctctga

SEQ ID NO: 171476 - DNA, 156 bp, Enterobacter cloacae
atggatgcggtctgtctggtcacctcgcgggtggtggtagcgagtttgtgcacttgccactgcggcgaaacgtcgtcccgtctcgccagcaggtttgtcagattgggaatgcactcgatgtttgagatgaaagaaagaccggagacttcagtgtag

SEQ ID NO: 171477 - DNA, 864 bp, Enterobacter cloacae
atgaagattgccaagatactcaataataatgtcgtgaccgtaatcgacggaaacaataatgagtcggttgtgatgggacgcgggctgggcttcaaaaagcactctggcgatttgctggacgaaacattgattgaacgggttttcgtgatgaaacccggagaactgacatcgcgtctacaggagttgctgtccgagatcccgatggacgttatcaccacggctgacaagattattctgttagcaaaagaacgtcttcccgggaaactgcaaaacagcgtttatatctctttaacggatcactgccactttgcaatagaacgtcacaaacagggcgtgcatatccggaatgtgctgttatgggaaataaaaaggctgtatccaaaggagtttgctgtaggcctggaagcactggatataattgaacaacgtttgaaggtgcggttgccggaagatgaagcgggttttattactttacatctggtcaatgcacaacttgccagcgaaatgcccgaagtgctgcaaattactaaaatcatgcaggaaatactgaatattgtaaaatatcaactgagtctggattatgatgagcaagcgttaagttatcatcgttttgttacccatttaaaatttttcgcgcagcgtttaacaggtaaaagtaccgtatccagtaatgatgaatcactgcatgatgtcgtgagagaaagatatcagcaatcttataattgttcggaaaaaatacagttgcacattcttcagaagtatcattataaacttacaaaagaagagatgatgttcttaaccattcatatcgagcgtgttcgtacggaaggagaagataaaaacgaacccggtgatggagaataa

SEQ ID NO: 171478 - DNA, 1887 bp, Enterobacter cloacae
atgaaatataaggccttagccagtgagatactcgatggtgtcggtgggcgcgataacattattaacgtcatgcactgtgcaactcgattacgttttaaacttaaagataataaaaaagctgataccaatgcactgaaaaataatccaggcgtcatcatggtagtggaaagtggcgggcaatttcaggtcgtggtggggaatcatgtcggtgaggtttatctggcattgcttaatgtatccggcataagcgaaaatgcggatgatgaagagcaaaacagcgacaaaaaagaaaatatactgtcccgcttgattgatgctgtcgccggaattttcacgcctttaatgggtattctggctgcgtccggtatattgaaaggttttttagcgctcagtttagcttgtggctggatgaccgacagcagcggtgtctataaattattattcgccgccagcgatgcattattttatttcttccctattattcttggttacactgccgggaaaaaatttggcggcaatgcgtttgtaaccatggtgattggtggtgcattagtacacccaacgatgatcgctgaatttaatgcgatgtcagctgtggattatcagccattacatttttttggtattcctgtaacgttcattaattatacctcgtcggttatcccgattatttttgcggcgtgggtctcatgccgtctggaaaaaccgttgaataccctactacatgccaatatccgtaattttttcacgccggtattatgtctggtcattaccgtgccattaacatttttagctatcggccccgtgactacctggctgagccaccagttggccagcggctaccaggtcatttacagcgctaaccagactatcgctggcggatttatgggcgggctatggcaagtgtttgttatgtttggcctgcattgggggtttgtcccgctaatgatgaacaacctcagcgcgctgggcagcgatacgctaattgcagtactgacgccggcagtgttcgcacaggcaggggcatccctgggggtatccttacgtactcgtgacgcaaagctaaaaggtatggctggctcggcgttcccggcggggatattcggcatcaccgaaccggcgatctacggtgtgaatctgcccctgcgtcgtccgtttatctttggctgcattggtgggactctgggcggtggtgttgctggttatttcggtgcgacacaatactctttcggcatgcccagtatttttgccttcacgcaaatgatcccgtcaaccggtatggatatcaccgtctggggggccattatcggtacagccattgcctttctgttttctgcactggcgagctatctgttcggaattaaaaaagaacctgtgacggaaaccctgtcgaacgatgaccgtcaggagcagaaaccaaccctattactgaatcggctaccggtcggaagcccaattgctggtgaaactctgccactggaacaggtgggagatgagacgttcgccagtggattaatggggaaaggtatcgcgattaaaccacggactggacgtgttgtttcaccagtgaatggaacagtcgcctcattgtttaaaactcatcatgccattgggctcgaatcggatgagggcgttgaagtgctcattcacgttggtattgatacggtaaaactggatggtcaatttttcgccgcacatgtcaaaaccggcgatgttgtgaaacgaggtgatctcctggtggaatttgattaccaggcaatcgaaaaagccggctatgacacgacaacgccagtcattattacgaatagcgaagattacgtagatgttctgccagccgcagaaaatgtggtggaagaacagaacgtactgctgacgctaattcgctga

SEQ ID NO: 171479 - DNA, 1395 bp, Enterobacter cloacae
atgcgttatccgtttccgaaaaaattcttatggggtggtgcaatcgccgccaaccaggttgaaggtgcatatttaacggacggaaaaggattgtctacgtccgatttacagccatacggtatttttggcgacactgtcgtgcgtacgtcgggtgacagtgaaattaaagatgtcgcgatcgatttttatcatcgttatccagaagatatccggttgtttgctgaaatggggttcaaggtattgcgcacctcgattgcatgggcgcgtattttcccgcaaggcgatgagacccagccgaatgaggcaggactggcattttatgatcgtctgtttgatgagatggcaaagtatggtattcaaccgcttatcaccttatcccattatgaaatgccgtacggtctggtgaaaaattatgggggctggggtggccgtgaaacgatagctttctttgagcgttatgcccgcactgtgttccaacgctacaaaaataaggtgaaatactggctgacattcaacgaaataaactgtgcgctgcatgccccctttaccggagtcggcctgccttctgatagcagtaagcaagctatctatcaggctatacatcatcaattggttgccagcgctaaagcagtaaaagcatgtcatgaaattatcccggatgcgaaagtgggcaacatgctgttaggcgcgatgatgtatccactgacctgtaagcctggtgatgtgctggaaacaatgcaacagaatcgtgactggctattttttggtgacgtccagaccaggggatattacccggcatatatgaagcgtttctttgcgcaacacggtattacactgacgataaccgaagatgaccgccagtcgttgaaagaaaccattgatttcatttcattcagctattatatgacgggctgtgtaaccactgatgaagagatgaatctgaaggcccgtggcaatattttaaacatggtaccaaatccgcatttaccaagttctgagtggggttggcaaattgatccggaaggtctgcgttatttgctgaattatctgtatgaccgttaccaaaaaccgctattcattgtggaaaatggcctgggcgctaaagataaagttgagagcgatggcagtattaacgatgattatcgcatcaactatctcaatgaccatctaaaacaagtgggggaggcgcttgaagatggtgttgaagtcatgggttatacctgctgggggcctattgatctggtcagtgcgtcaaaagctgaaatgtcgaaacgctatggcttcatttatgttgatcgtgatgatgagggtaacggtacattagaacgtcgacgtaagaaaagcttctactggtataaagatgttatttcttctaatggggcgacattgaaataa

SEQ ID NO: 171480 - DNA, 1659 bp, Enterobacter cloacae
atgcgcaaaaaattcccagtaaaaataattgtactactgatttcgtccattcttttatccaataccgcaatggccgccacgctgacggtagaggagcggctggcgctactggaaaaagaactggcagaaaataaagcagagctgcaatcaactaaaaaagaactgcgtgaatataagtctgttgcggaaaacaggattcagtcaccagcgaatctaacgaccggtgataaatcgctgtccgttacatctgctactcattcttctgttaatcaaacggataaaataaccgcaacaaagacggttgatattaccgctaccactaacgcaacaaaaaaatcactgacgctggatgagatcagtaaatatgtcaaagatgacatcgggttctcttataccggttatttacgttccggctgggcaaccggaacgaatggttcaccggagtcctatgcaattggttctttaggccgttttggtaatgaacattctggctggttcgatctgaccctcactcaacgggtttataacaacgagggtaaaacggctcatgcggtggttaaactcgacggaaatgttggccagcaatacagttccgggtggtttggcgacaacaccggcaacgagaatattcttcaattttccgatctgtatctgacaactaaaggttttctaccttttgcgcctgatgcagatttttgggttgggaaacatgttcttcctgtgtatgaaattcaaatgcttgactggaaaagtgatcgtgtttacgctggtgccggactgggtatagaaaatatgaacgtggggcctgggaaattagatctctcgctaacccgtgaagatgttaaggtttattcaaaagactatgaaaaaccggatatcggcaaagatgctgatacgacccaaatgaacaccaataccgttgaggtgcgttacagagatctgccattatgggataacggtaccttgtccctgatcggaaaatacgtaatggcaaataagaatgatacccagaaacagaacgaacagaataatgaatattttaaaatgaaggatagctatctggcaactgcgatcataagacagacgctggataaacgtggtgggtttaacgagtttacattacaaaccgcgaataactctattgccagtggattcgctcgttataatgatgggaacccttcaattggtcagggtgaatattattatggcgatcatacaggggggaatgcatttcgcttactttcacaaggtgaaatatacttacatgaaaatgtaatcatggcaaatgcgttggtgtactcctggggccaggatatttacagctatgaaacgggtgcgcatagcgattttgatagtatccgtactgtaatccgtcctgcatatatttgggataagtttaatcaaaccggtgttgaactgggttggtttacccagaaaaataccagccagactggtgttaatttccgcgagtctggttataaaacgacgctttatcatgcattgaaagtggataccagtattctgagttcaagaccagaaattcgtttttacggtacttatctgaatattctggataatgaaatatcaggctacaaattctcggatgatgaaaataaatctcaattcatagtcggtgttcaggctgaggtgtggtggtaa

SEQ ID NO: 171481 - DNA, 1017 bp, Enterobacter cloacae
atgaatattcacaggtttttttcccgatctgccatgttgttagtggcactccctttcttctgtctgtctactgctcaggcccaaacctcaacttttgaggttgccgatcataaacaggtccgtgtcattatcagcgccgatgctaaaaatgaggctgatgatgattttgccattgctcatgcggtgctgacacccacgatgcgggtgaaagggctgattgccgcccattattcccgtactgcgccgttgttaaaacgtgatggaacaaacagcatgatggaaagttatgatgaacttaaacgcttgatgaaagtgatgggtaaaacggatatacccatttatcgtggagccacaggcgcgttaacggctgatggcggtacgcctgcgttgagtgaaggcgctcaggcgctgatcaaggaagcgttaaaagatgatccgcatcccttatttgtgttagttatggggccgattactgatattgccgccgcgttgcaggctgaaccgaaaattgccagcaaaatgaccgtagtgtggattggcggtatgccttatccgaaaggtggctgggaatacaatatgtttaacgaccctgtcgccgcaaacaacatcttcaagtctcaggtaccattgtggcaggttccgcataatgtctatatgtccgtgcgtgtgtcgttatctgaacttgccgtgcgcgtaaaacctcaaggaaaacttggtgaatatctgtggcagcagctgatcgagtttaatcgtgccatttccgctacccttaaggatgttccatggccgaaaagtgaagtctgggtattaggcgataacccgtcggttgcactgttgctggatgatcatgaatatcattacacactggtgaatgcacctcagctaaacgaagatctcacctatataccccaggacaatactcgtcagatccgggtctataatgcgattgattcccgctttacgctcgaagatttctacgcaaaacttgcgcttgctcatgccagtgcggttgattaa

SEQ ID NO: 171482 - DNA, 186 bp, Enterobacter cloacae
atggaggctactccggcagggaaacactcatggatggcggcaatattcaccgttctggataatgtttcatcctgccgtggtccagtgaacgacaaatcttctgttctgagtaaagaaaacatggccgctatccatgatgcgcttgaaaaatatagcgcagagcatccggtttttggattgagatga

SEQ ID NO: 171483 - DNA, 261 bp, Enterobacter cloacae
atgaaaaatgagaatgatctatccaaagaagagatgttcagtgcaatagttgcacaagcaaaagagtactcatcaatcgactttgaacagcttgaaaaagatggcgttattaaaaaagttaagggtggttatctcgttgttaaacttagtcggcttcctgatgcggctcgtaagttaatgaaatcccttaagtccactaaagatggtgtggaaatgattattagtaagcctccaaaatcttttctggatttgggcaagtaa

SEQ ID NO: 171484 - DNA, 861 bp, Enterobacter cloacae
atgatagaatttaaaccagaaattggaatgagaatttatattgatgaacagttagaacaatttggttttcattttaataatggcttaacaacacttgaaaatttaaaggctgtttttgcattacaaagaaggataccaagtgtcaaaagaagaatagtaatcgaactaccaggaattcaagtgcctaaggaaacagaaaaggcatatgaatcaatcagaaggaaacttacccttgggttatccataaagccacatctttctttaagcacgtcgaaatacacatataatgatcttcttttaaactcatgggatatacatcatttacatctttcagaagaaccatataaaaagggattctttaaccgaactggccccgttttattttgtatgttttttgaaaatgcagttgttttcatagacattatgccacatggaattggatattcagatgtatgggttaacgaagaattgataaaaaggttacataagtatcttcctgaatctttagagcagtataaaatgaaaggtattacaggagataatttagattctaaacaacgattggcattgcaaaaaaatcattgtaactatgcaatgagaatggaagatggaactgtatatcaactaatgggaattatgtctaatggcgatagtttccatgacatacatagattaatgcatatgcaaagaatggttgattatttctctcaggtaataaaagcagatgagaaagcattcaagcaatcattggaaataaaagacactgagaatttagtattaacgatagctttccacgaaaatgatattaaactgtatgcaccaaaacaaaaaaccatatttaatataaaccaccctaaataa

SEQ ID NO: 171485 - DNA, 666 bp, Enterobacter cloacae
atggttcaggataacaatacgagtttggctgcaaaaatagcttcgttatcaacactacaaacaattataacccgcatgggtacggtttcgataagtataaaaacaatatttatcacggtttttggtttttttattactggctattggttggatggaaactttcctttatggcaaaagttcattcctttcttctttgtaacgttatttttcgctctaatagactcctattatctgtctattgagaaaaagtataggcatgtatacgaggctttaagtgatgaagatacagatcaaaacgtgaatttttttaactggaaaccttatttaaaaaagtatgatctcgatgccttaaagtccgtgagcatatggggtttctatattgtcgtatatgtaatatacatattggttgtgtctgttgtttatgatgtgaaaactaatctgcaaaacgactctaaaaatgcaacaaccagttctagattgattgatttattggagtcacaagagaaaatacagaaggaaatactgagttatttagatggtagatcaacttcatgtgatctccgttatagaattgagaataatatcacgattgataatgaacgttatgaatccgcgaaacctaataagaaattaatttcaaagcctattgtgaaaacatgtaactaa

SEQ ID NO: 171486 - DNA, 993 bp, Enterobacter cloacae
atgtcaagcgtaagagagtatgaaattgctctttcattcgcaaatgaagaaagagattacgtcaaacaggtagccgatctattaatacaatctggtgtaaaggtattttacgatgcattcgaagaagaaaaactttggggaaaagacctatatacttatctaactgagatatataaagaaaaggctctttatactataatgttcatttcatcgaattatgcccaaaaactatggacaaatcatgaaagaagagcaatgcaagcaagagcattccaagaaagtgctgaatacatacttcctgcacgatttgatgatacagaaatacctggtatattgcccacaatcggtttcatatctcttctaaatcgctctcctcaagattttgtagaaataatcaatagaaaactggtgaacagtggaagaactatcccttctgaatcaataagaaaagcttacttctcagtgtccccacttcccaaaataaacccattgcatttaagagtggttgtgaaatcttctacaggagaaatagtccccgctgcaacagtagttgcaattgcagacaacgatactattaaacaaggaacgactgatgcaaatggctcattgactttagaaatttttactcgaagaagttactctattttagtagcccaccccaattttgcaggtgcaatatatcctaatgtagatcccgcaatagatattgaaataattcttcatgccactgaaaccattggttctgtaattattaatgggattgggtatataaatggtttagagggacgattaaatcctataatggatagcagtaacagaacctatctttatgcagataatatagctgttaatgatggagaaattcaacccgtgccttttgaaataaactcaccaatcactttagaggattgtaatggcgtaataatcgaagccgttttcaagcacatccaagggaaatcttctttaattcaattttttcatccgcgaaaataa

SEQ ID NO: 171487 - DNA, 840 bp, Enterobacter cloacae
atggctttttgttctgcttttgttggtggagttgttgcatacaggttcaatctaaggcaagaacgaataagagaggagcgagctaagttttctacggtatcaaaacttcaaataataatgatgtcctgccttaatgatctcattgcaattaaggtgaataactttattgacatgcagactgacaatccgatacagagaactatgttggttggggttgtgctaagtaatagcaggcctgtagatttcgacttttcgaccttatcttttattaaaagcattcctacagctaatctcccaataactcagcagttgttaaatttttggaagtatagagttatgcgttgttcaagggtctttccatcagcagttgaggttggaaaaagctggcgcaatcttaatagattagttgcttgtattggaaattttaattatatttttacgatcttggcagaaaggaatatccttagaagggaagttgatgataaattgcatagcgctaatttatcatcaggtttcacgcatgagcagttgctagatgtagttgaagaacataaattgataaaacttgttgatcttaccgaaatgctcttcgcgttaattgaatttatcattaacgaacttcactcatttgttagggaattccctgagatagctgaaagtaatattgaattatctctagtcggagggggagggttactacggtttagttcagatggaaggccactttttgaaaaggccttaaatccaatacttaagcctaactatagaattttatctgaattcatgggagcctccgttgaagaacttattcagcggtacacttttaaaaatccatcgtaa

SEQ ID NO: 171488 - DNA, 1506 bp, Enterobacter cloacae
atggatcatgtaataacagcctcggatcatgaactactcacattaatatgcaccgggcttatggggctaattttattaaggacgttttgtggtttattgaaatcatggacatctctggtatttaattccatggttgatattcaatggaagattggtttatttgaacaacttctcaatctcccacttgttttcttcgaaaaaagaaaacttggcgatattcattcacgcttcgcttcccttaatgtgatcagggcaacactttcatcaggcattatcaattgtattgttgatagcataatgtgtttagggcttatcatcgggatgtacttgtatggtgggtggattgttttgctggttttgttttttacaattctgtttgtgctattacgcctctcaacatatcaatattacaagcagatcacggaagaaactatagtaaaaaatgcccgtgccaactctcactttatggaaaccctatacggtataggaaccataaaatcccttgggattcttgataccagagcgaagcaatggttcaatattattgttgaggagaccaactcatcaataaaacagtctaaacttgatatgttcttcttaggggctaatacttttatcggtgcaattgatcatattgtaatcctttggataggggcatctatggttatggatggaaatatgaccctgggtatgtttgttgcctttaatgcatatcgtatgcagtttactgagagggctggtaacttagttcaactaatattatcattcaaaatactatcacttcatagtgatagattatcagatatagtccttacagatcctgaaaattgtcagcaagaaagaaaactatcgccaaaaggacagccatcatctttacaattgagaagtatacattatcgatttgacagctttacgaagcctatttttggtggtctcaatttatctgttgagccaggagaaagtctcgcaataactggcagttctggtgtggggaaaagtacacttatgaagataatgtctggtttaatcaaaccagatgagggaagtgtccactttgatgggtatgacatcaattcggtgggcgttaataattatagagaatgtattgcttgtgtgcttcaggatgatcggttatttgctggaactattggcgataacatatgttcgtttgctcaagttaaagatatgacaaaaataacgaattgtgccattgctgcttgcatacatgaagaaatagtcaagatgccaatgggttatgaaactctggttactgaactaggcggaagtctgtccggtggacaaaagcaacgtctgctgatagcaagagcattgtacaaagaacctaatattcttttccttgatgaggcaacaagccatcttgatgagcagaatgaaatgaagattaatttatctattaaaaatttaaacattacacgtatctttatagcccatagggagtcaacgatccggtcagctgataggatttttaacctatcaaataattag

SEQ ID NO: 171489 - DNA, 1512 bp, Enterobacter cloacae
atggctatcacgcgacccactccagaacagctccaggcgctcgcccaccgtttacatatgcagttgacgccgaaacaggccagtgaatatctcagcctgatgcagggaagtttcgatgcatatgatcttatcgaccaacagcccgatgacatcccggaaattcgttatccgcgcacggcgggttaccgtcctaccgacgcggaaaacccgcacaacgcctggtgttacaaaagcgaggtaaaaggggcaggcgagggcaaactggccgggcgcaccgtggccctcaaggacaacgtggcgctggctggcgtgccgatgatgagcggcgccgccgcgctggaaggtttcgttccgtcttatgacgctacggtggtgacacgcctgctggacgctggtgccaccattctcgggaaagccaattgtgaacattattgcctgtcaggcggcagccatacctcggacgcggggccagtacacaacccgctgcgccacggctattccgcgggcggctcatcctcgggcagtgcggcgctggtggccgccggtgacgtggacatggccatcggcggcgatcagggtggctccattcgcatccccgccgcattttgcggcatttacggtatgaagccgacccatggtctggtgccctacaccggtatcatgcccatcgaagccaccgtggatcacgccgggccaatgacggccaacgtgcgcgacaatgcgctgatgctggaggtcattgccggtgaggacggactggatccgcgtcagtacgcgcccaaagttgaggcttacagcgacgcgctgggccggggcgtggacggattgaagatcggtatcctgactgaaggtttccagttgccgaatatggatatacgggtggaggcgaaggtgtatgaagctatcgcccgtttggaaaggatgggggccacgatcgggacggcgtcagtggcggagcacgctctggcgggggctctgtggcaatccatcggctgtgaagggctgatgatgcagatgatgcacaacggaatgggctttaactggaacggtcaatacgacatcgcactgctggacaagcagatcggttggcgcgatcaagctgacttactctctgcgccgctcaagctgtgcatgttcgtcggccagtacgggctggagcgctatcacggtcgctattacgctaaggcccagaatatccggcgccgggtcatcgccagctatgaacgggcgcttgaaatgtatgacttgctagtaatgccgacgttgccgatagtctcccagcctttaccggagccgggttgtcctatgccggagtacgtgcaccgagcactggaaatgctcggcaacacagtaccgcagaacattactggtcatccggccatgactgtgccctgcggtttggtggacgatttgccagtagggctgatgctggtggggcggcgttactcggaaagtacgctctaccaagctgccgctgtgtttgaagcgcttggcgagtggcgaaatttttaa

SEQ ID NO: 171490 - DNA, 615 bp, Enterobacter cloacae
atgagccatcaacataaacacgatcataccgaaccgccacaggagatcgccctaagggtcaaggcgttggagtcgctgctgctggagaaaggtatgatcgatctggctgcgctcgatcagttggttgacacctatgagcataaggtcgggcctcggaatggcgcacaagtagtggcgaaagcctgggcggatccggcgtataaggcgcggctgctggcgaacggcaccaaagccatcgctgaactgggcttttctggcgttcagggcgaggacatggtggtagtggaaaacaccgctgcggtacataacgtattcgtttgtaccttgtgctcctgctacccctggccggtgctggggctgccgccggtatggttcaagtccgcaccgtaccgttcgcgcattgtcattgagccacgtgcggtgctggccgaattcggtttgaatattcccaaaaacaaagaggtacgcgtttgggacagcagcgccgaactgcgctatctggtgctgcctgagcgccctgcgggcaccgaaggctggagtgaagcgcagttggcggagctggtcacgcgcgattcgatgatcggcaccggcctgccccggctgcccggcgagtga

SEQ ID NO: 171491 - DNA, 654 bp, Enterobacter cloacae
atgaacgggataaacgatctaggcggcatgcacggcatggggccggtgattggcgaagccaatgagccggtgtttcatcatgactgggaacgccgggttttctcgctgtttcccgggttgttcgtcggcggttattttagcgtggacgaatttcgccatgccattgagcgtatggatccggcccagtacctggaggaaagctattacgagcactggctgcattcgttcgaaaccctgttgctggaaaagggcgtgatcaccgcagccgaattacaaggtgcggtgaaaccggtaccatgcccgcccggtacgccagtattaacgccggagatggccgatatggtgatgaaaaccggcgcatcggcgcgcattgaccacgatgcagtctcccgtttccaggtgggggaccgggtgagggccaaaaatattaacccgtctacccacacgcgtatgccgcgctacgtgcgaggcaagattggcaccatcgagatcgcccacggggtgttcggcacgccggatacgctggcgcatagtctgggggcgcatccccagcacgtttacagcgtgagtttcaccgctcgggaattgtggggcaacacgctgccagaccgcgtgtacattgatctttgggacgactatctggaggcaccatga

SEQ ID NO: 171492 - DNA, 432 bp, Enterobacter cloacae
atgagcaacgactacgcagcgattagcctgccgcgtgacgaaggcgtgccggttttcgaccatccctggcaagcgcaggcattttctctgatcgttcacctgcatcaggccggacattttgcctggaaggaatgggtcaaggtgtttagtgacgagatcaaagccgcgcccgcacggcccggtgagagtgtgaatgatgcctactaccgccagtgggccgcggcgatggagaacatggtggcctcgctgggcgtggcgggagaacaggaaatcgcatcgagggtgcaggagtggcggcacgcctatctcaacacgccccatggtcagcctgttgtgctggcgaacgcggcgtgcccgccagcgcacgatcatcaccacgcgccgcagcgcgtcccggtgacggtgagtccggcggttgatccacaaccttaa

SEQ ID NO: 171493 - DNA, 210 bp, Enterobacter cloacae
atgagtgacatgacaatgacaaccgacgttcaggccgagccaattccgttggtggagctagtgccgtgggcggtgttcgccaccttgttgatgctgctagcaatttatttcgtcggcgcggagcagggggcgacgtcgatgttttccggcagccaagtgcatgaattcttccacgacgcgcgccatttgttagggttcccctgccactga

SEQ ID NO: 171494 - DNA, 771 bp, Enterobacter cloacae
atgatcggaaaattgttattcaaggggatgatggcgggcatcgtggccggggtggcggcctttctgttcgcacaccatttcgccgagccgcaggtcgatcgcgccatcgctttcgaggagagcatggcggcccatcaacatcaggcggaagtgggccatcagcacgcgcaaagcgatgacagcgaggtggaggtgctcagccgccagacccagtccggcgtggggctgctggctggcatggcgctgatgggcgctgcgctgggcggtgggctggcgctggtctggtcgttctgctaccagcgcatcgggccgtcgaatccgcgcgcgctggcattgtgcctggcgttggcgggtttcctgacactaagtctaatgccggggatcaagtacccgcccaatccgcccgcggtgggcaacccggaaaccatctgctatcgcacggcgttgtacttcatcatgttgctggcttctgtcggtatcttggcggcctcggtctggtgcgcgcgtcggctgcgttcgcgcttcagcggctggaatgcgccgattctggccgtagcgttcggcgcggtgttgatgctggcagcgtgtgctctgatgccttcggtgaacgacgtacccgaccgcttttcggccgacctgctgtggcgcttccgcctgtgctcctttggcatcaactttgtgctgtggagtgtgattggggtgatgttcggcgcacaggcggaaaacgtgctgcagactcgcaggcaacgcttgccccacgagtatcagtga

SEQ ID NO: 171495 - DNA, 567 bp, Enterobacter cloacae
gtgaccgccatgctgacgctgatttgtcagggggaaagtacggcgagccgggatggacgtttcccccgggatgaaccactgaccgagcaggcaaaaggacaggcgtgcctgttgcggggactactgtcggcgaatcagacggtttggtgctccccccaactggccgcccggcaaaccgccgctgcgcttgcgctgtcgaccgaagtggacgacgcgctcagggatctcaattacggcgactgggccgggctgccgttaaagcaggtcattattcatgatgccaaggcgttctctgcctggctgaacggcgcgccgccgccgggcggagagccgcttgaacagctggcagtgcgctgcggcgattggctgacgcggatagcggagcagaggtgtaaccactacgctgtggtatccgccgcaacgatccgcgcgatggcagtcgcggtgcttgacgcgccgattcaggccttcgcccgtatcgacatccacccgctgagcgttaccgagttgagcagcgacgggcgacgctggaacctgcgtcagttggggcgtttgattttgtggtaa

SEQ ID NO: 171496 - DNA, 753 bp, Enterobacter cloacae
atgtccctcggaaacgttttaatgtctctagtgagatttaatccctcagcggtcatcaggaatctgagacgtccccgtcatcttgcagatgcagccattgatggtctgaatgccggatatgcgaataccggttttattggttttcctctggtcatcgtatttttaggtcatgaggctcttgccccaaccctgatatcaacgattctgacggtatctgtgctatttggaatcgggattatcatcatcgagaccgggcttcagggtgaagttaaacggcgtataatctttgcccgggtagcgaaatcgctgatgaaaaacccgctactcgtttcgccggttatcgctatctgtgtctcggtatccggttggacgatcccagattcagttaatgtatttcttaaattactgggtgtagccgcttcaccctgtgcgcttgttgcactgggtttatttcttgctggtcagtctgctaaaaaaaataacaatgaagattttaccattactttgttggtcgtccctaagttgttaatacagtctacgctgaccttgtgggttgctacacgagtgtttaacttatctccattactggtgcacacgtcagttttactggccgccttaccaacaggtacaggcccatttatgctggctgagttttatcgccgtgaggcctcaataacatcgaaatgcgtactggtttcaacaatggtatctatgtttacactttctgcttatctgtacatcattggtttataa

SEQ ID NO: 171497 - DNA, 624 bp, Enterobacter cloacae
atgagcaacgtacttgttttaggagccagcggtcagatcggaaaactggttgcggccaggctgaatgaatcgggccacttttcaaggttgttcgtgcgcgaaagcagcaaaattcagacagggaggaatcaggaggtcttcgtaggggatgccgccaacgcggacgatcttttcaatgcaatggagggaatcgacatcgtcttttcaaatctggggccatatcagatgaaaggatttgcagagggtgtcgtgaacgccatgaagcgacggggtatcccgcgcatcctctggacagcgacggccggcatctacggggagtttgacgacgcggtcgcggaacgaaatcacgccgagctaggcgggcctccttccctgaaaggcagctatcttcatgatcaattggagggagcagaggtcatcgagaacagtggtctggcctatacgattttcagatggaactggctgacttcagatgacaccgagatggatgttttgctcagtcagaagggagagaagatcaagggaggctcagtttcgagacgcaccgtcgcaggaatcgtagccagcatcattgactacccagagcgctttgttggcgagtcattaggcgtggctggcgcataa

SEQ ID NO: 171498 - DNA, 1419 bp, Enterobacter cloacae
atgagcacatccgatatctcccaacaattggccgacaaggtcgtggccatgaagcgcgcgttcattgccgacggcccaccgggtgccgccctgcgtcgtgaccgacttgagcgcgccatccaattgttgaaccgccatcacggcgaactggaagccgccatcagcgccgatttcggccatcgcagtgcctatcagaccttgctgaccgacgtgcatttttcgatcgccggactgcggcatgcccaggaatcgctggaaacgtggatgcgagcagaggacaccgctgcccccgtgcctggtatgcagacccgcgtacaataccagccgcttggggtggttggcatcatcagtccctggaacttcccgttaaacctggcgttctgcccgctggcgggcgtgttcgcggctggcaaccgcgcgctgctgaaaccctcggaactgacgcctcgtactgccgaactgctggcacatcttgcagggcgttatttcgatccgctggaattagacgtggtgcaaggtgatgccacggtgggagccgcgttcagcgggctgccgttcgaccatctggtcttcaccggcagcacaacggtcggccgtcatgtgatgcgtgcggcagcggaaaatctcgttcctgtcaccctggaactgggcggaaaatccccggtgctgatcgacacggatgctgatatccgccgcgccgtggagcgtgtgctgacgatcaagaccttcaacgccgggcagatctgcatttcgcccgactatgtgctgttgccggaatccgcgcgcgaggggttcattacccacgcacgtgaattcgtggcgcagacgctgccggcactccatgagaacctggactacacaagcatcatcagtgagcgtcattaccagcgccagttgcgactgctcgaagatgcacgggccaggggcgccagcgtcgtgggcctggaacccgcggaacaagcaaatttcgacgacaccaaacgcacactggcgccgacgctggtgctcgaccccaccgatgacatgctggtgatgcaggaagaaatcttcggccccattcttccgctgctcacctatcgcagtgccgaagacgcgatggactacatcaacgcccatccgcggccgctggcagcgtactacttcggcgacgaccccgcgcgtcagcaggcgttttccgaacgcacgacttccggcggtctggtggtcaatgacgtgatgacacacgtggccgttgaaaacctgccattcggcggtgtcggcccgtcgggaatcggtgcctaccatggcgtccacggtttccgccgcttcagccacgccaaggctgtggtgatccagagtccgggcggggagtcgaacctgccgctgcgcgcgccttatgcggataatctgccacaaatcaaggcgcttttggcttcgtaa

SEQ ID NO: 171499 - DNA, 678 bp, Enterobacter cloacae
atgaatgtattgatggttctcacctcccatgaccgcctcggagacacggggaaaaaaacgggcttctggctggaggaattcgccgcgccttactacgttttcaaggatgcgggcgccaacatcaccctggcatcgccggcgggcggccagccgccgctagaccccaagagcgacgccacggaagcgcaaactgcggacactgaccgtttccgcgccgatgccgaagcgcagcaacaactggcgaccaccgtaccgctgcggcaagtcaacgcggctgacttcggtgccatcttctacgcaggaggacatggcccgctgtgggatctggccaatgatgcgcagtcgatcgcgctgatcgagcgcgcggcccaggccgacaagccgatcggctttgtatgccatgcgccgggcgtgctgatcaaagcgcgcggtatcgacgaccagccgttggttgccggcagacgcgtcactggcttttccaacagtgaagaagaagccgttggcctgacatcggtggtgccgttcctcgtcgaggacgaactcaagcggcttggtggtcagtacgagagcgttgccgactggcaccccttggtcatcgccgatgggcaactggtgacgggtcagaaccccgccagttccaagcccgttgccgaggcgctgctcaagctgctgtcttga

SEQ ID NO: 171500 - DNA, 633 bp, Enterobacter cloacae
atgaagctgttgctgatcgaagtcaccggcctggtcggacgccatgtgctggagctggcactggccgatcagcgcacacacgaaatcgtggcgttcactcgccgggagttgcccgtgcagcatcctaagctgcggcaagtgatcgttgatttcgggcatctcccgcgtgatcccctgctgtggcaggtcgatgctgtgatctgcactttgggtaccaccatgcgcgcagcgggatcgaaacaggcattcgagcgcgtcgatcgtctctatccattgcgcgttgcccaacgcgcgcgcgcacacggcgttccgacctttgtgctcaactcggccgcaggcgccaatccccgatcgcccatcttctacaaccgggtcaaaggcggactggagcaggatcttggcacgctgggcttcacttcattgagcctcgttcggccgggcctgattcgcggagagcgggccgacttccgtttgggcgaacatctggggacgtggcttctgaagctgctggggccgctgttgccacggcgctggcgcatcaatccggcaccgagcattgcacgtgcgcttctcgatgccgcgatagcacaacctatcggcatccatgtcattccttcccaaaagctcacttga

SEQ ID NO: 171501 - DNA, 594 bp, Enterobacter cloacae
atgaaagcagaacattccacagtcaagaagcacattctcgataccgccagacccttcatcagcggccggggatttgcgtcagtggggctgaatgaaatcctgcaagccgcaggggtgccgaagggctctttctaccattacttcggctcgaaagaagcctttggcgaagcgcttctggaagcctacttcgccgaatattcaatcctgctggaaaccttcctgacgcagccaaatcagaactccgcacagcgactgatggcctattggcaacactggatcgaggtcgaggcctcatgcgacccgacaggcaagtgcctggcggtgaaactggccgccgaggtatgtgacctgtccgagaacatgcggaaagtgctcgaacagggtactgggcgcatcattgcgcgcatagctcaggcactggaagaaggcgtggcagacggctccctgctggcctggcccgagccgcgtgaagcagcggagaacctgtaccagttatggctgggagcctgcctgcgcgccaaaatcactcgcaaccgcagatctctcgaatcggcgctcattgccacgcgccggatgttggggctatcagaatga

SEQ ID NO: 171502 - DNA, 624 bp, Enterobacter cloacae
atgagcatgacgcgccgtgaactggtaacctcgattgccacagttaatctaattggcctgtctggctgccgaaccccagtcaaggatagttttatgaatcaaacaaacataacctctcgcgacagccgtacaggagagtcagacctatcgcaatctggtattcataccatgcctaaggtggggaggcgtcgcatcctgcatgtcgcgactaacgctagccactacgtcgatgttaagcataagactggcctatggttgtccgaattgactcatgcttatgacgtgttttctgccgctggatacgaacagcagatcgttagcccacagggcgggaaggtgcctatcgagccacgctccctgaaatggccgcatttcgacaaatcggcacgggacggcttggccaatttggcgttgtccgcgttactggcgaactcggtaaggcccgaagacattaacgctgcggatttcgacgcgatctacttcaccgggggacacggcacgatgtgggacttcccggataataatacttttgtgctgtgtagatataaaatgcgtttagctactgaggttgaaatacaagcaacgcggcaggtattcaccgtattttctggctttgggccctga

SEQ ID NO: 171503 - DNA, 864 bp, Enterobacter cloacae
ttgccgtacatcaaaaatgctgttggcaggattgttaattcaggtcttctgttgaacatacctgtcctgaattttgttaaaggtcagtatgacgtcatcaaagaagcatcagatgcaacctctcttttggcatttgtgcgggagcgtcaaaaagccctggcagagaaaatcaatgagtctgatgtaaatgctatgggcccaatatttctccatgacgtatatcagtcaggtgtgcagtttgatattttgaaggaaaagatgaacgtcttggcatgtggagtatttagttcttctgaaaggcttgttgagtgttttacggttcttcctgtaaacattcgctttatccatgaacaaatgcaacttcagggactgcgtatccggatggaaggcagtgtgggtgtctttgcatcatggttccgtgatgcagagccagacgttgtcacaaatgccgggaacattcattttctgtggtcttgcctggatgatacccagagagagactgtacttgatgagttgcacgatgtcttacttgaaagacatattcgtactgacagtcgtattgctattattacacgttttcataatgagttgtcgtttattgaacctgagaagggtgtcgaacgcagggctattgcggcgctgtttagtgcttctgttgataatgagttattgtctcaatggcttgaccatcagacgttttcattttcatcgtggtctccggaggatgcccgtacggcaacgagctgtataattaataacgcggagctttttcccttcatctgcaggaattcacagtatattaaaaacagaatgttaccagagaatgcggacgttacagaaactcatggtacgttccccgactga

SEQ ID NO: 171504 - DNA, 198 bp, Enterobacter cloacae
atgaactatggcgtttttattcaaaatttgtttgatttcattatcgttgcatttgccattttcatggcgatcaaactgattaaccgacttaaacgtaaaagcgaagagcctgcggcagaaacgctccccgggccggaagaagtgttacttactgaaattcgtgatttacttagagaaaagcataacccgaaatactaa

SEQ ID NO: 171505 - DNA, 621 bp, Enterobacter cloacae
gtgcttcaggagggagaatcagacttgatgttaaaccataaagcaggacatttagcatggtgtgccctcatggcactggctttggcccggaaggatggtggtatacagtctgcggcacaggaaaatttatttcttacccgttggcttgataccgctctcaagcaaagacgtttttcgcgtgatgtaacacctgacatcgagtggttgttgaaggaaggccgacagtttggtgtcaatgcgaaactggtcagtaaacttagctatctctggaatttctgctctggcgatttggctgagcaaagcgatcttttccggttaacatatgctctggacaccgcgaaggatatgcaatggcaataccgcatgctgagtgagcgggaatggtcagatcggtatgcgatagttttaaatcccagcgtgaatggtatatttcttaaccgggagaacctggaaaaggcttttgatgatcatggacgtcatattgatttgctctgggttcaattgactggaagagttgatggtttgatgaaattgctgaatcgttgcggctggagggcggaactttcttctgaaggaactcaaccacatctctacaatctgactaccatttcgttaacgtaa

SEQ ID NO: 171506 - DNA, 927 bp, Enterobacter cloacae
atgatttttcaggatgaaagtttctacagtttcttgttcagaactcagctggtttatggttacctagatttctcaaatattttcagagcaaatggtatggtaagaacaacgattactgttaaagaagagcttttgcctgtttatcggcgaattaataaaaaatccttatacttaatgattaacaggagtaaacgtgagaaaatatcacttcagcatccatacactcatttagatgagcttaatacttttcttcatcagggggttgtagttcttactgatagtattttttttgatgttcgattttgtaaagaatgtctggatgagtgctataacttatatgggatcggttacttgaaaaaggaatgggagcacaatttatattgtgataggcataaaaaaacactttctgaaatgacggggagattggctaagagttctgttgatatcatgatgcgattgattttaggtggccaacttcatgaaggtgagttttttaatttccctccctcttttgatgagtggtataaaaaaataagagggggggatataagggtgttttcatcattatatattaagccatgtgcttcatcgttaatcagtaactggatttatgcaaacagatatgctttgtcggctatgcctctggaaggttcaaagaataccgaagtagcattgttattaaaggcaatgagtgacaaccctgaagacttcataattaaactatacaatgatagtaaaaatgataatcttaagcacttcagggaatttatatctcgtactactaaagttgtcatagaaaactatggtgtactcagtgatgatgagttcaggtttagagtgatgaaatcaaaatttataagctgcatggactgttcacttagtaaattaagtgaaggttgcaggatgagattaaaatacaataaatga

SEQ ID NO: 171507 - DNA, 258 bp, Enterobacter cloacae
atgataagaatggaatttaacaactacgatgatggaacatattactttctttatgttacagaggaagtacgcattgaaactaatggtattgatggccttcaaatggaaacccgcgattcgcgagtatgggatttaggcgaaccttttcagtatctaaccataaacgaacgtaaggaggagtattttaacgaaagtttaatcaatccttacattgatacagtaagaaaagccgctgaaattgtctttcactcattataa

SEQ ID NO: 171508 - DNA, 666 bp, Enterobacter cloacae
atggaattaaaaaaaacaaattttgctttactaggcatcgtcataggactgttcatcgttgcagttttagtaattatcaaggttctttttctggatgctaaagaattcgaatgggggagcgtaactgattgggtaagtgctgcatgtaatttggcgatggctggagcggctgtctatgctgcgtacaatgcgaaagattggatctctcctaagatacaacatgaagggttcaagcaagccagtacgtgtatggctgaaatggtacagttgaggatacttcaacaacatttgatatccagttacagattacggatcatacagaatagtaatcctaccccaatggagctacaagatgcctttaaacggcatcatgaaatatggcaagaattcagtaaaaaagtaattgactttggaacaagatgtgaaagtttaacagtatggaaaatttctgtattacaaacagataaattccttctattaattaaaacattaaaccgtgttaatagactacattctgatatgttacggctatataataatgagagtgatttatataatgttcttttatcatggaaagaaaaaaatgacgatatcgaagagcttcatcatttattagcccaatcaattaaagacttaactgttgatttcgatactctctttaaataa

SEQ ID NO: 171509 - DNA, 699 bp, Enterobacter cloacae
atggttggtcagccagttatcctggctgtgttcggagaaaacgccggtttccatatcgtagacgccgttagcaaaggggatcaggctgcgccgcggctcccccattaccgggataacgattttcagggcgtcgataacgttgttgatcgcgcgcttgctgaagttagttttgttctcgttgtagatagccaccatttcgcggctcagctcgagcaaagacgttttctcccagatgccggcgcggtagacgtacacgccttcgctgttttcattgatcgcaatgccggtgtaacgcgcggccagtatgagcgccttttcgttgtcagccaggtcgcggaggtttacatccgtcaacggtttgccgatcaccatgcttttgccggcttccgcatcggctttgaggcgcggcaactgtggcgtccagtcctccagaagctgataaccttcagagtagaattgcgctcgctccacgccggccaccgccagctttgtggcgagaatggttatctgtcgttcggtcagatgcccgccgcggcatacccgggcatagagccggccatcatccacaatgcggatattctccagctctgccagctgctttttatccagcacaaccggcggcaccgtatcgccaatcgggttcatttcctgccatgctttggcgaacgtccaggcatcggcgccggcaaagatgattga

SEQ ID NO: 171510 - DNA, 501 bp, Enterobacter cloacae
atgagaacgtacaatcttaaagatggagctataagtatattaaattcggcttttgttctctcaactcatttaagtatattagatccagaggagcaaaagctggtattcaaggttaaaaaaagggctctttttttaattaaaaaaaacattaaaggagattttaaaaacaataaagaaattacaaccctatttagacttctttttggagggaaaactgccacacttataagtttagaaatgaatctgaaaaaaagttgtcaaagaatagacccatctattacagccaaaataaagaaatataaaagcaatgagcttaaattcttactcccctataccacaaaaactagtggctgggttaccagttttttggattttacgatagctaagttagagcaagaaaatgctgataagatagccgagaatttacgcttccttttccctgaaattatatctataatagagcaagcttcttcttcgatagatataggggagtttcactga

SEQ ID NO: 171511 - DNA, 201 bp, Enterobacter cloacae
atgaaaaagatgtttagcgtgtggtggcaagaattagttaggcttgtgatgcaagtttatatacctattggtttaactattatctttggtatgctcgctgtgaccttttgggaagattacgcattaatatctactgttatattcttgatagttgcgtttattgtaagtgatcgtatattcaaaccaaaaaagaagcaataa

SEQ ID NO: 171512 - DNA, 1317 bp, Enterobacter cloacae
atggcaagaggatacattttgcatatgtatgaccccaccacttgtggtggtcgtgtgctggaaggaacaccaaacagaagaaccaacggcatatctgttgcccgaatgggtgaccgggtaacatgtggtaaagatggcaatacttaccgcatcgtcgggggtattggatggattaaaacggatggtcgccttgttgcaggcagtctggacagtttcagcagttgtccctgtaatgcaaaaatcatcccgcagataaccgttcaaacctatgaatcacgcagcgaatccagaacgtcggcaccgataacgacaaccacaccgccgacaattttttcctcaaattcatcaccagcggctggccctgctgtactgcggcctgtccctgtcttcgctaaatcccgcgagcgtggctcagggaatacagatgcaggggaacaacaagaacctcatactaattttgcagaaatgggcctgttccgggcagcacctgctgttgacgccgtaacagattcagatgccccacagcacgcacagacggcaaagaaaaagccacctgcccctgaagatatcccaaaaccgaagaagcgtagcgccctgtataagtggttcaacggcaatcacgaagagatgcaataccaggccgcagttgcagccgctgccagcgcgaccagagcacaaacagtgaccgcaggcgctggtgttctcgaacaagttgccgggaaatttgctacttatgggacatgggcagtacgaggtgcagaaatcgccgctggtggcgttggtgcctccgttgccggattcctggtaggcatgctgcccggcaaactcaatgaaggagaacaggacttcatcgaccgtatgcgccttgcacagatgcgtgaagcgcctacgcgtgttcgcttttcgtgggagaatgacaccaacggaaatcccgtaccgcgtggatatcacacgccaccgggtaaggatatggtgcgtgtccgcaagatggaatgggaccgccgctatgacgcgtataccttcaccactgaggaagaaaaccccgttaccattatctggaccccggatcattccggtgttaacgctccgccaaacacaggtaatcagacacctccaaagctaccgggaacgatccttgttaacccgttgccggatggaactcagagcaccagcacaacaaccacggcaccggatgagaaaaatttcgcggattatattctgattctgcccgtatcagacatcccgccgatttatatctatattcgcaacaatccgggacaggttacaggcaagggccagaaggttactggcacctag

SEQ ID NO: 171513 - DNA, 624 bp, Enterobacter cloacae
atgttaagcattttcagtaaaaaaacgtgtcctcatcatgaaatggcagccattattgcgtcaacgtctggttacgaagaaaaaacgttaaaaaaatggcaacgaatttccacacaaaactcggataatattcatattatcatcagcggtgaagttgagttccgccgcagttctgatgatttatgcttattcacgctggagggacaatgtatttttggcctctccgccattttttacaattcggcgcatatgcacggcgttgtgcgcaccaacaccgtaatacgcaccattcataaagatgatttccagcggttaatgaccgagcaggggctgtggccagagttaaccaaagtgctggcatggtatatctgtatgctcagcaaacgtgatgaccgtttagttgcccgcagcgcgtattccgtggtgcgtgaattcctgattgaaattaacgagctgattgttcagcagcagcgcgatattaatatttacgattatattcaggaatacaccaacctggcacgcagtaccattatcaaaattctctccgacctgaaaaaaggccaatatattgtggtggaaaaagggcggttgattagcctgaccacgttaccggaaaaatattag

SEQ ID NO: 171514 - DNA, 609 bp, Enterobacter cloacae
atgtctactatctgtctcgctgcccagcgcagctataccaccggggaaccggtctggttttcctggcggttaccgtcgttcagtaaaatgttcagcgtggtcacgctctggtgtctggggatgtgcgcgctgatcgtcgccgggctttatgcccatgtgtactggaacttacgccatccggcgccggtggtgaaaaaggtcagcgtcgcgaaaccggaaaccagcctctcggatatgcattatatctatgtaacgaagccgttcccgcacccgcagcccaaaccgcagccggtgaaaataaaggacgatttaccgccgatggagaatatgccgatcaacagcgacgaaaatgactggcagcaggcgcctgatggcaccttaccggatagctccgtcacgcatgacacctcgcgagataccttacccggcaccgaggcacacgaacaggcgacgacatctgaggatgacggtgcgttaaaagcgttattaatgcaggcgttaaaacagcagcaggatgatatggcgaagggaaaaatgccggcaccaccggtcgatgaaacgcaaaatgcgtctccttcggtgataaaaggagacgcaggaggagactaa

SEQ ID NO: 171515 - DNA, 1554 bp, Enterobacter cloacae
atgtatcagagtcattttaaattcagtacccctccgttcagaaatatcacccgcaaatcgggtgattttctggtgccttatcatcaggatgtgttaaatcttctgaaagaaaaaagccagcaggcagggatcaccgggctcttttaccacgacagcgaactgctggggcagttcagcgaggcgttgaagcgcagcaacgccgtcatcccggttaatgcctttccgaagctgagcgccaattctctcctttataagctcaacccgtcggtgaaagagagcaaaaataaactgcaggccgtggatgccgtgctgcgccagtggcgcgatgcccgtgccgcgcagaacgtgctggtcatcacccatgctgaggcgatgaagcacaactgctatgatctgctggccatgctgctcacgcgtgcccaggagctggacgtgcgtttatcggtcatcctgatgggcagtgaagacagggagacgatgctgacagactccgcgctgcaggcgtttgttctgacccgccacacgctgcgtaacctgacctgccgcgagttcctgcgctatgtcgacgcccagtgcgaagagcacggcgcagcgatctccccgctgacgcctgctcgcgtgaaaaaaatccacgccctgaccaaaggtaatatcagcaagctgaatgcgctggcgcatctctcaatgctggccgcctggaccgaacgcgcgccgaacgtcgggcctcgccatctgcgtctggccctcggcgaagtgctcccggcgccgaaacgcggtaaagcgctggctaccgtcgggctgttcgcctccgtcctgttcgctgcctgcggctggatgatgacctcttccattacggcaaaactgccggtggcgctgccgatgccggccagctggaaacagccagtcaaaacgccagacgcgccggtggttccggttatcgaaaacgaggtggtgaatcagcctgatgccatgcaccagctgtacgccatgtgggggtatgacgcttcagcagacgacgccctgtgtcagaacgcggccaaagtgaacctgatgtgtaaacagggaacggccagcctggataccctggccagcgaagggtacccgtgggtcagtgaagtcaaaatgggcaaccacattaactacgccgtggtggcgcgtgccggaaaaacctctctggatctgctgatgaacaaccggacctggcaggtgagccgcgcctggtatacccaacacgccacgggaagttacaccctgcttcaccgcctgacgccttccggcaaagatgaaattaccgcggccagcgacagcaacgatcttgagtggctggatcagcagctcagcgtcgcgctcggtgaaaacgaaacgcacgataaaaactggacggcggagctgatgaaacgcacccgcgaattccaggagaagatgcaccttcgcgtcgacggtatcccgggggaagagaccctgatgcagctgatgcgcgaaacgcataccacaccgagcgttcagatccaggcatcgcagacccccccgaacacgcaagagaagcacgcataa

SEQ ID NO: 171516 - DNA, 774 bp, Enterobacter cloacae
atgaggaacgcattcctttcccgtttaatgacaccctgcgtcatgcttgtcatgctgatattctgcagccagcagggatatgtcgtttataaagattataagaaggttacgaataagttagcgaatgctgataagccagcgctaaaaaaacctgacgctgaaaaatcctttgggcttttcaccgccgcagtacgtcaaagcaacgcgccagccgctgcaaaagcgccactgtcggcagagattgagggcattattcgtagcgatgaatcctggttatcgttcgccgtgatcaagacgcccgccggtcagcagagctaccgggaaggggagccgctggtgggctttgacgatgcctatgtaagtgaaattaatcaagataatgtggtggtgcagtacgagggggcgaaacagacgctggccctcaataaaccggcgtatttcaagggcggcgttgacagcgccccggttaccaaatcgaaaaaagatgccggcgccgacagtctgcatctcgatgattatctggtgttaaaaccgttaatcgataaaggccaactggaaggctttactattaatccacggaacgcaacgcctttttaccataatgcagggctggaaaaaggcgacgtggtgttgaaagtcaatgacgtcgatatgacgcaagaagcgcaggcgaaaaatatcatcgccaactggtcgaaaatgaaagaagcggatgttgtcgtcagacgacacgctcaccttgaaaatattcgggttaatgtattcaacaattaa

SEQ ID NO: 171517 - DNA, 375 bp, Enterobacter cloacae
atgactaaacgcaaagaacagggaatgaccctgctggaagtgatggtcgctctggtcatcttctccaccgccgcgctggccctgatgaactccgtctcgctgaacgtgcgcttcacccacggtctcggcgactcgctgcaggcgagctgggtggcggaaaaccagctggcggaagcgaaactgggcaacacgccgttcccggatgccctgcagacgggcacggagatgatgggcgggcgcaactggacctggcgcaaacagcgggtcaacgtcaccgaaaaacgctttgccgatgaggtgcaggtgttcgccgagggcgacgaagacaagccggtgattaccctgcaggtgccggatccgggagaagtgaaatga

SEQ ID NO: 171518 - DNA, 654 bp, Enterobacter cloacae
atgagcaggcagattcagcgtcagcagggctttacgctgctggagatcatgattgcgctgaccattttcgcggttatcagcttgcttgcctggcaaattcttgacggggcgatgcgcacctcgaacgccaccgacgcggcggccacccgcttaaaccagcttcagcgcgcttacaacctgctggagcgggatttcttccagcttcaggcccgcgccccgcgcaacgagcctgaggtttttgtccagcatgacgatgcgctggagctgaccacgctgaacggcgtgagcggtcaggttcagctggagcgtgtgcgctggcggctcgaagataaaaagctgtggcgggatatctggccggtcattgacggcccggcggatgcgaagccggaagaggtggcgatcctcagcgaggtgaaagagatctcctggcgcttctggaaaacgagctggctcgacaagtggaccgacacggcgcatcagccggacggcgtggagctgctgctgaccatggaaaatggcgatacctggcgctgggtctttaccaccccgggcgatctgccggacgcgcctgcggcgccaaaagaagctacgccagcagcccctggggatgcgcaatcgcagccggcacctgccccgtccggagagaagaaatga

SEQ ID NO: 171519 - DNA, 1131 bp, Enterobacter cloacae
atgaaacaggtgctttttattcgtcccgatacgcatgaagacgggaacataatgtggtgcgagtccggtagcgaccaggtgggagaacgccagggggcggcgtcactggcggaactcgccggtcacgcgcttgccgcgcgggtatgtctgttactcccggcctgcgaaatgatcttccgccatttcaccttgccaaaaaaagggagcgttgaattctcctggctggccgaagagacgctgataggtgacgtggacacgctccactggacggtgctcagcaaaaaagggcgggacgttgacgcggtggccattgatgcggcgcgtctgcgctactggctggaccgctgtgccggggccggactgacggtggtgcaggtgctgcccgatgccatccttctgccggtggccgaaggcgggaccacgctggtgtccaccgacgacggctactggatgcgctactcgccgtttggcgcctgtgaaaccgacgccgcgctgctgccgctgccgctgagccagcagcgcgccggggaaatcgtctgctacggcgatgcgcccgcgggcgtgcaggtggatgagcaactggcctggcagcacccgctggtgctcctccagccgcagtggaaaacctgcaaagccaatctcttgcacggcgaattttctgccaaaggcgccgacggcggtttttgttacgccagatcggctatcgccgccgtggcgctgctcagcctgggactgctgatcggccctcgcatcggcatggcctggatgctgactcaccaggaaaatctggcccagcagcagatggttgagctggctcagcactactttcccacgctgcgccagaccaccaacctgaagtaccacgtcgggcagaacattaagaaagagaaaaaaggcgtctttctgcaactggaggcgctggagcagatcaaagccgcgctcccgtcggttgaactgagtgaagtcgggtatgacgacacgcagaatcagctcacgctcaacatcagcgccacggatcccgctgcgttgcaggcgttcgtcaataaggccagtgacaccttcgactttacgctgcagccggtttccagtgaagcgccgtataccgccattatcacagggaaatataaatga

SEQ ID NO: 171520 - DNA, 324 bp, Enterobacter cloacae
gtggaagaacatgatctacacgcgtcaggttttacaaaaaaggaaatcataaggattaaacgttaccttgaaaccggtgattcactggacagggttctgttagatctttcccgttatttcaaaatgttcgtttgggtcacaattattatgaccgtgattaccattctcagtttcattttaggcagcaccgtacaggcaatctcaagcgcgatagcagcagttttcctgtttgttgtttttctcctggtgatgcctgttaaagttggttataaatcctggaagctattgagaacgtatgttagcgattttgatcgtcgtgggtga

SEQ ID NO: 171521 - DNA, 495 bp, Enterobacter cloacae
atggctacacgtcgtttaaccactaccgcactggcagtagtgttgtctttaacgtttgctacagcaccggtcatggctaatcctggaaacgggaatggcggtggtggtcacggtaacagtggcggaaaaggtaatggtggtaatcacggcaattccggtacccatggtagtaaacacaatacagacaacccgggtaaatcaaataaaagcgtcagcgatgatgtcgatgctcgtgtaagcttcgatcatgcccgtcatctggcagtgaactatggtttaaccggctatgagtcactgcctccgggcattgcgaaaaaccttgcacgcggtaaaccactgcctccggggattgcgaagaaaaccgtgccggcttctatgctggaccagctgccttcctatcctggctatgaatggcgcgtggtcggtgacgatctggtcttaattgcactcagcacggctgtggtgacgaccattattaacggtgtgttcaaatag

SEQ ID NO: 171522 - DNA, 501 bp, Enterobacter cloacae
gtggccactccggggtggcaggaattttacaccacgtataacaccacaaaggccagcgatggcacacttaaagctgcatcgcctgtgattaaagtgttttcggatggcacataccagactaacgatgaatctgatggctgcactgtaacccgtctggccatcggtgaatatctggtagaaggctgtgaggggctgaactccgacgctgcctggggtggcattgacggcggttttgacatacccaccgaccgcaacaagcaacccctcatctggctggattatgaggttcatgctgacggttcggtgttagtgaaaacctatcaccgcacgcatcctaccgcgccggaattcgccagaaacgaactgcagggtatcaacgagggcgatccggccgacattcctcacgaccagtatatttctgtacgtgtccagatgccgcagaacaatatctggaatcagcgcaccgctatttctgaggctcctgattcatccgctggttaa

SEQ ID NO: 171523 - DNA, 327 bp, Enterobacter cloacae
atgaatgttactgatgaagacctgttgcgttctggttttacactgtctgatttgcagaagataaaaaataacgttgagaggtacggtggaacgcctgaagaagcagtttacgatctcgcccgtcgattcaataccctactctgggtaatcagcgtatgcttcatgttcctgattgttcttgtcgttttcagttcacctgtcagggcattggcgtgggggctggcgatcatcgtaggggttagcattatgactctcgcacaacctcctgtgctgtcgtataaatcctggcgttatcgaaaaatcatcagagattttgagaagctctga

SEQ ID NO: 171524 - DNA, 810 bp, Enterobacter cloacae
atgtttttaatcaatggccttgagcaggacacgctgcctgccagcgacagggcgacgcagtttggtgatggttgctttaccacggcgcgcattgccgatggtgacgtatgcctgcttgatgcccaccttcgtcgtctgcaaacggcctgcgaagcgttactgatcccctttacacagtgggatacattgcgtcaggaaatgtgccagctggcatccgggaagcagagcggcgtacttaaagttatcatcagccgtggcagtggtggccgggggtacagtgccgcgtcgtgccttaacccaacgcgtatcctctccacgtctgcttatcccgtgcattacgctcgctggcgagaagagggcgtcaccctgacgttgagtcccctgcggctgggacgaaacgccatgctcgccggcattaagcatctcaatcgcctggagcaggtgttgattcgtactcatcttgagcagacggacgccgatgaggcgctggttcttgacagcgaaggcgtcattacggaatgctgtgcggctaatttattctggcggcaggggaatgatgttttcacgccgtcactggaacaggcgggtgtgaacggtattatgcgtcagttttgtttgcagcagctggcacactccggctttcgcgttgtcgaagtgagcgcaggtgaagcggcgctacaaaccgcagatgaagtcatcatgtgtaatgcgctgatgcctgttgtaccggtccgtgcgtatggtcaacaccgctggacttcgcgagagctgtttcagtttttagccccgatatgtgagcaaaccagatag

SEQ ID NO: 171525 - DNA, 321 bp, Enterobacter cloacae
atgcacaacgctttcgctcaactcgcgacaggtctgggcctgatcgtctctgcttttagtcttccggcttattcgaccactattgttgatggcggtgtcattcattttcgcggggccattgtggcagacccctgtgaagttacagcgcagcagcgtcaatttgccatgtcatgtccggataataaccggatgcaaacccggatggtcagctatgaagaggcgcttaatggcaacgtggccgattcgaatctggcgacgctccatatgaaataccttaaccctgaaaaaacgctcgccgttgttgaaatccagtatcgctaa

SEQ ID NO: 171526 - DNA, 333 bp, Enterobacter cloacae
atgaataccttaattcttcttgccgcgctttccagccagataacctttaaaacgtctttgcaggacaatatgaccaccattattccgcaggtgatgctgacggagtcgtgtgattgtcaggttcagattatcgccgtgcgggaaggacagggagggcagagtacttcccggcagcaaaatacactttttatacccgctaatcagacgattgatttaacgcggttgagtttaaatattaacgcaggagacacggtcaacattgtagtcaccgtttctgatggtaaatcgattcatctatctcagcagtggtctcccgtggggagcgcgctttaa

SEQ ID NO: 171527 - DNA, 273 bp, Enterobacter cloacae
atgagttgcgatcggtgtctggatttatgtgttaaatacgttatccgccagcctgaacaattacgtaaagcaatccgtattgcaaagaatgcgctcagcgaaggggttctggccgaaattgatgcaacggatgactggaatcaatacagctttcaagagtgtgctgaaaagatgatatggggcgatatcgtcgattaccattttgtttgtaggcactgtggaactaagtttgtattaggtgctgaaacttaccatggcagcggtgggtattga

SEQ ID NO: 171528 - DNA, 552 bp, Enterobacter cloacae
atgtcaaaaaaaacaaaaacgttggctgccgtccccttcttcctcatatctgttgcaatgacaggatgcatacaacgcgaggttgtcgttaatcatgtgcaggatgtcacctctggagaccgggctgaagtgagaattgttggttttaccagcgatactatgatgtggggggattttgattgtaatcagccatataagatgcctccaaaaggatactaccctgaagtaagaacaactttcgaaagtaaccccgtatatatcgataagggctttaaaaaatccaaattgccagatggcgtataccctcttgaccgcgcagaatattatgttcgtgcaggaaaattattaggcgtatggccttcaaaccatcttagcgatggtagactttgtactaaagactttgttatccggcctgaaaaagacaaattatatgaattcaggaaccggaatgacgacaacatgtgttattttgagttatatgagataaataaatcaactggggcagcaaccaggatgaaaatgacaagttatagagatatgtgtcctaaataa

SEQ ID NO: 171529 - DNA, 522 bp, Enterobacter cloacae
gtggaaaatctcacgatcgaaatgttttcagagggagaagagtatgatttcaggaatttcgattgtggtgaaccctcgctaaattccttcctggcagaccatctggtgcgtcagcacaatgggcgtattttacgcggctatctgcttaaagatcgcgaccatcctcgtgtcctgggctattacacgctgtccggaagttgctttgaaaaagcgatgcttccttctaagactcagcagcgtcggatcccttatatcaacgtaccgagcgtgacgctggggcgtctggctgtccataaagacctgcagggacgcgagtggggaacaacactcgtcacgcatgctatgcgcgtggtttacctggcatcccaggcggtaggcgtacatggactctttgtcgatgcgattaacgaacaggctaaacggttttatctgaagctgggctttatccctctgacgggtgaaaacagtcattcgcttttttatcccaccaaatctatcgaacgcctgcttgaagaagagtag

SEQ ID NO: 171530 - DNA, 189 bp, Enterobacter cloacae
atgaacgacgtacaagctgagtggcacgcctatctggcgcaaatggagtccgtgcttggcattgcgctggatgaggcccgccgcgccgagctgcatctgcagttcagccgcattgccggcatggccgcgccgctgatggcgctaccgctcgacaaccgtctggagattgcaggagtgtataaagcatga

SEQ ID NO: 171531 - DNA, 501 bp, Enterobacter cloacae
atgatcgcactgcacgactttaatcatcttccggcccacgacgcggtggcgctgcttcacccctgcgtggcgatccccggctgggccgacgcgctggttcgcgggcggccttacccgagccggaaggcgttgttcatcacggcgcaggccctgacgcaacgctgggatgacgcggcattaaccctcgccctgagcgcgcattcgcgcattggcgaaaagcccgcgggcaccggggcggaggcggcgctgtcgcgccaggagcagggtgcggtgaatgaccgtgatgccgggcttgcgcaggcgttacgcgaggccaacgcccgctacgaagcccgttttggacgggtctttctgatccgcgccaaaggccgcagcggtgaggagatgttgcaggcgctgcacgcgcggctggaaaacagtgacgcacaggaagtccgcgccgcgctggaacagttacgggaaattacgctgctacggctggaaggagtcattagcgaatga

SEQ ID NO: 171532 - DNA, 1056 bp, Enterobacter cloacae
atggggacagtgaaggcgctggcggcggccatcagaccgcttgataaacagaagatcgaggcggcctcgcggcatgttgatggcttaatcaagccgacaaacagcctcggtcggctggagagtctggcaatacagcttgcgggaatgtggggaatcgacaggctcgataatctgcaaaaagagattatcgtgatgtgcgccgaccatggcgtgtttgatgaaggcgtggctgtgacgccgaaagtggtgaccaggcttcaggccgtcaatatgcaaaaggggttgaccggggtatgtgtgttggcccgcactagccagacgtcggtactccccgttgatatcggcattgacggtgagcctgttgacaatatgctcagccttaaactctctcgtggctgcgggaatatcgcccaggggcctgcgatgagcggtcaggatgccgaacacctgctgctggcgagcgccagcctcgttaaaaaacgcgctcaggaggggatttccgtctttggcgttggcgagctgggtattgcgaacacgacgccggcctcggcaatcatcagcgtactgaccgacagcgatccgcatgaggtggtggggattggggcaaatttgccgcaggaccgggtacagcataaggaagccattgttcggcaggcgatacgcattaaccagccggatgcgcgcgacgcggttgacgttctggccaaagttggcggctatgacctggtgggtatgaccggggtgatattaggcgctggcgcatgcggactgcccgttgtgttggacggttttctctcgtatgccgcagccatcgctgcctgccagattgcgccagaggttaagaactactgtattccctctcatttttccgccgaaaaaggggccagacgtgcgctggagcaccttgggctggcgccctttatccaccttgacatgcgtcttggtgaagggagcggtgccgcgctggcaatgtctatcgtcagtgcggcatgcgcgatgtattgcgagatggggctactggcgcaaagcggcattgagttgccggttccggcgtga

SEQ ID NO: 171533 - DNA, 609 bp, Enterobacter cloacae
atgcgcatttttctggtccggcacggtcaaaccaccgctaacctcagcggtgtattttacgggagtaccgatttgtcgctctcgccgcagggcattgcgcaaagccagcgtgtcgccgggtttttggccggggtcgcgttcgggcagacgcgcgtcagcgcgctgcagcgtgctcagcaaacggcgcggcttatcgtgccaactgcccatgatgttcaagtggatgcgcgtcttaacgagctggattttggcaaatgggagatgcggcactacagcgacattgaaaaagaaaatcccgcgtcgtggcagcgctggctggatgattggcaaaacgccacgcccgacggtggcgaagccttcccgcatttcgccgcacgtgtcagggcggcggcggatgagatgagtcaactgcagcagcacgaagagatgctcattgtggcccatcagggcgtgctgagcctgctgctggcaacctggttagggatgcccccggcagcgatgtggcatttcccgttcagtcatgatgcctacacggtcgttgaaaatcgggccgggcattgggtattacgcgtatttaatggcagaagcgtttggcaaactgaagagtga

SEQ ID NO: 171534 - DNA, 759 bp, Enterobacter cloacae
atgtcgttaaaaatgttgtgggcgacgctgggatttattacccgtataccggtgccgcaaaaatggagcgacggcgttgaattttcgcagtatggccgtggcgttccctggttccccgtggtgggcttgatcgttggcggcctggccgccgtaagctatctggcggtgagccagaccggcgggggcatcattatcggtgcggttgcctgggtgctggcgctggtgctgctgaccggcgggtttcatctggacggtctggcggacacttgcgatggcgttttttctgcccgcacccgtgaacggatgctggagattatgcgcgatagccggttggggacttacggcggtctggccatcgtattctgcatccttatcaaagtcgctacggcgatctccctggctcagcttcccgttaataccctctttgcactgctggtgtgtgcgccgatcgtcgggcgcacgggaatggtgttggccatgtaccggcagcactatgcgcgtgagggtgcaggcatggcaaacgcctatctcggccatatcagcggcaaagagaccatcatcaccctctgcatcggcgtagcgctcgtggggctgatggcggggatgcaggggcttgtcgccagcatcatcgcctggattgtcgtcaacgcggtaaagacgtttttaagccgccgactgaacgggctaacgggggataccctgggcgcgatggaggagattggcgaaatggtcttccttctggcgcttctgtgggtctga

SEQ ID NO: 171535 - DNA, 552 bp, Enterobacter cloacae
atgatattagtcaccggaggcgcgcgcagcgggaaaagtgcgcacgtcgaacaactggcggcgcagcagtgcgaacgcgtgctgtatatcgcgacgtcagtgattaccgatgaagagatggcgctgcgcgttgacaagcaccgcgcccagcgtcctgcgcactggcgaacctgggaagggtatcgcgatctgggcgatgtgattcgccaccaggtgcagccgggcgaaggcgttgttctggaatgcgtcaccaccctgttgtcgaacctgctctatgacgccagcggcggcgcgtcgccagaaaccctcgatttttccgcgcttgaggcggtgttgcaagagcaggtagacgacctgattgcagcctgtcatcagtcggcggcgccagtttatattgtgaccaatgaactgggtatgagcatcacgccagagaatcggctggcgcgtcattttgttgatattgccgggcgcgcgaaccagaagctggcgcgggcggcgcaggacgtgtggctggttgtctcgggaattggagtaaagattaaatgtcgttaa

SEQ ID NO: 171536 - DNA, 1524 bp, Enterobacter cloacae
atgacgcaggcaattatgttgcagggaaccgcttctgacgtcggtaaaagcgtcctggtggcagggctgtgccggattttttatcaggatggcctgcgtaccgcgccgtttaaatcgcagaatatggcgctcaattccggtatcaccccggagggaaaagagatgggccgtgcgcagatttttcaggcccaggcggcggggataacgccagacgtacggatgaatccggtgttgttaaaaccgaccagtgaccgtaaagcgcaggtggtgctgatggggcaggtggcgaccgatatggacgcggtcagctaccacgcgtacaaaccgcgtctgcgggagcagatccgtgatgtctataacagcctggccagagagtatgacgtgctggtgctggaaggcgcgggtagcccggcggaaattaacctgcgcgatcgcgatatcgtcaatatggggatggccgaaatggcgcaatgcccggtgattctcgtggcagacattgacagaggcggcgtatttgccgccatctacgggacgctggcgctgctgcacgaccaccagcgggcgcgcgtgaaaggggtcatcatcaataaatttcgtggcgatgttgcgctgctctgttcgggcattgaacagatagaaaacctgaccggcgtaccggtgttgggggttatgccgtggctggatgtggatctggaagatgaggacggcgtggcgctgcaaaagggaaaatacctgcgaaccgcgccgcgtgatatcgacattgctgtggtgcaggttccgcatatctccaacttcactgactttaacgccctggcggcgcagcccgatgttcgcgtgcgctatgttcgctctccccaggagctggcgggggctgacctcgtgattctccccggcagtaaaaatacgctgggcgatctggcctggctgcgggaaagcggcatggcgcacgcggtgctgcagtcccaccaacagaacgtgcccgtcatgggcatttgcggcggctaccagatgcttggcgacaccatcattgatgaggtggaatcgggaatgggaacccagccaggactgggtctacttcataccgtgactcgctttgcgcagcgaaaaaccacgacgcaggtttccgggcggatggcgtcggcgctgcagacgtggcttgccccgttatcaggcatgaaggtgcagggttatgagattcatatgggagagacccggctgatctccgacggtgacccggcgctgtttctggaaaaagggggcacgcacatagccgatggtgccatcagcgctgacgggaaggtgataggaacgtatctccatgggttattcgataacgatgcgttcacgcgcgccatggtggatggcttacgccagcgcaaaggactggcgccattagacgttgcggtagattacgcggcttataaagcacaacagtttgatatcctggcgagcgcgatgcgagaacatattgatattgaaaagatctatcaaataatgcgggagcatcaggaggtgggcgcatga

SEQ ID NO: 171537 - DNA, 819 bp, Enterobacter cloacae
atgctgaccaccgccaatctctggtttcgctatcaggaggcgcaggtacttaaagggctgacgctggatttttcgacccatgccgtcaccgggctggtcggggctaacggttgcggaaagtcgacgttatttatgaacctgagcggcctgctgaggccgcagcagggggtggtgctgtggcaggggaagccgctggactacagcaaacgcggactgctggcgctccgtcaacaggtcgcaacggtgtttcaggaccccgatcagcagatcttttataccgatattgatagcgacatcgcctttagcctgcgcaacctgggggtggcggagccggagatcgcgcggcgcgtcgacgatgcgctgacgctggttgacgcgcagcgttttcgtcagcagccgatccagtgcctgagccatgggcaaaagaagcgagtcgccatcgctggggcgctggtactgggggcgcgctatcttctgctggacgagcccacggccgggcttgatccttcaggacgcacgcagatgatcgagattatcagacgtattgtggcgcaggggaaccacgtggtgatctccagtcatgatattgacctgatttatgaggtcagcgatgccgtctacgtgctgcgtcagggagaagtgctggcgcacggtgcgccgggcgaggtgtttgcccgcagcgaactgattgaacgggccggattaacgcagccctggctcgtcaaactgcatgcgcaacttggcctgccgttatgcaaaaccgaagatgaatttttcagccgtatgcgacaaaaaaacgtaatgaaggaggcctcatga

SEQ ID NO: 171538 - DNA, 678 bp, Enterobacter cloacae
atgaccgggcttgacaggcttagctaccagagccgctgggctcacgttgcgccggaacgcaagtttctgctctggctggcgctgatgatgctggcgtttgtgctgccgccgctgggacaggggatcgtagtggcgttgacggcgggactgacctgctggctgctgcgtatgagcttctggcgctggtgccgctggatggcgctgccgtttggctttctgctggtcggggtactgacgatcctctttagcgtcacccgagacccgcacacgctggtggtcagcgtccccgtggggcactactggctggggatcaccgtttccgggatgaccgccgccagtgaaaccttctggcgcagccttgccgcgctggcggcgacgttctggctggtactgaacttgccgtttccgcagctgattgtactgcttaagcgggcgcgcgtgccgcgtctgcttaccgaacagattctgctgacctggcgctttatttttattttgctggacgaagcgctggcgattcatcgcgcgcagaccctgcgttttggctatcgcagcctgccaaaatgctatcgctctctggcgatgctggtcggtttgctgtttacccgggtgttgattcgctatcaacagatggcgaccacgctggatattaaactctaccagggtgattttcccctgtaa

SEQ ID NO: 171539 - DNA, 282 bp, Enterobacter cloacae
atgaaaaaaacgctgatgctgttggcgatggtgcttgccctgatcgtactgccattttttatcgatcacgggggggaatttggcggctcggatggtgaagccgaaaatcaaatccaggtggtggcgccgcattacacgccatggttcacgccgctctatgaacccgccagcggcgaaattgaaagcctgctgtttacgctccagggctccattggcgcagcggtgattttctatattttgggctacacgaaaggcagacagcgccgtgatgaccgggcttga

SEQ ID NO: 171540 - DNA, 738 bp, Enterobacter cloacae
atgaaactcgaacaacagcttaaacagctgtcatttggtggcctggcggcggcgctattgctgatggtggtgccggagcaggcgttcgcaatgcacatcatggaagggtttttaccgccgatgtgggcgctggcgtggtggctgctcttcttaccgtgtttgtggtacggactggtgcgtctgcgccgtatcgtgcaggaggatagccaccagaaagtcctgctggcgctgtgcggggcatttattttcgtgctgtcggcactgaagatcccatcggtaaccggcagctgctcgcatcccaccggcgtgggactcgccgtgattctgttcgggcctggggtcgtcgccatcctcggtgctatcgtgctgttgtttcaggcgctgctgctggcacacggcggtttgaccacgcttggcgcgaacggcatgtcgatggcggtgattgggccggttgttgggtatatggtgtggaagatggcctgccgtgccgggctccgtcgtgatgtcggggtatttttgtgcgcgatgctggcggatctggtgacttattttgtgacttcggttcagcttggcgcggcgttcccggacccggtgacgggtaccacgggctcgatggtgaaattcatgggcattttctgcctgacgcagatccccatcgccatcgcagagggattgttaaccgtcatgatttatgaccagttgaccaaacgtcagctgattaccgcgcaaggatactga

SEQ ID NO: 171541 - DNA, 711 bp, Enterobacter cloacae
atgagcggcaaactgtacgccctgagtaccgggccgggcgcgtctgaccttatcaccgtgcgcgcctcacggatcctcggttcgctggatattctctatgccccggccggtcgcaaaggcggcgatagcctggcgctctctatcgtccggccatttatcggccaacagaccgacatccgctgctgccactttcccatgagcgccgacgatgctgaaaaagaggcggtatgggatgaggtggccgacgcgttagtcagggcggtgaacgacggaaaacaggttggctttatcaccctgggcgacgccatgctgttcagcacctgggtgttcttactgcgacgcatcggcaatccggactggctggaaattgtgcccggggtgacgtcgtttgccgcgattgccgcgcggtccaaaacgccgctggcgatggaacagcagtcgctggcggtgattgcctgtaccgcgccggaagcggagattgcacaggcgctgcagcagcacgacagtctggtgctgatgaaggtgtatggccggtttgcgcgcatcaaagcgctgctggcgcaggccgggctgctgaactgcgcactgatgatgtcagaggccacgctccctggcgagcagtgctggcggcatctggatgaggttgctgatgaccagccgttaccctatttctcgaccattctggtcaacaaacagtgggagtacgcgtga

SEQ ID NO: 171542 - DNA, 795 bp, Enterobacter cloacae
atgaaaaaggcgcttctggtggtcagctttggtaccagctaccacgatacctgcgagaagaacattgtggcctgcgagcgtgcgctggcagaaagctgtcctgaccgtgagctgtttcgggcattcacctccgggatgattattcgcaagctgaaacagcgtgacggcattgagatcgatacgccgctgcaggcgctgaaaaagcttgcggctcagggatatcaggatgtggcgattcagtccctgcatatcatcaacggcgatgagtacgagaaaatcgtccgtgaagtgcagagcctgcgcccgctgttcacccgcctgacgctgggggtaccgctcctgagcagccacgacgattacgcgcagctgatacgcgcattgcaacagcagatgccagcgcttggggctacggaaaaagtggtgtttatgggccacggcgccagccatcacgcctttgcggcctatgcctgccttgaccacatgatgatggtccagggtttccctgcccgcgtcggcgcggtggagagctacccggaagtcgacatcctgattgagagcctcggtaaagagggcgtcaccgccgtgcatctgatgccgctgatgctggtggcaggcgatcacgccattaatgatatggcctctgatgccgaggattcctggaagacgttgtttaacgcagccgggatcgcggcgacgccgtggctgagcgggctgggagaaaacctggcggtgcgcgcgatgttcgtcgcccatctacagcaggcgctgagcgtcgcgatggaggaggcagcatga

SEQ ID NO: 171543 - DNA, 786 bp, Enterobacter cloacae
gtgaaatatggcgacgtgctggtcatggggggcaccagcgatgcccgcgcgatctgccaccagctggatgcggctggcgtggcctacaccctgtcggtggcgacgcccaccgggcagcggctggcgggcgacattaagggacgcgtgcgctgtggtcgtctggagccgcaacagatggttgactggcttacggcaaacaggacccgctgggtgattgacgcttcgcatccctacgctgaagtggtcagccgcaacatcctgacggcctgtgagacggtgggcgtgttgcttagccgctatcagcgccccgagcagctcagtgaactgacgcatccgctgctctacagcgtgccgggaattgaagaggcctgcgacatcgtgcggcgtcttggcgaacgcgtgctgttgacaaccgggagtaaagatctggcacgctggcgtaccgcgctgccggagaaaacgctgctggcccggatactgccggtgcccgaggtccttgagcaatgcgccgggcttggctttggtgttaccgagattttcgccctgtgcggaccattcagcgctgagtttaacgcggcgttttatcgtcagtgccgggctgacgtgatgataaccaaagcgtccggggcggaaggcggttatcgggaaaaggttcaaccctgtctggatgcgggcattccctgcatcgtgattacacgcccggcaacgctggtgacgggagacgagttactggaaagtcaggccgcattcgccgggcgtttagcgcgttggatggccgttgcttaa

SEQ ID NO: 171544 - DNA, 1056 bp, Enterobacter cloacae
atgaataccgccaggcctgagtccatcgcgctgttttgtctgacgccgggtggcgtgcagctggcgaaacgcctggcattgatgctgccggtaacctgctttgccagcgagcatttgcaggaagagggctttgtctccttcaacggcggctttgccccggcgcttcgcgaggcgttcgcgcactacccggcgctgatttttatcggcgcaaccggcattgcggttcgcgtcgtggcgcctttgatcgacgacaaactgagcgacccggcggtggtggtgatcgatgagcgtgggcagcacgtgattagcctgctttccggccatgctggcggcgcgaatgcgctgactcgctacctggcgggaatactgggggctgacccggtgataaccaccgccacggacgtcaacgagatggccgcgctggatacccttgccattcagctcaatgcccgaatgcgcgatttccgaacgacggtaaaaatcgtcaaccagatgctggtgagccaccagcgggtagggctgtggtgggatgtcgaactcgatagcgacgtcagtcagtgcgatcggcgcggatttattaccgtgagcgacctgcagcacctccctgaactggatgcgctggtgtgtattacgttgcgaaatacgttgccggaactgccgctgccgcactggaagctagtcccgcagcgggttgtggcaggcatcggctgtcgacgcaacacgccgtattcgctactggcgacgctgctgtcgcgtcagcttgaggcgcagcagttcgatccgctggcgctgaaagcgattggcagcgtttcccttaaaaaagacgaagcgggcctgcttcagcttgccgcctgctggcgtgttccttttgaaacctttaccgctgacgcgctgcgtgagcacgaacatcgctttgcggcctcaccctttgtacgccaggcggttggggtggggagcgtctcgggtccggcagcgtggctgctgagccatgggcaactacgaggagaaaccctgcgcgaacagggcgtcactatcactttgggagtttcacactga

SEQ ID NO: 171545 - DNA, 570 bp, Enterobacter cloacae
atgaaagatgaactgtttctgcgcggcgaaacggtgccgatgaccaaagaggcggtacgcgcgcttgccctcgcgaaactggagctgcaccgcgtcagccatctgattgatgtaggcgcggggaccgggagcgtgtcgatagaggctgcgctgctgtttccctctctgcgcgtaacggccattgagcgtaaccctgcggctctgcaactgcttgcggaaaattgccagcattttgcctgtcgcaatatcacgattttgccgggcgttgcaccgttaccggtggcggataaggccgatgcggtatttatgggcggcagcggtggctatctgacatcgcttattgactggtccatgcgccagttacatccaggcggacgtctggtcatgacctttatcctgatggaaaacctcaccaccgcgctgacccatttgcagcagatcggcgtgcaggacattgattgcctgcaaatgcagagctccgcgctgaccccgctcggcagcggccactatttcaaaccgaataatcctgtttatgttatcgcctgtcagaaggaagaacaccatgtctga

SEQ ID NO: 171546 - DNA, 606 bp, Enterobacter cloacae
atgttaacggtcgtgggaatggggccagcgggactgtccctgatgacgcctgctgcgcgagacgccgttgagcgcgccgatgcgctggttggcggaatacgccacctgcaggcgtttccagcgtttggcggcgagacgtttgtcctcggcgccaacattccggagctgctggcctgggttgaggcgcgtcaggagaaaaaggtggtgattgtcgcctccggcgatccgctgttttacggcatcggatcgcggatggtagctcattttggtattgcgcgcgtgcgcgtgattcccggcatcagcgcggtgcagtacctgtgcgcgcaggcgggcattgatatgaatgagatatggctcaccagcagccatggtcgcagtgtgaatattgatgaactggtacggcatcgcaaagtggcaatggtcaccgatagccagtgcgggccgaaagagattgccgcgcagctggtcgcacgcggtaaggggcatcgctggatggtgattggtgaaaacctggcgatggcaaacgaacggatccactggcttcccgtcagtgaggtcagtgccgactatgagatgaatgctttggtgatcctcgatgaaagatga

SEQ ID NO: 171547 - DNA, 1140 bp, Enterobacter cloacae
atgagcgattcaaccttcgatgccccggtatggcataacgggaaggcgttacgcaaaggctacaccaccggttcctgcgcgaccgcggcagcgaaagtcgccgcgctgatggtgctgcgccagcacctcattcatcaggtctccattgtcacgccctccggcgttacgctgtgtctgaacgtggtatcgccgcacattgaaggacagcaggcgattgccgccatccgcaaagacggcggtgatgacgtcgacgccacgcacggcatgctgatttttgctcgcgtgacgctcaacgacagcggcgagattacgctgtcgggcggcgaaggcgtagggaccgtgacgcgcaaaggaattggcctgcccctcggcagcgcggcgatcaaccgcacaccgcgtcacaccattgaagccgcggtgcgtgaggcgattggcccgacccgcggggccgacataacaatttttgcgcctgaaggggaagaacgggcccggaaaacctacaactcacgcctcgggatcctgggcggcatttcgatcatcggcacaactggcattgtgactccgatgtcagaggagagctggaaacgatcgctttctcttgatctggagattaaacgcgcggccgggctggagcgggtcgtgctggtaccgggcaatcatggcgagcgttttgtgcgtgagcagatgggcatcgatgaagatgtcgtggtcaccatgagcaattttgtcggctacatgatcgaagaggcggtgcggttgggatttcgccagatagtgctggtcggccatcctggcaaactgatcaaagttgccgccgggattttccacacccatagccatatcgctgatgcacgcatggaaacgctggtggcgcatctggcgctactcggcgcgccgctggaattactgaccgccgtcagcgattgcgataccaccgaagcggcgatggaacatatcgaaacctggggttttcaggttctttacagccaccttgccgaacgtatctgcctgcgcgtgatgcagatgctgcgctttaccaaaaatccgccggcctgtgacgccattctgttttcctttgataaccaggtgctgggcagcaaccgcccggtcgaggcgatagcccgggagctgcaatgttaa

SEQ ID NO: 171548 - DNA, 942 bp, Enterobacter cloacae
atgcgcaaaaaggaatacatagtaacaatcggatcagccaatatggatgtggccggatattcacatgattcactcaattatgctgactctaatccagggcggataaaattttctcccggcggcgtgggaagaaatattgcccataatatttcattgctgggtaaagcatcatggctactcactgccgtaggccaggatttttatggtgaaatgttattaacacaaacccgtcagagtggtgtccacgtagaaaaaagtctgtgtgtgcccggtgaaaatacatcctgttatttatcactgctcgataatacgggtgaaatgttagtggctatcaatgatatgggcatttctgagcatatttctgcccgttttttagcacaacatgcggattttattcatcacgcatcagcagttgttgccgactgtaatatcagtgaggaggcactggtctggatactcgaaaatgccggcggcgtaccggtatttgtagacccggtatccgcctggaaatgtatcaaaattcgcaatcatctcgacaaaatccacacgctgaaacccaaccgactggaagccgaaaccctcagtgggattgcgctttccggacgtgacgacgttgcggatgttgccgcctggttccatgcgcatgggctaacgcggctggtactcagcatggggggggatggcgtttactacagtcacgccaacggggagcatgggtgggcattacctgttaaaacgcaggtcattaatgtgaccggtgcaggcgacgccatgatggccgggctggtctcctgctgggtggatggtttgtcatttattgattccgtacgtttcgcgcagggttgctcatccatggcgcttgcctgtgaatataccaacaaccctgatttatctgttgaaaacgttatttccttactggagaaatccgcatgtctgaattaa

SEQ ID NO: 171549 - DNA, 939 bp, Enterobacter cloacae
atgtctgaattaacactgaatgctgaattactgcaaatctcaccagaggtacaggacgcgcttaaaaataaaaagccggtcgtcgcactcgaatccaccattatttctcatgggatgcctttctcacaaaatgcacaaacggcaattgaggtcgaacaaaccattcgtcagcagggcgctgttccggcaactattgccattattggtggaataatgaaggtgggcttgagtaaagatgaaattgagttattggggcgcgaagggcacagcgtcacaaaagtcagtcgccgggatttaccgtttgtcgtagcagccaaaaaaaatggtgccacaacggttgcctccaccatgattattgcggcgctggccggaattaaagtttttgcaaccgggggaatcggtggtgttcatcgtggtgctgaacgcacgtttgatatttctgccgatcttcaggagctggcacataccaatgtcacggtggtgtgtgcgggcgcgaaatctattctcgatctggggctcaccaccgaatatttagaaactttcggtgtcccgttaattggctaccagacaacctctcttccggcatttttctgtcgtaccagtccatttgacgtgagcattcgtctcgataccgcagaagagattgcccgcgccatgctcgtgaagtggcagacgggtctgaacggcggactggtggtggccaatccgattcctgaatcgttcgctatggcagaaggcaaaattaacgcagccatcgatcaggcggtaagagaagctgaagagcagggcatcgtgggcaaagaaagcacgcctttcctgctggcccgggtggccgatctgaccggtggcgacagcctgaagtctaatatacagctggtcttcaacaacgccgtgctggcctgcgagatagcgaaagcctatcaacgtctcgcctgctaa

SEQ ID NO: 171550 - DNA, 1248 bp, Enterobacter cloacae
atggatatcatgagaagtgttgtggggatggtaattttactggcaattgcgttcctgttgtcagtcaataaaaagcgtatcagcctgcgtaccgtgggggctgcgctggttctgcagatcgccatcggtgggattatgctctattttcctcccggtaaatggtttgttgagcaggccgcgctgggcgtacataaagtcatgtcctacagtgatgcagggagtgcctttatctttggctcgctggtagggccgaaaatggatgttctgtttgatggggcggggttcatcttcgcgtttcgtgtgttacctgccattatttttgtcaccgccctgatcagcctgctctattacatcggcgtgatggggctgcttatccggtttcttggcggtattttccagaaagcactgcacatcagtaagatcgaatcctttgttgccgtgaccaccatctttctcgggcaaaacgagatcccggcaattgtgaagccgtttattgagcgtcttaaccgcaatgaactgtttaccgcgatctgtagtggtatggcatcgattgctggctcgatgatgattggttatgccggaatgggcgtgccgattgattatctgctcgccgcatcgctgatggccattccgggcgggatcctgtttgcgcgtatactcagcccggcgacagaagcgtcaaacgtcacttttgataacctgtcattcactgaaactccaccgaaaagcattattgaagctgccgcgagcggggcgatgaccgggctaaaaattgctgcgggtgttgcaacggtagtgatggcgtttgtcgccatcattgcgctgatcaacggcatgattggcggcattggtggctggtttggttacgaacacgccacgcttgaagggatttttggttatgttctggctcctctggcctggattatgggggttgactggcatgaagcaacgcttgccggaagcctgatcggtcagaagctggcaattaatgagtttgtggcctacctcaatttctcaccgtatctgcaaacggcaggctctctggatgtaaaaaccatcgccattatctctttcgccctctgcggtttcgccaattttggatccattggcgttgtcgtcggcgcattttccgccattgcgccacagcgggcgcccgaaatagcgcagttgggaatgcgggccctggcagcagccacgctttccaatctcatgagcgcgacgattgcgggtttcttcatcagtttataa

SEQ ID NO: 171551 - DNA, 1095 bp, Enterobacter cloacae
atgaacgaaagagagaagcagatactcaagatcctgcggcgtaatccccttattcagcaaaacgaaatcgccgatattttgcagatcagccgttcgcgtgtcgcggcacatattatggatctgatgcgtaaggggatgatcaaaggtaaaggatatatcctcaccgaacgggagtattgcgtggtggtcggcgccatcaatatggatattcgcggcacggcggaaatccactatccgcaatctgcctctcatccgggcaacattcactgttccgctggcggcgtgggccgtaatatcgcgcataatcttgccttgctgggaagagacgtccatttaatttcagcggtaggcagtgatttttacggcgaaacactgctggagcatacgcgtcaggcgggggtaaatgtctccagctgtatccgcttacacggacataacacgtcaacctacctttccgtcgcaaaccagcaggatgaaacggtgctggcgataaacgatacacagattctgcaaaagctgacgccgcaactgctggacaactcgcgggatctgctccgtcacgccggggtgatacttgccgattgcaacctcaccccggaagcgatggagtgggtctttaccatagcggatgatattccggtctttattgataccgtttctgaattcaaagcggaaaaaattaagacctggtattcacggatccataccctgaagccgacccaaaaggaaattgagatcctctggggcaatcccgttattaccgatgctgacctggcccgcgcagcggattttctgcatcagcaaggggttcagcatgtttatgtttacatgaaggatgaatcggttttttgtagccagaagaatggcgaacaatttcgtcttttcccgcctgcgcatcctgtcgtggacggttttggcgcggatgacggttttatggcgggccttctctatagttttctggaagggagcgattttcgtgacggtgcgaatttcgcgatggcgtgtgctgccttatcacgcgccagcgtcagcctcaataatcctgccctttccgctaataacgccctctatctgctcaatacaacccaggcataa

SEQ ID NO: 171552 - DNA, 579 bp, Enterobacter cloacae
gtgcgtttcgttaatttattattcaccctccttgtaataacgtcgacacgacaagcatacgctaatccagttgatgatcttgaagcagcacaacttcgcgccagagaagtacttgagcatcgcctaaatgtctgcgatcggtttagaaaaattgaagccaactggtttgacttctggcttcaatcacagtcggttgaggttagaaaaaaagcaatctgggatttatacagaagagccaacgaacgatgctacggtgcggagcgtgacgcctactcaatagcgcttatcaaatacacggctataacgggcgatagaacactgctggatgactggatatcgttctatgatgatccaggtctaaaaagggatatccaactccccattcctgaaatcgaatacgagaaacaactcgaacggcttacactgcttcctgctttctacatgccgtttgatacgatctcatccagagacgccattgcccccgatcaagaatggctactgtaccaaactgtccggcggaccttccagcgaacgccatatattaaaggtctcatcatcaacggactgcacattcaataa

SEQ ID NO: 171553 - DNA, 2184 bp, Enterobacter cloacae
atgtcgtcttatacaacagacagttacggtgcagcggcacccgaaaatcaggaaattgatctccttcgtctcctcagcgagatgctcgatcatcgtgtacttattctctcagtgaccttcatgttcaccgtcctggcggggctatacgcctttctggcgacgcctgtttatcgcgcagatgccttaatccaggtggaaggaaaacaggataacagcctgctcaaaaatttaagacagttcagtaatgagctctctcccgatgttgaacccgaaattctgctgcttaaatcgcgcatgatcctcggggccaccgttgatgaattaggcttaacgcagaacgtggcacagcgggggcgtctgtgggcgcggttgcagggccataaacccgccacgctaaccctgggctggctgcagctttcacctgtcgaaggaaagccacgcacacttctcctcacggtgctggaaaagggcgcatatcggctggagggcgacaacttttctgctgagggcagagagggaaaagcgctggaaaaagcgggagtatccctgctggtggtgaaccttgatgccccgccgggcacgcaattcacgctacagagcagcactcgtctggaggccattaatgccctgagcacccagctttccgtggttgaatcggcaaaacagagcggggtgctgacgctaacgctcaccggcagcgatccggagcggattgcccatgtgcttgaccggattgccaacaactatctgcagcaaaatattaaccgccaggaagcgcaggattcccgcagtcttgcgtttttgcagcagcagttacctaaaatccgaagcgaactggatcaggccgaagagcggctgaatcaatatcgcaaacagcgtgattcggtcgatctctctctcgaagcgaaatcggtgctcgaacagattgtgaatatcgaaaaccagctcaacgagctgacgtttcgtgaggcagagatctctcagctgtttaagaaagagcacccgaactaccgtgcattgcgtgaaaaacgtcacattctggagcaggagaagatccacctgaatcagcgtgttgccgccatgccttcgactcagcaggacattttgcgcctcagccgggatgtggagtcaggccgcaccatctacctgcagctgcttacccgtcagcaggagctgaatatttcacgctccagcgccatcgggaacgtgcgaattatcgacagcgcggtgacgcaacccgatcccattaaaccgaacaagacgctaattatggtgtcgggcacgctgttgggcctgatgtgctctgtgggccttgttttgcttcgtattgcattccgacggggtatcaatacttcagaacaactggaagggttcggcgtcccggtgatggcgaccttaccgcgttcgatgtggttgtggaaaaaaacgaatctgcgccgcaaacgcgtattgggttcgcgctggaggcacaagattaacgatgtgccttttctgccggttgaccggcccgccgatatttttgtcgaggccgtgcgggggctgcgtaccagcctgcatttcacgttgcaggatgccgctaaccgcatcgtcatgatttcaggacccacccaggactgcggaaaaacgttggtcagcacctcgctggccgcgattgaggcgcaggccgggctcagggtgttatttatcgatgcggatatgcgcgagggatacgtccacaacgtatttgatttgaaaaaccacaccggactttcctgcgtgcttgaagaacagtgcgcctgtcaggaggcgattcagcactatgagcaaggcaatatagatgtgctgacctgcgggccggttccatcacacccctccgaactgctgatgagcgaacgcttcagggcggtaatgacctgggcgaatgaacagtatgacctggtgatcctcgacacaccgccagtgctggccgtgaccgacgccgcagtggccgttcgggtggcgggcacctcgctgctggttgcccgctttggcaagacccgcctgaaagagatggagaacagcatcaagcgtctgcaacaaacgggcgcgcgcatcggcggtaccgtgctgaacgacgtgattaaatcggccgcgcagtattaccgtgcgggctatgatcattatgagtatggccaaagcccggcccggcgacagcgcaaggattaa

SEQ ID NO: 171554 - DNA, 462 bp, Enterobacter cloacae
atgaaaaagttaatgatggtagctgccgtaatgtctcttgctgcatgttcttcacccgctcaacgtatggctgagtgtgaagcgcaaggtgtcagtaaagacgcatgttatgtcgcggagcaaaaccgcacgacagcaattaacgctgcggctgaaaaacaggcacttgaaaacgcggctcaacgtgcacaatcagcacacaagcacctgccgaaaggctgtacgcaattgcaggacgcgaacggtgaatgtaacgtgaagcccgctacacagagcagcagcgttaaacaacttaccagtgaagcagatcgcgttatgaaccagccaatctcggatgctgcagaataccttctctctaaaggctggaaaccaaacaatggtacgtggagcaaaggcggctactcccttcaattggttgtagagaatgagaaagtcatgaacgctcaactctctaaagattaa

SEQ ID NO: 171555 - DNA, 369 bp, Enterobacter cloacae
atgaaaaactattatttaaaatccgatgccgacaccgacacccattgcgaaatcattattcgtcgagtcactcatacccgctttcacaaccgcgctacccgcatggaaggaagcgccgacactgaccgcttcctcccctttaaattcaccggcacccgcagagaacattacagcctgatctttttcaacctggggcatggaagccattgcaacagcagaggctacgccaccacgcgcttcttttttattaccatcaacttcatctttcaggtttttgaattgagagtgagtgttagcttgtgtctgcgcaaatacctgttgagccgctttcagatctttagcttgtgctgtagtttgcgcactaagtga

SEQ ID NO: 171556 - DNA, 807 bp, Enterobacter cloacae
atggatatcgcgctgctcaacaggggatggaacagaacctggtcagataccatggtaaatctggaagcccggaaacccgtcgaaacagcaaaccggctgtcagcattctatttgcaagatgggataacacgtatcaagtttgtcgaagagatgaaacaggtcgtagaaaaggagtttgagacagcgcggcgagctaaaacagacgaagaatgcattgtatgcatcaaaaatctgcgtgctgaaacagacaatctgcttgaacaagagcgtctgttaagaactaagtccgcacagctttacgcgaaggtcgagtttgttaaggaaaataataaaatcgtcgggtacatgatttcggctgtgaatatcgttatatcagggatagttttctacggcggaatgatcatgatctcgacgatgacccctattggcgtcctcgctggcgcaatcttagttgctgatggcactaacggtataaccagagaagtgaatacattattatctgaagggaaatctaactctgaaggtgtggtcgctgacaaagtgattaatactgctcagtttatgggatttaaagctgaatctggtctggctttttataacgctctaacactaagcgcaagcatctacagcatttttggattagcgcgaaaagcaggtgcctggcgattgttccgttggcttccccacgattaccaccgtaaagtcaacacaatgagccgccccaggttaacgatgaaaatagtaggctatggtatcaaggctaaagttatttttgacctgctttccaccgaagcaccgaatcattaa

SEQ ID NO: 171557 - DNA, 624 bp, Enterobacter cloacae
atgttaaaaatatttactttagttgttgtgcttttttccacgtttgcttacggggaatcgattacacaagctatgaaaacgcctggagatacaagtaaagagctgccagcgaaaggctatcaagacgtaaaccggatagaaaaccaacaactgagtttggctgagagcgaaaaacaggaactctactcactgatcaataaaaatagccaggcaatcgaactccttgtagcaaaccaagaaaaactaatcaatgaggttaatggagttaaaggagatgcgaaagttgactattcagggtggacgagtgttttacttgcttgtgtcggtataattattacagttatgagcgttatattagcattgatatctattattggttatagaaacttcaggaaaagcatagagctaagtgtgaaaaaaacatcaactgaagttgctaaacaagaaaccgttattcagatagatgcagttgcgaaaaaagaattggttcgtctaatcgatgagggtgctttagcgaagcatcttgaaagtgcagttgatatgattttccttcgaagaaaacccgaattaaaagacattggatttgataaatatcctgagttggataaagaggaaggtgaataa

SEQ ID NO: 171558 - DNA, 1110 bp, Enterobacter cloacae
atgttgataagtaactactcttatataccgattctctcgttgaaaccagcggaaatggctgcgttggaagaattgcctgctaaagacaaacatttgatgcttcctttaatttcgttgaaaaaatgggcgaattcaaagtcattcataaaatctacagaacgtattgaaaaagcgataggaaaaaattattggatagccgatatcgataaagagcatcttttaatggccaagcaaagactcgcagatggggatgatggcgtttctgcggagattgtcagcctcgcggagtcgaataatggatatgagaattgggttaattttatttcaactaatgagaacataatcccaactctccagctcagtgacttatctgcattagatttgcaattgtctaatttttcaaacattaataaaacaatagttgtaagattcgagttgtcaggctctcattccattgagcttagagacttttctttcgttgttaagaaactatctgaaagaaagtttccgcaaggaatattgatcgtgttagattatggtgatgttaatagattcaatttgattgagtattataaaaactcaaatttagtgaagcagttaaataatttgatgccagaggcctatttctgcgtatctggaacgtcttttccttattcttttgcaggttcctatcgtggagaaattccaatttttgagcgccaaatttataataaagttgttgcagattgtcagggtgtaaagtttatttactcagaccgtggtagtacccgagcttcaggcaatgatggtggaagcgggacaccaccaccacgcattgattacccattaaaaaatgaatggcgattcattcgtaaagaattggatgataccattgaaaaagaggttctttatcaagaggcggctatcgaagtaatgaactcagaatactgggacgcagagctgagattatggggtactcagatgatcgaaaagacaagtttgggtgatcaatacggaatcacttctgctaatagggctactgccgtccgtataaatttacatctttaccaacagttacattattttgacgtgttaaaatcattggatacagaagaagattgggttgattaa

SEQ ID NO: 171559 - DNA, 693 bp, Enterobacter cloacae
atgaacagtacagaaaaaatgcttgagtcagctataaaagcattagttattaaagatatttttctaaaagaaaatagcgcaacagctatttctaataattttgtaatcgatgaattcagtgtcgctaatttcagcagacgagtagatttaattcattcaagaaacgataaaattttcgcatacgaaataaaaagtgaattcgactcactcagtcgactaaagggacaagttgatgaatatcttacacattttgataaggtaacggttgtcgctgctccacgtcacatcgataaagtccttttattaacaccgaaacacgttgctgtttgggaagttgctggtagtaagctaaaaatagttaggagagggaaaatattaccaataaccgataaaatgaaattcatccgaatgatgacactcattgaattattgagcttagcaaaaaaatcaaatattgaaattaaagataaaaaaagaaaaatagtagaattatccctgctttccattccgactaaatacttaagagaagaagcaattaacaatttaaaaaaaaggtacagtaaaagagaaataaattattacgatgcatataattataataattatggtcaaagcggtaaggcagaacctcgaaaaaaaatattacacgcaagaaatatagactcgcttatacacgcaatagaaaaattataa

SEQ ID NO: 171560 - DNA, 1428 bp, Enterobacter cloacae
gtgtctgaacttaaaagtaagaccgtcaatggtctaaaatggagcgctctcgaaagaattctttcacagggtgttcagctcattctgatgctgatattggcgcgtcttttaggaccaaaagctttcggcctcatcgggatgttagctatctttattgcgataggtcaggtctttattgatagcggatttagctcagcactgataagaaagaccgatcggactgatgtagattattctacggcattctattttaatatcattgtcgccttttgcttctatgttttactttatataagctcaggttacatcgctgagttctatcagcagccagaattagcctcattgacaaaagtgataggtctgacactgatggcgaacagcttttcagtggttcccagaaccattttgacggtctcgatgaattttaaagcgcaagcaaaagcatcgatctgctctgttgttctggggggagtcgtggctttgattatggcgtggaatggctttggcgtttgggctctggtagcacaaacgctaaccgtagccgtattcagcgctgtttttcttaatctcatcactcgctgggttccagtcttttgcttttcaaaaaaatcgtttgattatctgtttggttttggtgggaaattattaatttctggcctgttagatacggcttataataatctttatcaaattattattggtaaaagatttaacgcagaaaatgttgggcagttcactcaggctaaccaaatatccagcatacctgctatgaccatgaccaacattattcaacgcgtcacctatcctatgtttagtcatatgcaaagtgatcaacataagatggatgagtattatttgttgaccatgaaagtggctgcattatttattttcccgctaatggctggggttgctattctggctcagccattattgcaattagttttagggatgcaatggaaagaggctgcggaacttgtcgctgtgctggctttggcatatatgctttatcccattcatgcaataaacctgaatgtgctacaggtcaaaggtcgtagcgaccttttcctgaagttagaaattatcaaaaaagtcataggtatttgtatcatagcagtaacaatgaattatagtatttacctcatgtgtgtcggtttgttaattcattcttacttagctcttctgttaaatacttactatacgggaaaattaaccggattaacgatatggcgtcagttcaaagaaatttcgcctatctggttgattacaatggtctcttgtttaatagccaaagttattgcggtctatctcacggcgcatgatgtttggcagatcgttacaatgttaactttagcgcctagtatatatgtagtcttgatttacctcacgcaaagaaaattatttaagattgtgttgtctatcaaagaatag

SEQ ID NO: 171561 - DNA, 459 bp, Enterobacter cloacae
atggacgttaatgatattattaaagtaatgaacgctcagaatgaaaaagcatcatctttaagcctcagcaaaggcgggtttgaaggatggttacaggcagaattgtggtatcaccttaatattatcaaaggagaaagcaccgagcgtgaagtccaatacccgcactctctgacttactgtgatttagtctgtgatgcgaccatgacaaaaccggctcaatgggtggaggtcaaggcctatgggatcttcagggacggtgatgagccgcgctttctggatggcgtcgctgctgatgtcatgaagattgatggcaaacctgctgatgcatcagggtctgtttatctcgtcgtacccaaagccatttcagacaaagttgaagccttgataatgcggcgtggctggacgaatttcaaacgtacggattcggtttatgcctatatctattacgctgatgtctga

SEQ ID NO: 171562 - DNA, 690 bp, Enterobacter cloacae
atggctaaagaaatagataaatcaggtcaactttctgaagaaaccaaagaggctttgagtttcttatcagaactcgcaaataaacaactcactctttataaacttactatcacggatgaattaaaaaacgctgagcagagcaagaccctgcctattaccgcgatcattaatcgtgatggacagacacgttcatatttaaaaaaggaagccgacaacattaataaggttgttgatgaagccgcgggcatgtttattggagatcagagtgtcgccaccggcataggcaatatgctcaaacttctcattgcgtcattccttggtagctcagagggtgaagaggtctacaaggagaagtatttatgttacaccgatggtatttcattactccgcttcgattttcttgcctggaagcgaaacgttaaaacccaatcgttgttaacacatacggaatctgtctccgcctactactatacgatttcagtggtcgatgccacaaaagttgatttccagacgtttgccgcgctttataaggacgtactgaagtcaggcggagagtcggcagaagaaatcataaaaagtctggatgacctgcaaaagatctatgatcggcttcgccaaaaaaccagcgatcagctgaaggcacatatcgaaaacaattacagtagcaagtcgcttttacatctaatgtag

SEQ ID NO: 171563 - DNA, 963 bp, Enterobacter cloacae
atgaaaaacactaataaggtactgatcctgggcgcaacgggaggaattggtggcgaaattgcccgtaaactggtccgcgatgaatgggaggttcgcgcattgtgccgcagaactccgcaaaaggacgagcacaactcacgtatccactggattagcggcgatgcgctaaatgcagagcaggtagaggctgcggcgtcagagtgtggcgtgattgtccatgccgttaacccgccgggttatcggaactgggatcggctggtcttacccatgtttcatcacaccatcaacgccgcggagcgaaacggagcgttaatcgttctgccgggcacgatttataactatggtcccgatgcttttcccctcttacgcgaggattctcctcagcatccagttacccgaaaaggcgcaatacgagtgcaaatggagcaggctctttctgactatgcgcagcgtggcggaaaggtactgattttgcgtgcgggggatttttttggtccccgtgccggtaacagctggttttcacagggattagttaaaccgggtcacccgccgctgatcgttaaacaacccgggaaagccggaacaggccatcagtgggcatatctgccggatgtcgccgaaacgttcgcggcactgctggcgcatcgggatgagcttgaaccgttttcccgtttccacatgcgcgggcactgggatcctgatggaacaacaatggccgcagccataacattagccgcagagcgtgccgggattaaggcgaaagtgaaaatgtttccctggtggctggtctccgcgatgagtccctttaacaccacactgcgtgagatgcaggagatgcgctacctatgggagcagacggttgaaatggacaattcaaaactgattgattttttaggccatgagccgcagacccctcttatcgatgccgtgcattccactttagcgggtctggggtgtatttaa

SEQ ID NO: 171564 - DNA, 1191 bp, Enterobacter cloacae
atgtttctggtaatcgcttttctgggcgggatgatcagcctgctcagtccatgtacgctcccggttattccactcctgtttgccggttttcaggggcagcggcgccatattctggcgctgctcgcggggatgatcgtgatgttcactctggtcgcgatggtcgtcactgtcgccagcgagtggataacgcaagccacccttatcggacgctggatcgcgctcgtcattctggccgccgccgcgctggccttaattttcccgtccttcgcccagcgcatggcgggccctgccgtgagcgccggaaacgtcctcaacacccgaagtggacaagcgcgcggcatggcatcagcgtttctggccgggctggcggtcgggctgctctggtctccctgcgcggggcccattctgggtgctattttcagcattaatatcgcggggcattcggccatcgctactggcgcactgctggccgcctatggcagcggatgcgcgctgatgctgggtttgctcgtgttcggcggccgcacgttgatggcaccgttaagcgcaaagtcggcactgatggcgaagctgcgccagggagcgggtgtggtgatgttagcggcagtcgtcctgaatgcgacagggatgacttcgctgctgaaaggagcaaacggcgtcgcggaccgtcttgagaccgcgctgttaaatctggcgaagcctgcgaccacgccggtgaagctccagccggtagtcatgaccgaacccagcagccagttgccttcgctaagcggtggaacagggtggataaacggtgaccatgtcacgtctgaatcattgcgggggaaggttgtccttatcgatttctggacgtgggactgtatcaactgccagcatacgctcccccatgtgcgggactgggccaccaaataccaatcgcaggggttggtcgtgattggggtccatactccggaatatccctgggaaaaaccgctttcgtcggtaaaaaatgcagtcaataaatggcaactaccgtatcgggtggtgacggacaacaactatcaaatctggaatgcttttggcaatcagtactggcccgcacattactattttgacgccaaagggcagctgcgctataccgcctttggcgaaggtgattatgagcaacaggaaaaggttattcagcagttgctcaaagaagcccgttcataa

SEQ ID NO: 171565 - DNA, 528 bp, Enterobacter cloacae
atgcgttttttggatcttttagtcggacggagttttcagggtcttctccagcaggttaaagaggaacggtttttgtcgcgtcccctcagcgagcttccgcggcaaaatccttatccggtcgcggcattgttacctctgtttttggtggcgtttgcgttaaaccttctgccttttctcagcacgttgcccggttggtcccctttacaccatgcactgagttttttcgtaccatcattaatcatgactggcgcgctcattgttatcagcgtgcttttggcccgaggggtgacgtcaggattgttggggtttatggcagtgttcatccttctgctggtcatgaccttcgttcaggcgctgcttttcctgttctctcatgacgggagcctttggccactggtcattgcatccttcgcgctgatactttgtcggagggtgatgaatagcagcggctttgtgctgtttaccctctattgtcgcactcagcatcttgccagcgttgcacgtgaaatccggttaaaaagccgttaa

SEQ ID NO: 171566 - DNA, 363 bp, Enterobacter cloacae
atgaaaaaaataatggtgttggcgcttgtggtggttgcagcaggggccgcggctggcgctcgttatgtcagtaatgacgcacctgaatatattcactctgcagaagctcgcgtaggatcatatttaaccagcgattatggacgcgttgattgtaatagcatcaaaattaacgacgaacgctgggaattagactgcactcacaagacgcgcgggaaaacattccagtttgcggtctatccgtccgaaaaagcgccatatggcgtgtcgcgttcgttttatcttgaggccatcaatgatgatgccagacagagcgctgagcagggcctgatgcgttatttgcaaatcaatacccaggcgggttaa

SEQ ID NO: 171567 - DNA, 540 bp, Enterobacter cloacae
atgtctgcagaaatcatctccgtttcgcaacacatcgaacttcgcgccgtcgaagcgcgctatgccactgagctgtataacctcgtcgtcaaaaacagaacctggctgcaaaacgcgtttgactgggcgcatcatgcggtcagcgaagaggatacccgccgcaacgtgcaaagtaaccagatgctgcaccagcgcggctacgccaaaatgtttttgatcttcagagatgatgcgctggtcggcgtgctgtcgttcaacaccatcgaaccgaccaacaaaaccgggtacatcggctactggctggatgaagaccatcaggggcagggtattctctctcagtcactgcaggcatttatgcgctactacgctgagcgcggtgagatccgtcgttttgtgattaagtgtcgggtcgcgaatcagaacagcaacaatgttgccctgcgcaacggctttacgctggaagggtgtctgcgggaagcggaatacctgaagggcgcctttgatgacgtaaacatctacggcaagatttacgccctatag

SEQ ID NO: 171568 - DNA, 795 bp, Enterobacter cloacae
atgataccgatttttttcccctgcgtgcccgctggcacgctaagtgccattaacaccgtaggacactggctggcacaggatgacctgcagccggggcagcccgttgatatggttattctggcgggaaatgctgtcattcctgctattgatgccgcctgtcgccaggcggccgagcagggtgtgcccttgatgattagcggggggataggacattccacctccttcctctatgccgcagttgccagacacccgcactatcgcatcgtccccacggcaggccgtgcggaggcggccattctggccgatatcgcccgtcagttctggcatgtcccggcggagcgaatttatgttgaggatcagtcaaccaattgcggtgagaacgcacggtttagcagggcgttgatgaaacatcttcatcttgctcctgaaagcgtgctggtggtgcaggaccccaccatgcagcggcgcacaatggcaacgtttgcccgcgtatgccgggatgaacctgccgcaccagaatggataagccatcccggattgacgcccgtgttacgtaacaccaacgatggactggtcttcagcgggtcagaggaagggctgtggccggttgaacgctatttgtcactggtactgggtgaactgccgcgtctgcgcgacgatgttaacggttacggaccggccgggcgtgattttatcgcccacgtgacgatacccgcgcaggtggaaaccgcatggcaaatcttacgtaacgatgcgattctgacagaggcactggcgagccgcgccctgctgtaa

SEQ ID NO: 171569 - DNA, 513 bp, Enterobacter cloacae
atgatgcttagaattcgacaggccaccgtggccgattcaacactgttaagcgagctgggataccgcatctatcccgcccattttcagcatttgtgggtgtcaggcgcagaaatgaaggattttctggccgccgagtacgccccttccgtactccagcagagcctgacggagagctctgtttcctggtttatagccgaaaccgatcgccccgtggggttcatgaaagcgacctgggaggccatgatcccagaaacggataaacagggcgtactcctcaacaagctctaccttgatcctgctgaaaccggcaagaactatggtcaggtcatgttcaacaccattatcgacctggcccggaacagggggaaaaactatctctggctggaggtgcttgagcagaacgcgggcgcgtaccggttttaccaaaagcagggcatgctctgccttaagaacgtgcttttcgaaaccgcttctcagcagagcatactcagaattatggggatgtctctttag

SEQ ID NO: 171570 - DNA, 582 bp, Enterobacter cloacae
ttgaaagcagaagctgcaggcaacgataaaaaaatcagcgtcagggataaaataatacttacggcgcacgatctgttctattccacgggcttcaaagcaaccggcgttgatacgctgattaaagaggcgaaagtcaccaaggtgacgttttatcgccactttccgagtaaaagtttacttatccttgcctatttgcagtatcggcatgaaatatggattgactggtttgaaaccacgctgcgccgacatctcgacgctggcctgaccgcgtccgatgcattatcggcaacgcttaatgaatggtttgtttcacccgagttccacggttgcgcatttattaatgccagcgcggaagccaaatccgaagatattgaaagcgaaataaaggcgatatgtcgcgatcataaaatcgaaacaaagaatattattgcgtcgctgacgaagatcgctgatgagcacgtcgtcaatgaaatcatactgctcattgacggtgccattattcatgcgcagatgggcatggggacggatgaggtcatcacgtcgttgaagcgggcgttggcagggttaccaggtggcaaatga

SEQ ID NO: 171571 - DNA, 786 bp, Enterobacter cloacae
atgtctaccgacaacttatccagaatgggcgcagcaaaggtacgccttttgacggatcaacatggcaatcagataattgaaaaaagccctgttagtgatgttgaatactgcttttatgagcgtgcggcggagccactcaagagggctgttgaatcacctcgactgttgcacgcagatcctcatcaacacgtcctgaggctcgagtacgttccgcataagatctcccaggatgaggttactgctgacgaaatattgagacgactttcacgccttcacgattatcctgccgaccccgcatggatttatcacccccatagctggcctgagtcatcgcttgaaagatcgctgtctcttctggaattacccgtccgcattgagcggcagttgcgctattttcaccaggcgggcagcgttttgtttagtcaggaatgtttgatttctggtgattcgaatgcgggtaactggggcagaagagaaaacggcgatgtaattctttttgactgggaaaggttcggcacgggcagtccggctatcgaccttgctccactggtgaaagggatgggtacaagacaaagcattttgcagcttgccgaacgctactgtttatttactgctcattccgttgcagacaagttagccagagaaatcactatcgccaaagcatggattgtcactgaagtcgtgttattactgcacgaaaggaaaaagcctgatctgaatatctaccttaactggtacagggaccatcttcccggctggctggatgagtccgtcaccattctttga

SEQ ID NO: 171572 - DNA, 471 bp, Enterobacter cloacae
atgacactcgatgttttactcccggtcatgaaaattatcgcgccgcataaaaataatatcgccgaaagcttacatgacttaattaaaatactgtcagcagaaaaagaacattccgaagcgctgtcaccctttattcatcgactgcatctgctctctttcgcccagagcgcgccgggtaacgccgaggcgctgctcgcggtgcatctgccaaaagaagatgggctccttccgctgcttgacttcgctgactggccccgggtgcgttacgccgcatcaggtgaagtacagacgcctgagtctgaggcttattttcagaaaataacaacggctgccaatctgttacgttcagcattgattgatgctgagcgcgaaaaaggtacgcctgcgctttatattatcgataaattgcttaatctgaacagcgcgctgccggaaagatataaacacatggcaaatattccctacgcctga

SEQ ID NO: 171573 - DNA, 468 bp, Enterobacter cloacae
atgactgtttcagcgaaatatgaatggcgcaagaataactacctggtcagtacggacagagcgaaactggacgtgcaggcaatccatcagtatctgacccggtcatcctgggcaaaaggcattcacctggacatcgtcgcggcgtccgttgaaaacagccttaactttggtctttatcatcatgaacggcagattggtttcgcacgactggtcacggattatgcgaccttcgcctatctttgcgatgtctatgtcctggaagagtatcagggtgaagggctgggcagatggataatagagtgcatccacgatcaccccgtttttctgcaatttcggaggatcatgctatttaccacaactgcgccctggctttatgaaaaattgggctacgagcccgtaaacagggaaaactatgcctggacaattacgcgacctgatatttataccaatgctaaaaagccgggctga

SEQ ID NO: 171574 - DNA, 408 bp, Enterobacter cloacae
gtgggcgtgtctgacacagtaaagaaaatcgtgatgctggccattgtggcgagcctggctgcgggatgcgcgccgttacatccttccgggtgccataagaccacggcaacggggtcttgtggttccggacgctgggacgatcaggatgaatggggggcgcaggcacgggcgatcaaggcggcaatagaagacaaaattgacgagccgcaaaagtggaaagggaaaaaatgccggttgcatattgaatttgctcaggatggcacggcgttagctatctcaaccagcgacggcaataaagcctggtgcgaagcgctaaaatcagcagcccaaaaagccacattcccggccttcaataatccggaagtctacagagattttcaaaaatccggctttgacatgcgaggttag

SEQ ID NO: 171575 - DNA, 483 bp, Enterobacter cloacae
atgacgcatttttatcaatttacagccacccgccttgatggccgtccggtcgctatggccgactacgagggtaaggtggtgctggtcgtgaatacggctagcctgtgtggctttacgccgcagtacgctgctcttgaagcgttatacaagaaatacgcgcctcagggatttgtcgtgcttggctttccctgtaatcagttcggtaaacaggagcccggcggcgccgacgacatctcaagaacctgccacataaactacggtgtcagttttccgatattcgagaaaatagaggtcaatggcgccgccgcgcacccgctgtttcgttacctgaaagaggaattgcccggcgtgctgggtgggcggatcaagtggaactttacgaaattcctgattggacgcaacggtaaaccgctcaaacgttttgcaccgatgaccacgcccgagaaaatggaatcggcgattcgtgccgcactgacaggctaa

SEQ ID NO: 171576 - DNA, 423 bp, Enterobacter cloacae
gtgatccgctatcgcacccgcgacctgacgcgtctgctgccggcgacggcgcgcagcatgcgccgcatggaccgcatcagcggtcgcagtgacgatatgctgatcatccgcggcgttaacgtcttcccgtcacagctggaagaggagattgtgaagttcgaacacctctctccgcactaccagttggaggtcaaccgtcgcgggcatcttgattcactttccgtgaaggtggagctaaaagagagcagcctgacgctaacgcacgagcagcgttgccaggtgtgtcaccagctgcgtcaccgcatcaagtcgatggtggggatttccaccgacgtgacgatcgtgaactgcggcagtatcccgcgctcagagggcaaagcctgccgggtgtttgatctgcgtaaggtggcggccaacggttga

SEQ ID NO: 171577 - DNA, 396 bp, Enterobacter cloacae
atgcgcgacggtcgggtttttaactggcgagccgggatagtggttgtcattttcctggtgtttatcatgtatccgttccgtaatcttttcaccgtgtatgaaaatattcaggaaaagattagcgttaacgatcaattaactctctatatcacccaggttgaagcgagttctttatccagaaatacgtttcacttttatctctatgatgcgagaaaaagcactgaagagtttatgtctcacctgtcagacatcaagcctgtcatgattaccaacgatgctaaagccactgcaacggtaaccaacggagaaatttatctacgcgttcgcggaaatatttacgctttcactgcagttgggttcgatgtacctattcatctcgatagatcagctgactga

SEQ ID NO: 171578 - DNA, 159 bp, Enterobacter cloacae
atgtacaaccataatcgggataaaagtcatttcgaagccaaagttgttgagattgaaaagctcccagagaaaaatcctggagtttgtttcgcaacatcgaatctgactacatcagaggatggcaagaagcttctaaaacagcgttggctctggatttga

SEQ ID NO: 171579 - DNA, 825 bp, Enterobacter cloacae
atggaaattaaactgcatgctaatgccaccaccacgccacgtattcgtcgttatctccagcagtccgataagagcgaccgagagctggcgactgagctggggatctccatcaccaccgtcaggcgctggcgcaaccgtgagcaggtttcagataagcagacaacgccaaaagtgatacacaaagcgatgagacaagagcaggctgtgctggtgaatgcgctgcgtgacatcctgaacgcgccgctggatgaactgctgcttctggtcaataacgtactggggatccgcgtgtcccgggcaacgctgaatcgctatcttaagcccgctggcgccaaaccgaagcgtgcgccgctgcgcggtaaaaaagcgctgaaggccggtgtcgtgcctcagcagctgatgctgcatcatttgccgttatcgcttcatatggacgacggtggggagcaacatctgctgtgggcgcgggagccggtgagcggctggtgctatgcgcggctctatgcagggttgtcgccgcagctgttgacgcactggatgcaggcgctgcttgaggcctgtccggcccctgtacaatctgttgagacttttggttttgaggtcaccctgccggacagtgaaattgccatcaacgagcatccccgggcctcccgggcggtgcaggtcacggtacccttgcaggagattattccgcaggtaaaaacgacgcctgtcggggagctgttgattcaattgtgtgagagttacaaccggggaaaagcgcagaagacgttaggtgaaagcacgccgcaggcctttctggaagcgctgcggcgtaacgattag

SEQ ID NO: 171580 - DNA, 1035 bp, Enterobacter cloacae
atgcagttaggatttgttggtcttggcgcggtcgtggaaaccgcatatctccccgcgttgcgtcacctttcaggccacccggttcgctgttttgggtttgatgttctccccacaaagcaccctgaaggcgtcacgcgctgcgcctcgcttgcggagcttcttgccgcaccgcttgatattctgtttatcaccaccgcttcgctacaccaccttgaggtgcttgagcaggccattgcctcgcccgttgcgcggattgtgattgaaaaaccgattgtcgccacgctttcacaaatcgaaaagctcaacgcgctgctggcacgccccggcgtggtgccccgcgtgctggcgctcgaccactggatggcgcgcctcgaaacggtgaaaaggtcgctggtaagcagcgtctctgacatcgtcaaaatcgacggttatttacaggagccgagtggatataacgccgcaggtgaacccatcgcgcttaactttgccaccggcgagccggatacccgcacgcttcgccaccctgacggcgtgatcctggatattggtacacatgtgctggcgatgctgcgagaaaccgtgcgctatctgggcggcaatgacgatatgacgctgcgggtcgtcacggctaaagatcgcctgggtcgcgctatcgcaaaaggcgacctgaccacggcggaaggcgaggcgcatcttcaggggcgtatcagcggcgtgccggtggatatctggcttaacaaatatgcgggaccggcgggcgggaaaaaggggatacgcctctgcctgcgcgacgggcgcatcatcagtcatgaccggcgcggcagtgaagatgtgctggaggtgatcgatggcgagacgcgtcaatgctggacaattcccggcacgatctacgaacactgccttgcagagcagatcctgggcaccagaagcctgtttgagcgggatccgcacgaggtgagccgcacaacgcgccgcaggattgaggaagtgcagctgctgctggcattacagcaacagctgcgtggcccgcactga

SEQ ID NO: 171581 - DNA, 1386 bp, Enterobacter cloacae
atgaaatggatgaatgcggtagtgtgtaccgcgctgctggcgctttgcggcccggcactttgcgacgagggacaaacggaatcgccacgggactatgcctttggtcgttcactcgatacgtcagccccttcccagtggtatcgggtcatgctcccgctcgccgtttatgaacagagcacgtcaccagaactgcatgatgttcgcgtctttaatcagtcgggcgagccggtgccttttagcctggtcaccgccacgcgtccacaggcgaccccgcaatctacggcgcttcgcctcttccctctggacgcgtcgccgtttgcgccttcgcgagacgccggtgatagcgataaggtcctgctccgttcccgcaacggcgtggagattgtgctggaagggcaaaacacggccgcctcagggcaacattacctcctgacgctgccggagcagaacgcaggggagattgtcctgtcccagcttcagctgctctggattgctccccggacgccgtggcagggaaccgcgtcggtctattacagcgaggatcttaagcgttggtttagcctgcgtgaggatatgcccttgctggatgtcgtcagcggtcaggatcgtcttaagctcgatcggatcgatactgacatggtgctgtctcccgatgcgaaccgctatctgctggtggtgctgaactctgaacacccgagcctgacactgaccggcgtaaacgcaattagcgcaccggcgcaggccatgtctgaagaaatgagtctggaggccgaggcggaaccgttatcggcacgcgaagcgcaatggcactggacacatccgcagcccctgagcgcggtcagtatcaccctgaatggtgacggtgtccttcccgtggaaattgcctggcggagtacggaaaaagacacatggcaccccctgaagaaagaggtcctttaccgtctggaggggaaaacatctgcaccggtttcgctcaacggcgggctggtccaggcggtgaaaatcacgacgctgaatgcgcgtctgccggaaaacctgccggtcgtgacggggcatcgcgaccgctatgacctcgtgttcaacgcgcagggaaaagcgccgtacgtgctcgcctggggcaacggagcagcaaagcctgccagcgtggagcccgacatgctgatccctgccgacctgcgcaaaacctatgatctggcaaatctgccgcaggctgacattcaggataatgtcgcattaggcggcgaggggcgtttaaccgccacgtccgcagccgagcgggagagcaggatgaacacgctactggtctggggcgtgctgattgcgggtgtcgttctgctggcgggcatggcctggcgcatctggcgagagacgcagcgtaaggcataa

SEQ ID NO: 171582 - DNA, 1206 bp, Enterobacter cloacae
atgttcaaccgcgcccttattctgcccgccatcgcgatggcggcattgttctctttcccgctcttcgccagcgcagagaatcacgccccccttgagcgctggcgtagctatgctggcgtgacctgggataacccgcaggacgggcaaacgccgacgacgtttaccggctcggtgaatgcgcccattgcaggtatccattttgatgccagcgaccgggcctttgtcagtacgccccggctggtttccgccgcagcccccgccacgttgagtattctggacaccacgtcgcagtccggccctgcccgcctgacggcgtttccgtccagcgagggcaatgcggtgaacaccgatcccgctcacagcctgcgcaacgtgctcggtttttatattgaccgtaaaaacggctggctatgggcgctggacatggggttcgtcgcgggagaagcccaatcgcctgcggggtcgcagaagctggtggtgctggatctcaactcaggccgcaccattaaacgtatcgctctggatgacgtggcggaccgcaaagccagtttcctgaatgatgtggtggtcgatgagaaccgccgtgtcgcttatatttccgacagcggatcgcggagtgctcctgaaaaccaggtggggctgattatcgtcgatttcgctaccggtacggcccggcgcgtactcgatcgtcaccctgcgctgcagattgagcctggcgttaacgtcgtctcgcatggagcggaagtctggccaggtaaacccttactgattggtatcaatggcattgcgctctctcccgatgcgggcacgctgtactggacggtgacaaccggaacccgtgcgtatgcggtacccactgcgatactgaggcagcctgcgtcaaccaatgcgcaaatcgccgaacagatccgcgatttgggtagcgtgggaggcaataccgacggcatagtgacggatgaaaaaggcaacctctacatcaccgatgttacacgcaatggtatcgtcagatacgatcctgagacccattccatgtcgctggttgcggcaaatgaagaggtgcgctggccagacacgccggcaatccgtccgaacggggagctgatctttacctcaagtcgcctcaatgaccattttgcgggagccgttaaaccgggagaggagcgctatgatttgtggcgcttgcgtctcagtgctttacaaaaataa

SEQ ID NO: 171583 - DNA, 612 bp, Enterobacter cloacae
atgaaaacccagcaagtcgattttgcctctttatattttggtacccctgtcgccattatctccagccaaaatcctgacggttcaaccaacctgagaccgatctcgtcgtggtggatccttgatcagaatatcgtattcggccttggtaccgacggaaagtgttatgaaaatataaaggataatacgggtattgttctcaatattccggacagccgcttatggccgaatattgaagcactcgccaataaaacaggaaaagcctcactaacagaatggaagaaaaagatggggtatgtttttgaacaggataagtttagctgcgcgaattttcacaaaatgaagtcggagacagttaacgcagtgagaattaaggagtgtccgatacaaatagaagctacggtttgcgggatatcgccccttgccggttcccggggaagcctggtatccgttgatgccacgataacctgcgtgcacatttccgagacgttattaattcacaccgggaaagggttaaaatttaatgtggagaaatggcagcccttatattacctgtttcgtcactatttctctctgggcgcccggcttggtcataacttccgatgtgatgagtaa

SEQ ID NO: 171584 - DNA, 1623 bp, Enterobacter cloacae
atgataaattttacccatgagcaaaaagttgcaatagattacccatatagtatggtactgacggcttgtcctggaagtgggaaaacagcagtaatcgtagagaagattgtccgtgacttagcgggatgcaaggaatatcagggcgttattgctatatcgtatactaacaaagcaagcgatgaactgaaaaagagatgtttaaaggctacaccaaactcaaaatcaagcttttttgggacaatagataagttttatttgaccgaagtgatttatcaattcattaagcaattatggggaggagttgatgatttacatgtagttaagtttaacgagctaaattcttctgaacaagataggctttctgctttctttaatgtcgaatctatatgtgaaaagattgatgagtatgattttaaggatgttaaggaactatacgctaagggtattctaatactggagtttataccattacttgcattttatatattgtgcaactcgttatcgtgtcgccgttatatcgctaaaaaatacacctctatatatattgatgagtatcaagatgctggttttgtccaacatcttctttttcttttgcttttcgatcttggaataaaagcagttgcagttggtgatgttgaccagtccatatatttatatgcgggtaaaaactcaaaatacttaacctctttactggataaaaaaagtgggttcaccccttttaaaataactataaatcatcgctcacattcatctatagttaattatgcctctcgactattgaatgaaagctctgacttgttaattactgatgaaattcgtgtctacagaaagcttgttaatggtactcagcgtgaaatagctaagtggattgatattaatattaacaacattaaacggaaattcaatatttcaaaagaaaaagaaatagcgatacttactgcaacgaatagttctgtctctttagtatctggccttataaattctaaagcaagagcatatcttgatgatgagttatctgtgcttggcggagaagtatctcttttgttaaagagccttttaaattatcgttttaataaaataattacagcacaggctatcattgatagtttaaatcacaaggtgctagagcgaaatacaataaggaaaatgcggggtgttattagagaggttagggattctgatgatgaccaacttattccagctttgcgtaaggcaataagattattaatcagtggtgatatttcggctcgccatattgatgccattaactcaattttacacaataaaatgatgctaaataattacttgccagttggtgatgatgagttacaaataatgactttacataaagctaaaggactagagttcgactttgtttttcatttagatctttatgattggatattaccacggagagagtatataaagggttgttttgatgaggttttttcgcaatatgagcaatgcctgaatcttcattatgttggggtcactagggcaaaaaaagctgtggtattaataaattctaccgagcgtttaaattaccaggggggattaaaaaaagcgaaaccttctcagttcttgtcactaaaaggacttgaaggtctgtataaaaaaatttaa

SEQ ID NO: 171585 - DNA, 1932 bp, Enterobacter cloacae
atggcaaacatcaacttaacattagaggaaagcaaaagcctcactgttgaccgcgaattccgccaggatatcaacctgctgcgtggcgttgccattctttccgtggtgctttaccacttcgcgccggctctgctcccgggcgggtttgttggcgtggatatcttctttgtgatctctggttttctgatgacaaaaattatatccaccggcctcgaaaagcgttcgtttaatcttatagaattttacgctgcgcgttctaaacgcatcatccctgcattgcttatgctgtgtattatcatggcgctggcgaccttattctggcttccgacaaatgaataccgaaaactcggaaattatattggctatattgttatttttatatccaatataaagttaaaaaaagagtccggggattattttgccaccgactcgcatgaaaactggttcctgcatacatggtcactctcggttgaatggcagttttatttggtattaccctttatcattatggcgttatatccgttcagaaaatgggttaatactggcttatgcctgctggtactcacgctgggcgcattttggttcagcatgagtgccacagtgaatgacgctacccggttttatctgatgccctatcgcgcctgggaaatgctctgcggcggcctcgtctggtatggggcaaaccgtttaatccttcccagggcattgcgcataataatgacgctgctgggatatacgctcatcgcggcttctgttttttgcattagcactgaaagcgcctggccgggcggattaaccctcctgcccatcctcggtaccatgctggtcatctacagcaacgacagctcactgattagccttgcagaccgtaaccttcgctgggtgggtttaagttcttattcagtctatttgtggcactggcctgttgcggtgtatctcatttatgccgggcagcagcacaacggactctgggtggtcggtgccattgccctctcttttttactcggatggatctcatgggtattgattgagcaacccgccaaacgctttttaaaccagcgaagcattgccgcattctggataattctgtttagcagtgtcggggcggcctggggatatagttatctggttaaaaacgacatgattgccagccgtcctgatgcgcaggtcgatcgaatagccgccgaagcgaacaataaaaactatgccgccgacccaaaaacgcacatgagtttttacggtaccggaacaccggcagccatcattatcggcgacagccacgccgaagccgcagccacagccctcgctgcagccgccgcggatcgtggttcggtggtcggcataacctattccggttgccctacgctggctgatgccacgctgcttgaaagtaaacgctgcggcaaatttaaccgctcgctgagtgaaaaattaaaagcctacccggccaacgtcccggttgtcattgttaaccgcctgactcactatgctgagcaaaagcaggtgaaattcaacacaggctccctggacgataaagactatttacagcagtatgcggcgtccatcgtaaagatggcctgtacgcttaatcgcgaacatccggtggtgctggtcaatccggttcccgaaatggatgtaaacgtgcctcgtacgctctcccatcgcttaatgacgtctaaaaaagcgcaggatatctccattcctctggcggagtatcaaagtcgaaacagcgcaatactgcatgcgcaatctcaggcagcaaaaacctgcggcgtgagggtactggaccctacgccttttctgtgcagcgcagggcggtgtatgggaagcaaaaaccttgaaccgcactatttcgacgataaccatctcagcgagacgggcaataaagcgcttgtgccaatgtttcgtcagattttcactcaacgcccctga

SEQ ID NO: 171586 - DNA, 1671 bp, Enterobacter cloacae
atggggcgatggataagcgggttaatgctgttgtggtgtggctatggcgcggcggtgtgcccggtgtggtcgcaggcaaaagcggaaaaagagatcgcgtcgttaagcgcgcaaatcaaacgctgggatgacgcttactggaagcagggcgtgagcgaggttaatgacgacgtttatgaccagctgaacgcccgcttaacccagtggcagcgctgttttggcaacgatatttctgcaaacacccttcctgcgctgacgggaagcgtgacacatcctgttgcgcatacgggggttcgtaaagttgccagcaaagacgcgctgactcagtggatgcacggccgaacctctctctggatgcagccaaaagtcgacggcgtggcagtgacgctggtgtatcgcaacggaatcctcgctcaggccatcagccgtggcaatggacttaaaggtgaggactggacggcacaagtgcgtttgatcccgtccgtgcctaagtacgtatccggggagctggcaaacagcgtcttacagggggagcttttctggttgcgtgagggtcatgttcagcggcagatgggcggaatgaatgcccgtgcaaaggtagcgggcgcgatgatgcgacaaaaggacaatgcgcctctgaaccagattggcgtttttatctgggcctggccggacgggccgcagatgatgcagaacgcgctgacagcgctgtcgcaggcaggatttaccctgacggcgcgctacacggtgcccgtacagacggttgaagctgttgaaaagcagcgtctggcctggcaaaacgcggcattaccctttgccacggacggcattgtggttcggtcttcggatgttccccctggcgatagctggctacccggcgaaggtaactgggttgtggcatggaagtattctcctgccgcccaggtcgcggaagtgagagatattcgttttaccgttgggcgaacgggcaaaatctccgtagtggcaacgctggaagcggtgcaactggatgataagcaggtgcagcgggtgagtctgggatcggtcgcgcgctggcaaaggctggatattgctcccggcgatcagatacaggtgagccttgccgggcaggggatcccccggtttgataaggttgtctggcgtgggacggaccgacaaaagccggaaccgcccgccacgcgctttcattccctgagctgcttttatgcttcgcctgaatgtatggagcagttctttgccaggctgacatggcttagttcaaagcaggtgttaaacattgaagggttaggcgagtcaggctggcgcacgctctggcaggcgcatcagtttgagcatctcttttcatggctgttattaactcaggcgcaactgcaggctacaccagggttttcctcagcgcgcgggctggcgctctggcatcagtttaatctggtgcgtgagcagccgtttatccgctggctcatggcgttgggtgttccgttgacgcaggcttcgcttaaggcaatgggagacgtaacgtggcaaaagctgagcggacgtaacgcaaaggactggcaaaccttgccgggaacgggcgaggagaaggcgcgaaaaattgtcgcattcattcacgaccccggcgttgctggcctggctttgtggctcggccagcagggcgtaccaggattttag

SEQ ID NO: 171587 - DNA, 159 bp, Enterobacter cloacae
atgctttgttccttgcattccttttctccagtcaccattttcaaggtcgccatcaacgacgaagatgatttccgccggatatgcctttggcgaattctgagctcgagatacattatccaatttattgttaccagtttctgctggctggataatctgtaa

SEQ ID NO: 171588 - DNA, 540 bp, Enterobacter cloacae
atggataacggctccccgtggggagacaccaccggcacctggacggcgctggagctgtggctgatgcgccagggtatccgggtggggcactcccggccgtatcatccgcagacgcagggcaagctggagcgttttcaccgcagcctgaaggcggaagtgctgcaggggaagtggttcgcggacagcggtgaactgcagcgcgccttcgaccactggcggacggtctataaccttgaacggccgcatgaggcgctggatatggcggtaccgggctcgcggtatcagccgtcatcgcgacggtacagcggcaacacaacgcccccggaatacgacgagggcgtgatggtcaggaaagtggatatcagcggaaagctgagcgtgaaaggggtaagtctgagcacgggtaaagcgttcaggggagaacgggtcggactgaaggagacgcaggaggatggctgctatgaagtgtggtggtacagcacaaaagtgggggtgatcgacctgaagaaaaagtcgatcaccatgggtaaaggatgttaa

SEQ ID NO: 171589 - DNA, 318 bp, Enterobacter cloacae
atgaagtgcaggacatggccgccccgcttacctatatatggttttatcagcgtgttagaaatcgcgggctgtgggattacaaacaaaaaaaataaattatgggccgactacggcaacttccattatggggccgtaggctatgcagccggcatacccgcagaaattttacatattgccgctggcgcagctcaggaagtggcaaaaacatttctacccgtctgggggcatttttactccgacgcgccatttggtgacgacccgcgagatcagttctggataaaacagggtatagattatgttaagcaacaccactattag

SEQ ID NO: 171590 - DNA, 249 bp, Enterobacter cloacae
atgtcagtcacgaacggaacggatgttgacatcgtcaaacagcttatctccattcttgagcagcaggggaagcctatatctgaagtacaaaaagagggcattcaatctgcagttgtagcagcaagcgaaggtgatggaaaacaggcaaaatcgttactggcaaaagtatgtggcccggcctgggaatcggtacagcctgttatgtggccgatcgttggagagttagtgaaaagaaggcttggtctttaa

SEQ ID NO: 171591 - DNA, 423 bp, Enterobacter cloacae
atggaaagggtattttacagtgccagccagggtggattttatttaggcggtgataaagcactttatgaagcagccggaacctggccggatgatgcgatggaaatcagccagcgctggtatgaaattctcctggatggccagtcaaaaggaagtgaaataaccgtcaatgattatggtcagcccgtactgacaaaacctgtcattgatcatgttgcggtggctgagtctgaaagattgcagcgcatcaatgaagcggctgaagccatcgccccgcttcaggatgccgccgatctggggattgccactgatgccgaagaaaaggcgctttccagctggaagctttatcgggtgatgctgaacaggctggatgtcagcaccgcgccggacatcgaatggccggagagtcctcaagatgtggcgtga

SEQ ID NO: 171592 - DNA, 339 bp, Enterobacter cloacae
atgcggaaagtttcaatcaacggcgcggtttttatcttcatggccagaggtgaaaagcttaaggcttctgactggctaccctccaacggacttccagacagcaaatatgttttatggccgcgcggggatgggtgggatgtgcgatatttaattttcgttgatatgggatcggagtggctgccaatttcagaaacactgtttgccgatgaggcggaagcatggcaaacagcatttgagcactggatgaatcgaaataaaaaagcctcgccgcctaaaacccatgacaattaccagtcagagtttcccttctgtcaccttgaggccaacaatttcttttga

SEQ ID NO: 171593 - DNA, 684 bp, Enterobacter cloacae
gtgaccgtcaaatttgccattactgatgaaaaccctatttttcggcggggactgtacgccattattgtggatcagctggcaactaacctgagtcttcactcgctttcctttacgttggcgggggaagcggatgcgacatcagccctggtggagatgctcgcgcaagaaacgcctgacattttgctgctgggctacaacctgcgcacatcgcaggggccacatcctgcctgcggaatggacggtctggcgctgctgaagtggatcacccgtcaatatccgctgctgaaggttattatggtttccccctacagcaacccacagctgattcgcgcggcgctgaaagcgggcgcccacggctacattacccgcaatgtcagtgaaaagcggctcattcaggccctgattaccgtggctggcggggagatgtatattgagcgctcaacaatgaacgcctttttccagtcaggaaagcagagcgcagacgagctgtcgccgcgtgagatggatgtgctgcgtctgctgtgcagagggttaccgctggtggcaatcgcgaggcagatgcatctgagcatcaaaaccgtcagcgcacataagctccgggcgatggagaaattacatgtcgccagcgactgccatctttattgtctgctcaccacaacccggatgtttgatatcgccatctga

SEQ ID NO: 171594 - DNA, 2025 bp, Enterobacter cloacae
atgaaaaaaagtattctctcactgttaattttcgcagcagtaaccagctctgcgtatgctgaagcagcgacaaaggtagagttcgctcaggagggcgtcacgtatacggctatcgtcgtaaaacttaagcccggcaagcccctgctgaaagctacaaacaccgccaccacgacggcgtcagatgagctcacgctcggcgatccctctttagtggcgaataaaatgtttcgctccaataaacttcgtagcacccagtcggatgaattaactaaactggatgctacctacgggtttgatcgctatatgcggatagatattcctgaaaacaaaagtcaggataaagcctttattaaccacgcgattgccgagctggaacaaaatccaaaagttgaattagtgtatgcggaagccatgccggtttcgctggatgaatatcaacatgataataccacgccgtcgcttttacgccagtccgccggaaatgcgacgctgaccgccactgccgttcctgatttccgtaacctgcaggattatttaaaatcctctgcggaaaaacgcccgggttattatatgggtggagttaaccgcgacggcgttagcggttatgccggtagcgatgggactggcgttaccattatctccaccgaaaactgcgcctggaacaccagccacgttaacttaccggcgatggccctgagccagggcgaccgcacctggaaacccggctgtggcgatcatgactcctcttccgtggggattatggcagggaaagatatcggcagcggtattcgcggctttgcctggaacagtaaggtgggttatgccgcctggcagacgaacaatctttataacatgatccccctgctgaaagcgggcgacgtggtgcaggtgggtatgcaggccgaaagcgccaaacctgctggctgcacgaaagagtgttataacccgtgggaggcgcagccagccttctttgatatcactaaggcgctgaccgataaaggggtatatgtcatcgctgccgcaggtaacggtggcctcagccttgacgatccggcttacaacggtaaatttgatctgtcagtgaaggattccggcgcgattattgttggcgcaatgtgtgcgagtgatggcaaaaaagcgtacttcagcagctatggctcacgcgtgaccagcgcggcgtggggctgctgggacgtggtgactaccggcagtggcgatttgtacagagacggcgtcaataactacacccgttcatttgccggtacgtcctccgctaaccccatcattgcaggtgtggtggcgagcctgtcagggattgcaaaagcgcacgggattaccgttacgccgaagcagatgcgtcagattctgcaggaaaccgggacgccgctggcaaacggggattcggctaagattggcaccttcccggatatggagcgtgcggttgcccgtattatggcgttgaaagacggcggcacgcctgccgctccggcgccaactgccgccgcgggagcggattatacgatggtctccccgacgagtggcgtaagtacctatccgctggacggcagcaagagcctgaatgccgtatcctttaactggagcgtgacgaaaggggcggaaaccttctcgctggaagaaaaactgaacggcacgctggtcaagagtgtggatagcgcgcatgcctatgccgtcattcctgctaacagcgagggagaggcgacctacaccctgaccaccaccggcgcggatgggcgtaccgcgaccgacagcatgatcattaaggtcagtaagccagcggtgccgccgaaggacgatacgccggcgaaagatgacacaccggtaaaacctgcggcgccggcctacaacgccaaaattgcctatccaaccaaatgcaccaaagtctcgtacgacggtaaaatctggtttaaccagtggtatgtcaacccgggccaggaaacgccgggaaccggcggccagtggggcgcatggcgagaacagggaagtgctggaaacagctgtaaataa

SEQ ID NO: 171595 - DNA, 846 bp, Enterobacter cloacae
gtgtggaacaaacgcgtaggcgctgcacttttccctcttttgcaatgccttgaagtaaccttaagaaacggcattcataatgcagcttctgctcactttagcaatcctgcttggtttgatcctttaacgaaactcgcgggtcatgattattttagttcttccataacccaatatcctcatttgtcaaacgatttctatcgaaaaaatattagtagtggtagtcgtaagaataaaaagatctggacatcacgccatgaaaacatgctgaagcaagcaaaagacaagttgagtaaaggtcataagcctcaacatgcagatgcaattgtcgcagaattgatgttaggtttctgggttggtatgtttgagaaaaactatcatgatctcaatacatctaatagattatggccacatttagagtcgatggttttccccaatttattgccatcagaccgccggcatggcgacatccaaaataaattattacctatcaaggagttgcgaaatagagttgcacaccatgaacctatttggaagcacgtctcagtaggaaatagtgtcgccgcaatcaaaatgcttacatcaattatcgacgatattgttttcctcatcaatggaatcagccgtgaacgagcagaaatgctgtatgagtcaggcatcgaaggtacagctcgagcaatttgccgtaaagaatcgctggatttttacctatccggacggatatcaaaggaagtatctttaagacgtttgaaacgggatctgctccgccatatagaggggaaaagccttttccctttgtctttctgtaacgcaagcaaagaaacggtcattctcaacctgaatgtttaa

SEQ ID NO: 171596 - DNA, 4740 bp, Enterobacter cloacae
atggaaaatagaaaaaaagtgcttgcagtttgtatagcactcgcactgagcagtaaagtgtatgctgaagagctcagtgatacccgcaagtcatgcccgcaaaataccagcagcctcaccaaatcccaaaaagataagttaccggatgaatgtaaacgcgaacagtgggggtgggctgcgggggggattgccgccctgcttaccggcgttgcagtcggcgttcacaacagcggtggcgatggcgatcatacatcgtcaacgcccgcagataatgacaatgacgatggcgatcatacgccgccaacgcccccggatgatggcaatgacgacggcgatcatacaccgccaacgccaccggatgataacaatgacgacggtactgatgacggtggcgatgtcaccccaccggacaccagcgtaacaacttataataacggcgttaccctggaccgcggcgcgaaaaccgtgacgtttgatactgtcacccttaatggcgagagttggcaaaacgttacattcagctatgtgcaggatggtaacaactacatccttaccgcaccggatggccgcacgcttattattaatcagaaatatatcaccagcgacaacaatgctgtcatggccgggacacagagcggcaccggctatgtctggaaatatgacagccaggggcgcttctggtttgccactgccgacacaacgattattgagggtaatggtcaaaccaacacccttgacaacagtaccacagccagcgacgccaacagcatcggcacgctgatttcaggtgataagacggaaaatagtcttaacggtgatattaccgctggcgagagcgccatcggcgtcgtcatcagcggtgatgaaacgaacaccaccatcaacggaaatatttacgcctccggcggcgcaacagggctgtttgtttccggcaatgacgcatccgtgaccaacaaaggtaccattaccgccgtcgacaccggctccgtcggcgtggcgataggcggtaaccatgccacgttcagcaatgtcggcaacatcgacagttccctcagcggcaccggggtcagcattaccggtgacgatgcgacggtacggcttgacggcgcggttaacgtgcatgttgagcagaataaggacggcatttaccagggcgcaacgggcgtcagcattaccggcgatcgttctgacaccaccattaccggcaatatcacgctcaccaacacggacacgactaactcagcgacgggattgttaaccggtctggacgtcaccggtgacaacaataacgtcaccctggacggcacgctggcgctcaatctgacctcttcaagacaaaacactttctgggcgcaaggtattgccgtgagcggcacgggtaatcatgtacagctcaaaagcggtgtggcgataaatgccacattattggattacgcggaccccattttgagagctctcagtatcacgggagataatactgtcagcgtgagcggcaactctacactatctacgaatgaaggggcgtcccagacgccggtatcgctggcgtacgtcgagggcgggggaacactggttcttaataccgattccgtactggatatcaacatcaagcctaaccctgctctgatcgattactatggctctctgtatgccactggcagcggcagcacgattgataataaggggataatcaatgccacaggattcccaactgccatgagtgccgcaaatggcgcagtggtcagcaacagcggcgccataaatgccgcgccatcgtctgatgcgttccggtcagcgctgctcacggcaaatggcgccagcagcatggcgctcaaccgtgctggcggtgagatcaacatcctttcaaccagcacgcccttttcctctgggggagtcgctattttccctttaatgtggatcaagaatacggcatacgccctgctggcatacaatggtggagcggtagaaaaccaggcggacgccaccattacccttcagggggcagggctgcacggcgtggcggcatcaatgggaacggccagcaatgccggcaccatcaatatcgatggtttcctccctgtgctggatgaaaacggtaaggtgacgaataaaacgtttgtagcccccgacgggaacaaacttttcaccatgggcgcgggggtcattgccggctccaccgacagtggaaggggccatgctaccggtatcaacacgggcaccatcaacgtcaataacgaaggcttcggcatgctggcgctgaacggcggcaccgtcaccaatcagggcaccattaacctgaccgccgacgcgaatgtcgttaaatctgccgataatcagctcatcggtatgggcgtgatgaacggaggtctggccatcaatgaccagaccggggtgattaatatcaatgccgattatggccaggcgttctacaacgacggcactggcttcatcgtgaattacggcaccatctgtacgaagggtaactgccaggacagtgagacctacaacccaacggataacgtggtctcacctggatacagagccggcctgctatcggaaaaagaccagaccgtgaccttgagcgaggatgtcgtcatcgccggcgccgtgggtaatgacggtacggtgaacgggtcgaatattaatgtggccggcgcctctgccagcctgaataacagcgcgaccggggtcatcaacgccagcgtgaatctcaaaagcgtaactgataccgccagcagtaatcagggcgtcattgataaggtcaccttcggcgctgccgccgtatttaacaatagcggcacggtaaatgatcttgccatgaccagcggcgcgaccgcgaataacctgagcggtggagtcatcagcgtctcaactgaaatgtggaaaggcacgctcaacaactggggtgaagtggatggcacgatggatatcgacagtagcgcattcaccttctataacgctggtaccttcaacggtaaggtgaaaacagcttatgctaaaggcggtatggtggtgaatgacggcgtcatcaataccagcggcaataacacggtcgccatgtccgcctccggcagcgcaaaaatggttaacaatggtaccctcaacctcggcaccaaaggcaccacagacaccggtatggtcggaatgcagctggagtcgaatgccaccagctcggctgtggtggaaaacaacggcaccatcaacatttatgcgaataattcgtgggccttcagccagcttggcagtgacggtcatatcgtcaacaacggcacggtctatattgaggacggcgtcacaggctcagggcttatcaaacagagcgataaaaccattgagggaagcggcgaaggcggcaacggtacagaaacacactatgtggacttcaccacgccagtggcgcctggctcagacagcagcagtacggtgaaaaactccctggcgggctatgtggtcggcaccaacgctgatggcagcgccggcaagctgatggtcaacaacgccagtctgaacggcgtgggcatcaacaccgggtttacctctggcaccgccgcgacaacggtgacctttgacaacgtggttcaggggagcaacctgtccgacgccggtaacatcacctcaacctctgtggtgtggagcgcgcagggcagcacggacaccagcggtaacgttgacgtcaccatgaccaaaaacgactacgcggcagtcgccaccgacagcgccgttagcaatgttgcctcggcgctggatgcgggttacaccaacaatgagctttacaccagccttaacgtgagcaccacggcagagcttaacagcgcgctgaaacaaatcagcggcagccaggctaacagtgcattcaatcaagccagaatgctcagtaaccgcttcgacatgctggccgatgccgcgccggtactgggcaacggccttgcgatgaacctggtcgcgaaagacgacccgcgtgcggagctgggtaaaaaaacccgctacgacatgctggcgttgcgccagaagctggaattaacggataaccagtcactgtcgctggagtatggtatcgcccgcgtagagggtaataacagttcgctggcgggagacaacaacgtaaccggcggttacagccagttctttggtctgaagcacgagatggctttcgatgatggcctgagctggaataacgacctgcgctacgacgtgcacaccctcgacagcaaccgcgcggtctcgtatggcagcttgagcaaatctgccgacagcagcctgcgtcaacagtaccttgagctgcgcagcagtggtgcgaagcagtttgcgctgagcgaagggctgaccgtcacgccgtatgcaggggtgaaactgcgtcatacactggaagacggttacagcgagcgcaatgccggtgattttaacctgaagatgaacagcgggagcgaaacagcggtggacgggattgccgggctgaagctgaactacgcgggcaaaaacggctgggagacaatggccacgctggaaggggggccgaacctgagttacgcgaaaagccagcgtagcgcaagcctgcagggcgcgggcggccagcagtttaacgtcgacgatggtcagaaaggcagcggtatgaacagccttgcgacagtgggcgtgaaatacagcggtaaagagagtgcgatgaacctggaagctttccactggaaagaggatgggatcagcgacaaggggttgatgatgaaatataaccttagcttctaa

SEQ ID NO: 171597 - DNA, 456 bp, Enterobacter cloacae
gtgaatatcctgttggagcgctggtgcgaaagccgtccctggatccgcggtctctgctggtgtctgagcactttcctggcagggctcgctgcgtggggcaccctgctcagaccggtagagagacagtgtgctgaacgacaaagccagctgatccaggaggcgaggaccaacgcatcgttatggcctgtcgtcagcacggtgccgctgcgcacagaaaccgtgcaaacaccagaaatgaagccgttttcgccgcttgattttcagggggatgagacgacgctggttcactggaagccgctgcaaaacggaggagagctgacgctggaggcggagtggcaggccattccagggcttttttcccggctggcgcagcgggatgtcgagattgcggctttcgcaattgcacctgaaggtaaggcgttacgcctgcggctggagctggatcatgcgaaatag

SEQ ID NO: 171598 - DNA, 486 bp, Enterobacter cloacae
atgagcatcacgaattttctgccgtggcagcagcagcggcgcgcgcgatgcctgcgtttctggggagcaacgtttgtctgcacggcgctgttgatggtcacgaccatcgcctgtttgcggatgaccccgcttttgcggctgcacgccctgcaaacggatctgacggggatactgtccgtgcagcacggcctcgttgctcgccagagactcgcgacacccgtgcaaagccccgcacgccagcggcgcgcatggcagccggtgctggagtcgctgtccgccacccttcctgcgcaggtctggctgacggaactgcgctaccagcctcccgctctgatgtttaccgggtttgccaccaccctgccggccctgtctgcgctgcgtgatgcgcttgggcaactcccgggctttacgcccgggacagcgggtgagcttcggcaggatagccaggggcgctggtcgttcacctttcatcttagcgaggggtaa

SEQ ID NO: 171599 - DNA, 183 bp, Enterobacter cloacae
atgctcaagttcgactccatacttgccgatagccagccacagaaactcattcattgtaaaggtgctactgactttaccctaaataattcgagttgtatgaaggcggcgacgcagcgaatcctcaggagcgtacatcactacgtgagtgaggtgagcgaggacaaactggccttgccagtttga

SEQ ID NO: 171600 - DNA, 396 bp, Enterobacter cloacae
gtgaaaggggcgttgtgggcgttatgcagcgtgctgttagtcagcgccgcgcagctgctcctgcgaagcgccatgcaggcgctaccctctgtaggcgaggcgttcgcatttctccaggccctctggcatttctcgtccggtaccggtgcgctgctgctggggttaacggggtatgtcgcctctatgggctgctggtatctggcgctgcaccgtatggcgctcagcaaagcgtatgccttgctgagcctcagctatatcctggtgtggggcgcggcgatcctgttgcccggctgggacgaacatttttcctggcgtgggctggtgggtgtcgggttgattatactgggcgtgctggtgatatttcggccaacgcatcgtggatcaaaccggccctga

SEQ ID NO: 171601 - DNA, 528 bp, Enterobacter cloacae
atgaccttaagatcgcttatttcaatactctcgttaagttttgcctcgttttccgccttcagttttcaactgccggcatcaatgctatcgatgaacaacgagcttgcggcagcgcctgcgaaatcggcgctgcttcacccggaaacgggtccgctgcgctcacgtattctcgatcaataccagaagtggaaaggcacacagtatcagtggggcggcaccacgcatcgcggggtggattgctccgcgctgatgcagcatctgttcagcgatgccgtacatctcgacctgccgcgcacgacaggtgagcagatccatcgcggcgtgcaggtggcgcaataccgccttcaggtcggggatctggtgttcttccagaccggcccgaaccgtaagcacgtcggcgtatacattggcgacagccagtttattcatgcctcaagcagccagggcgtgacggtgtccaccctgaacgatagctactggcaagcgcactatattactgcccgccgggttgcaggcagtgcggcctga

SEQ ID NO: 171602 - DNA, 399 bp, Enterobacter cloacae
atgaatattaaaaatttacctggcaaaatgaccacggaagaactggcgctaattttgggggttgccaggcaaacggttaatcgctggatacgccagcaggcgtggaaaaccgaagggctcaacggtgtgaaaggcggtcgggcgaggcttattcatgttgatgcacgcgtgaaagactacattaagcgcctcccggcgatccggagccgtcaggcggtttaccatctcgcggaggccaccaccgcatatcatagctccccgacaagcctgcgcccgggcattattgagacgctggagaatatgactgagctggagcagaagcgtctggaagactttttgaaacgcgaagggatacgcggctttcttacgcgcctggatattgctgaacacaatgcataa

SEQ ID NO: 171603 - DNA, 609 bp, Enterobacter cloacae
atgcaagaggtaatgacaagaattgagttaagtggcgtgctagctaagacatatgggaaggttcatcaccgcctggttcgcaccactgctgaagccattaatgcacttgcaaaaacaatcaatggtttcgagaaattcttaaacactagcaaagcccgagggctgacatatgctgtttatagagataaaaagaatattggcgttgatgatttcggatttcccgtcaccggcgaagtgatccggattgtacctgttgtgataggaagtaaaaaagctggccttttacagaccatattgggggccgtgcttattactgctgctgtgttgactggccccggcggtattggcgctgctttcgctgctggtggattgacggggtttgctgcagctactggcgcctcgttggtcctcggtggggttattcagcttctttcaccacagccatcaggcatagctagcaaacaaagcgcagataaccgtgcatcgtatgcgtttggcggggtgacaaataccgccgcacagggttacccggttccgctcctttacggccgccggcgaatcggcggagcgattatttccgccgggatttatgtcgaagatcagcagtag

SEQ ID NO: 171604 - DNA, 1989 bp, Enterobacter cloacae
atgtctgttgagttaaaagtatttggtggtgcttacttcccaaaagataaagcattaaaaaaacacccagatttaaaaccgcttgcaactgcagttaatgcggccacaaaagccatcgccgaagccattattttcggcaagctggcggcagaacaccctgagcatattgatgattattttaaggtgaaaatatgggaacaccgcgaaggtcttccctgccctgcttttgacgttttctcatccgagtttttcgaaagtgtggctgtatggaatgtgaattctggcgaaccagctgcggcgccacagcaagaagctgatgcaaaggaagaatgggaggacaacaagactcaggaagaaattaaaatcgttgcacagctcgatctggcatcccgcgcagcttgtctggcactgttcggcccggtccctggaatcacttcagcgcagtacggacagatcgtcgatctgaagaatgatgatgaacccagctttgctcgcgagcttgcagaagcactggcaaaagagcgccgcgcgcttgagctggcaccggaacgccaggagcaattgctctcctggttacgtgagaacaccaaagaatctgcgcagtggccggatatcaaaaagcagatcgctaaatggatcgataccccagttgataagcgacctcagtctgtcaccaccacagaagaaaaccgtacagacaccggcgccacgttgggtggtggaaacaagacagaccgcagcccggatctggttcataacctctctacgctgcgtatcgaagtggctgttgccattctcagcatgtacgacgagatagacatttactggatcccgaataaatacatgattccagcgaaagccatggccgaagcagaacaggatccccgcttcacagcatggtggaaaaaacttcgtagcaccccaggcattctggactattcccgcgcggccataatcgctttgattaaatccgccccagaagacctctggatcgatcctgtcgcattacgtgcgtatatcaatcgcgagctggttgaatgtgaccatgcgaaccctgaccagaaaacggtagagatcgcctgcagccctaaacctcgcactaatgctgagaaaaaagaaaatgatgaaaccgaatcgactgtaccgggcgaaactgagctaccagcagtttgcccgggcaaagctgcgcagctcgacaaagaacttaacgaggtatttaaacaggatggctgctcacaacacaccgatgcaataatcgggcgcgaacttgctgccgaacgaggtgagtttgtcgagggcataagcaatgctacagatccaaaatgggttgatggcagtgcacaacctaaagttcataacctgggcggcggcgtcttctctgtcgatgcattgttaaacacagccccctcaaatgagggcgaaaaacaggaagtaccgcccgcgctaagtgatcgcgagattgaaatcgcccatgcattaaacgagctgatgtccgggcgcacaaacatcgttgaccaggatgatatcgaaaagctcattaccgccaccggtaacaacatcgagcatattttcccgttactgattgcagatatcaccacgactgaattctgtctgtcgcctgatttcagcgatgaagaagtacaggatgttgccactacgatacttgaaaagtggtcagacgatattggcgttcgccagaaaatagcgcttgatgcgatcgtggaataccgcagcccggcaccaccaaaatctgtcgtgctcgatccgccggccgttactgcaaatccgattgccgcccccgatccagcacctgaaacaaacgcgccgctttcgtctgtgacctacctgcagcagctgaccattgcagcgcttcagggcctatgttccaacccagcattttgcaatcagtatgaagaattaccggctatggccgccgggcttgcccgcagcgttatcaaccatcaggaaggctcctgtgcgtctgattaa

SEQ ID NO: 171605 - DNA, 213 bp, Enterobacter cloacae
atgactgatttaccgaaatgccctgtatgcggcatgcctcctgcactgagggtccgcagccggggaatgaactggggttctgcacaggtccgctgttcgaacggctgtcctggtatacgcgctgggttcgcgtttccgccagatcacgagacagaagcgcgtaaaaccctgtgtgaaaaatggaaaaagctggtggaggataaagcccaatga

SEQ ID NO: 171606 - DNA, 216 bp, Enterobacter cloacae
atgagcaaatcaccaatgaaattcatggtccgtgcgtggaataaagagctcaaaaatccagcgtggggcatgggtaaccttaagcatcgcaaagcttgcgcccgtaattgggctgctgtaactgccgctgatgctgagtcatggcatgtggtgattgattgtcaggacgcggcagacgaagccgtagcagaagacgtaagcaactgggacgcctaa

SEQ ID NO: 171607 - DNA, 321 bp, Enterobacter cloacae
atgtcgaatacatctccagcgctcgctaacacagaaacccctatgacgcttgccagtctttgccgcttagatggcaaataccgcgcaatcgaaatctcgccgggctttgctgtcgtagacataacccgcgcccccctgtcgggtgatactgttgcgttctcgttctgcggcggcatgcagtttgcgaaagtgcagggcgagtcattaattaccccagatggtgatgtgatagaaggtgacgcacgggacgatgtgcgggtggcaggagtggttatctttttgattaaagaaatcaacaacgacgaactgccaacaatttag

SEQ ID NO: 171608 - DNA, 198 bp, Enterobacter cloacae
atgaaagaaggttactattggatacagcacaatggtgtgattcaggtggcttactacagcaacgacactactgatgatctcgaatcaggacagataatctgtggtgtatggcatctgaccattggggacgacatttgtcacaacggtgaggctgaagtgttgagcgggccgttaaatccgccaatatacaaagcataa

SEQ ID NO: 171609 - DNA, 351 bp, Enterobacter cloacae
atgacgaaagcaacatttacaggctgtcagttcatcaataatggaataggtattgttgcttctggtgatgtacaacttgaggcgcacgacactttgtttcagggaaacggtaaggcagtgctaatcgactcaggtattccagaagaattagcgcccctttttaaagaaggcgtagatatcgataaagttcgccaactaatagaagagactcgccatacgccagaaccacagccagaaaagattgcccaaaaactttggaaatccggcttaagttcttggatagctaacggcgccaacacggtaacagtagccaccgctatcattgagtttgttaagtttcttgcacgataa

SEQ ID NO: 171610 - DNA, 462 bp, Enterobacter cloacae
atgcaacggtttgtggattctataagaaaagcgattcgagaccataactggtatggagcaattttcgtagcgctaaccatgcctgatatctgtagcgcgattgaaaacccgtatgaagcaagagtgggtgtaagatatcgagattggttcaacagatatttacgtgaaaaatataagtataagtatgtagaatttactgcggaagattgttatcaatttcgctgtaaatgtctacatcaagggatagctagaagggatggatttgaaaaatttcatttaagtcagacttcaagtggttccgttatccatatgaattcattcgatggagttatccagatacaagttagtaaattttgcgaggatatttgccaatccgtagagcaatggatgttggatatgaagccaaacccagccattactctcagaatgcaagaattgctcgaaattcatttttataattga

SEQ ID NO: 171611 - DNA, 828 bp, Enterobacter cloacae
atgggtttatatcattacacggatttgcatggattgaaggggatcgtttcccagagcgaactgtgggcgacaaatatatttttcttgaacgataaagaggaatcacaccatggctgtcgttgttttaaaaatacagtgtcgcaattgggttctgatgttattcctgaaaacagaaaacgcactctgctaaagtccataagtgattatgagcaaagcaggatgaagggcaatttttccccagaacgacatgtgtatagcatctcctttagtaaaaagaaaaacaaagacaaattgagccagtggcgtggttatggcaataagcaaggtgtatgtattgaattcgatcaagataaattgactgattttttaaatcaaacggaaatgaactgtcttgcagatgaggttatctatactactgaaaaagacacagtggccatgagtaaaaaactaaaagatttcttcatagctcaagaactgaatctcttagagtcgaatgaccactatacaataatggctctttcctatcattatctatcgcaaatgatacctttttttaaaaatgatgctttttcagaagaagacgaatttcgatacgtatttacaccgaggcatgttttacctaaagtggagtttagagtaaatgataatgggttaataccttacattgttttgggcggaaaagacggtgctaaattaccaattttaagtgtggtaattggtcctgttaaagattatgaattcgttcgagaaggtgtgaggatgttattggatgcaaacggctatgagcacgtagagataactccatcagtcgttccgtacagagtatga

SEQ ID NO: 171612 - DNA, 306 bp, Enterobacter cloacae
atggctaagaacaccattaacgacaaatcaaaacaaatatcgatccgcataccacatgatgttttagataacatggagttgttgaagcaggacggcgaaagcaatgctggctttatcgtcaccgctatgcgcggggaaataatccggcgaaaggcagaaggaagcggcaaagatcctctggtgtcctccctcgatgcgctggaacgtgtcgagcaaatcgggaaaaaagccgctgctgagataggggaaattttggatgtggcccggaatgaattgcagcgacgaggtactgaaccaaaaaactag

SEQ ID NO: 171613 - DNA, 561 bp, Enterobacter cloacae
atgtcgatgaggcagcgcggtttttcactgactgaagtgctgattgccacggcggtaagcagccttttactgataagcgcatcgcgtttcttacccggcctgcagcgggcggtactactgcaatccgggcagcgagagcgggaggaagaggtctggcagcacctgtttgcgatcggcaaacagcttcagcgtgcgggatactgcgcgggaaactgtcagggacaagggctgttaatcggcaggcaagggagctgtgtcattgtgcggtgggatgccaacagtaacggcaaatgggatagcacagcatcagaaaacgacagcaccggttttcgcccggaatcgggggcgctggaaaccctgcgtggggcaacgtcgtgcgaaggaaagggatgggaaaagctcacggacccggaaagtctggcgatcacgcactttaaggtgagtaaagccgatcgcgccggttttgcgccagagctgaatattgaactggctgctcttcgtcagggtgaacagggggaaccctggcaggcgctgtacacggttacggggtacaacctgtga

SEQ ID NO: 171614 - DNA, 495 bp, Enterobacter cloacae
atgtcaacggcgcttcgccacactcccggtatgaaaaaagagaacggttttacgcttatcgaaacgctggtcgccatttcgcttgtggttgtcctcagcgcttcaggtctgtacggctgggacagctggcaacggcagcagcggctgtggcagaccgccagtcaggtgcgagattacctgctgtttctgcgcaaccatgccaaccgtcataaccgcgaccaccagattactcttcagcgggtgggcgaaaaaagctgtctgatgagttctgtcgtgcaggcctgcgagaaaggcagcccctttgtactgattccgctctggcctgaagtgaaggtgagtgaggtaacgccctctttagggttctatggattacggaatacagcgtgggcagggcggatacgcgttcaaagccaggctggagaatggctgatcattgtctcaaatggagggcgcatcaggatgtgtaaggtctcagaggaaagtccatgtcgatga

SEQ ID NO: 171615 - DNA, 252 bp, Enterobacter cloacae
atggcagaggggaagcaaaaggggaagaaaaaaatcaaaaaggccagcaagctactgacctctctctgtttatcgctcgataatttgcgagacttcgtcgcgattgatctgcattttattgccttcctggtcgcggtagctgaccagaccggtatcatcatcgacttcgggtttgccgtcagtcaggatcattcgaccgtcttttgttgccatgacgtaatcgctgctacaacccgatacggcaaaggctaa

SEQ ID NO: 171616 - DNA, 486 bp, Enterobacter cloacae
gtgaaaaagagtgccatccttccgctttatcatgcgccgcagtacgcgcagcaggtgaccgactggatctggcaggcctttggcgaggggcttccacgggaatttttccacagcatcgtggagcatagccagacgccgggggcattaccgctgacctttattgccctggaagacgaacggcttgtgggcacggtggggctctggcgctgcgatctcatcacccgacaggatctctttccgtggctggcggcgctgtacgttgacgatgcggcgcgcggcaaagggctggcggggctgcttcagcaacatgttatttcctgcgccgcgcaggcggggtatgagacgctccatctgtggtctgcctgccgtgacttctatgaacgttacggctggcagtacatgggtgatgcgctggagtaccctgataagacggtacacctttaccgttattcgctctgcgcttccgcaggcgacgcaacggagtga

SEQ ID NO: 171617 - DNA, 924 bp, Enterobacter cloacae
atgtttaatatcgtttcgcctgattatgatcatcaagccgcgcggttgttttttgaaaacagccttcacgcctcggtagattacctgatcgatttttatgagctcagggatgtaaagaaatcacccgctctgacgtggcaaatgtgcgcagcgcattatcttgccgccaaatcggctgaatccgaggagcatgaagctgcggttaaatatctgcgttatatcgagtcaattcctgcagcaaatgacattgtggtatccccgctcagttcagcagataattccttcgataaagagatgattctgaagattatccgcgatgacaaagaattggggtttggcttttgtgatgatccggtactggcagcaaccgagtctgagaaagtctataaagcgcttgatgtcattcgggagaatgtgcccgaggcttatagcgaaattaaaacgtatattcatgcgatccatctcacccaggagacagatgacggctcacgctttatgcgttccggaacaaatttttatatgtggggaatgatgtttgcgtatgcgaatgaagagcataccgtgccttattatgttgacatccttgctcacgaatgcggtcataccgcactgaatattatcaacgctttcgatgaactggtcctgaacgatccaagcgccacatttgtcgcccccctgcgtgttgataacagaccgatgatcggtatctttcacgccctgtttgtcctgtccagaatttgttatgtctttgacaggatcattcagaagggcacgagtgagtatgttgatgagtgcaaagaacgtttccgtcaggctttcaaaaagctgaccgacacgcatcagattgttaaggaacatggacagttcacgcaaatcggtcaggctatttataacgatatctgcacacgttgggatctgaaataa

SEQ ID NO: 171618 - DNA, 1146 bp, Enterobacter cloacae
atgagcatgtacggacatctttttgaacgtcaaagtcgacacattaacctctgttttctttttaactccatcggttcgacgcttcttatgcccctcgcgctgctttatcttgcggggaccagcctgagcgcaaaagagatcctatatttaggcaccatgaaattctggtctttttcactgtcctattttttagttattccattggtcagtcgatttgatgtgaaaaagatgattgtcttttctttgttctttaagttactgtcactggccgtgttatttaccggacagacttttatggtttgtatgattgtgatgctgacaaatggtctggcgtcatcttttttctcaaccgcatcaaaaatatatgtccgcgcaacatcgaaaaatatcagcgaaagcttctctgcgaggatgacactcagtaacgccggggccgctatctctccaatggttatcagcgcattggtatttttcgccgtgccgtttcgcccagccctgctcattctaatcgctttatttacgatgggtgtgctggtcgccactggcctcaaaccgtgccagcgggttcccaccccggaggtaagcgcaacaggattgaccggtctgttcagtaaagaaaccgcgacggttgccacactgagcattgttttcgccatgctttattacacatttgaaacaatcgttcccctggagttggtacaaagcgatctgaaaagcctgattgggccagtgatgctgtttaatactggcgtgattattctgggtcaaatacctgtctataaatatttcacggaaaaatttggcgtggtaaatgcactgttaattgccacagcgctctgcattgtgctgtttatcccgtggttcctgcagtgggctaaactgagcgggctgctgcttatcgtcgtgggcgtcacgtttctggagatgttttacggtgcggggatcgatacggtgattgcatctgccgactcggacaaaaaaattgcccttctggatggtgtatcaagtgtggcactttctgccggggccgcattggctgcagcaatttatggcgacccggttatgtttatcccattcgtcatgacactgtttgtactgagcttattttttgttcgaggcgagaaaactggcctgatcaggccatga

SEQ ID NO: 171619 - DNA, 351 bp, Enterobacter cloacae
gtggcaaccaacggagatgatactttgagaacggttgagatattgcaatacacactgcacaaaggcaccggagcagcttttcacgccatcatgcaggaaatcagtgtaccccttcaccaacgccacaggattgatgtcgttgcgtttggtaactcgctgcatgacccggattgctactaccttgtccgcgcctttgaaagtgctgaaagcatggctacggttcttgaaactttttacacaagtgctgactggcgtaacagtccacgtgaagacattattcgtagcatcgaaaccagcattaaaacagtgatgaatctgccatcagaaagcgtggaagggctgaggggataa

SEQ ID NO: 171620 - DNA, 261 bp, Enterobacter cloacae
atggaagccgcacaatttttggggtttagctcaaaaaatgggttagctttttataatgcggtgactctgggggcgagtgtctataacatcttcggcttagcaaggaaacctggggcctggcaattatttcgttggttgccgcgtaattactaccggaaagttgacacaatgagcaagcccaggctaacgatgaaaatcgctggatatggtgtcaaagcgaaagtgatttttgagtttctgcaactgataacagttgattaa

SEQ ID NO: 171621 - DNA, 429 bp, Enterobacter cloacae
atgattcgtaaattatttaaatggagcgtcttggtattaattacggttgttatcctttgctggttatttgtctattttattgcatccggtatcaatgaagcgaccacatacactgaaaatgattttttcaattatcactccctgactgataaagatattgaaaaggctccgcgtatatcgaacgattattactttgaatcgcaccccggcgatggatacgccccttcaaacacgatcatttttaggggggtaactggtgttgagccgttgagggcttatttgactaagttgggctataccagacagagaggcggatcgagggaggcggagatatggacgaagcctgaacagatgaatagtgatctcttttacctgcgctatgatgctgctactagtgaagcagaactagcaaaggaactgaataactga

SEQ ID NO: 171622 - DNA, 126 bp, Enterobacter cloacae
atgagcaccagagcggagataaaggatggggcgcagtttgacgttttgcgcagggggatcatttatactgaggtgcttggctgggttggcatggggcatgctcggggcaggatatgcactttgtga

SEQ ID NO: 171623 - DNA, 252 bp, Enterobacter cloacae
atgaaaaggatatttctatcattcgttatgttgctggtgggatgtagttcgactgccagtgatgatcaggatgcgaaagacgctaccgagtcattttataaatcctatctttccgcattcggtagtgatgatgccaggccttatcctgccgatgaactgcgtaaatatgtttctgctgatacgattgcctggattgatgccattcaggaaatctatgaacaagagggtgatgctgccaacttactgatttag

SEQ ID NO: 171624 - DNA, 1149 bp, Enterobacter cloacae
atgtcatgctgtggtggctggacgatcaacattgataagaaaacccaccagaaatatctcctctcctcgcacccgggcattgccgccattgccaaagagaatctcatcctgcagcgcaagggcaagagcagctattccagaatcaggctcaacgaaaacggggactgtccgtttatcgatgaaaacaagctctgcatggtacaccgtgatttaggggaagaggcgctgtcgcctacctgcagtatctatccccgcaactcaacccgctatcaggatgagacgcgacatacgatgacgctctcctgtccggaagtggtgcgacgtgtgctgtttgacccggatgccatgctgcttcaggagcaggatgagcttgtggcgcgctataaaacaaacctgattgggcagcgccagtctgcttcgcagacgcagcaggtgatccatctctttgcctggaatatcatccagtcgccatcccgtaatattgaagagaatttaatggcgctggcacagtttattctctgtcttcagcacgttaactttgatttgcataatagatttgcggaagtggaacgtttctacgacgcgttactgactgaactgcaaagcggaaaatcgctgatggattccggtaatctggcccgttcaaacgcgatgaaatatcttgcgctgtcggtaatgggaaccaacgtggcgaaagattcggcccgggacggttttattctggaagggcatcagcacattgccgcgtatctggatattgccggttcagacgacccggccgacctggaggcgaagttcgacaagattaatcagcagtggcgtacactgtgtgaggattcctgtttgtcagagccttatgtgttacgcaattatctgctgtataaactctacagcagctatttccccggcaaaaacacggcaaccatcatgcgacagttttatcgtatggtgctggactttttctacgtcaaatgcattctcagcgttaaatcgatgcagggtgaaatcgaccagcaggtggtgatgaaaaccatcgccagcctgtcagaaaagaccatgcacaattcgaccattgatgcgcgcatggactttgcaattaataaaatcaacggcggtgatgatttatcctgcctgctgttaattggataa

SEQ ID NO: 171625 - DNA, 663 bp, Enterobacter cloacae
atgttgaatattcttattcaggaagccgatcaattttttcgcagcggactacagcgtttttttatggatttctttttgcgtaattttaaacagccgatccagttcgcgacgcaatttagccatgaaaacgtcagcactgccgatattatcgtgctctccctctgtaaaggggagacgctcacctgtattccagaattacaggcccgccagaaagggatcgtgataggactggtggaagatacgctgggcgtttcggcatttaacgcctgtttccaggatattctttttattccgcgtaatgtctcgctcgatagcctgagcgagatgctgtttctcgcctggtatcgcacgcaggcgcccggttatatctggaagaaaataagctgctgtgaatgtcagtataaaatattatcaccccagcaaattcgcattatggtgaatttttaccgggggctatcggtagtgcaggtggcccgggcgctggagatgaatgataaaactgtctttacgcataaatatatgatgatgcagaaatttaatctgcgaacggattttgaactgattgcgctgattcgtaaaatggtggagaaaaagagttacccgaacctgctgcgtgactatctggtcaatcattacggggagtgtgttcctgtgatgcagtga

SEQ ID NO: 171626 - DNA, 684 bp, Enterobacter cloacae
gtgaacagtcgaaaaatccttctcctgtgcgcccttctgggcgcatttattctgacgtttgttctccttccgccgggtacactctctctggaagggattaaagcgcaccagcaggcgttactcgcccacgtcgaccgcgcgccgctgcagagcgccctgattttttttgcgctctatgtgctggcttccgccctgtcgatacccggtgcagcgatactgaccctgctgggtgggacgctgtttcccctgggtgaaggcatcgtgctggtctcgtttgcctcgacgctcggggcaacgcttgcgatgctcgccagccgttatctgctgcgtgagtgggtccagcagcgatttgctcagcagatgaaaacggttaacgctggcatgaggcatgacggcgcgggctatctttttgccctgcgcctgatgccgctgtttccgttttttctggtgaatttgctgatggggctgacccgcatgggggtattccgctactggtgggtgagccaggtggcgatgctgcccgcgacggttgtctttctgaacgccgggcgcgagcttggaaaagtggcatcgcttcgcgatattttgtcgccgggcatggtattcgcctttacactactggggttattaccgctggtcacgcgccagctcttttcccgttacacccccttgtctaaaaagtga

SEQ ID NO: 171627 - DNA, 501 bp, Enterobacter cloacae
gtgaaagagacgtacacctgggtcgaccccatcccaacccttccggcgagtttaaaaccgattgccgccatgcagaaaaaacattttggtgccgtgctaaaccccacgcgctggtggggacgtatgccgcgtcttttctggctggtggcgctgtttgtcggttttctggagcgtcgtgacgcgcgcctgacgcccgtgctgcgctccctgctcatgacgcgggtatcgcaactttgccactgcgctttctgtatcgatgccaatagcctgcggctggccgaacgctgtggggcgctggcctacgccgaggcggtgaccgccacgccgccccaggcggatgaggccatccgaacggcgctgaaacatcacttcacggacgacgcgattaccgagatgacggcgctcattgcgtttcagaatctctctgcccgcttcaatgccgccctggatattccggctcagggcctgtgtgccacgtttaacgagacgcctcatgcttga

SEQ ID NO: 171628 - DNA, 324 bp, Enterobacter cloacae
atgctgaaacaattcaacgtttatcgtaatacgtctgccgcaacccgggacaggcttccttactatatgcttattcaggatgattgctatgatgaccttgccacacgtgtaatcgtacctcttgccagaaataacagactaccgttatggcagagccaattggctcctggcgttaatatcgattttgaaacgctactgatttattcgccaatgataacgaatattaataatcaaaaaattaatcctgaaaattatgtgtgcaatttacgtcacgcacgtcatgacgttatagcggcaatcgatcgtttactcactaacacatga

SEQ ID NO: 171629 - DNA, 144 bp, Enterobacter cloacae
atggcaaaactgatgcttgaattacgctacaagaccggcactcagactgccggactttttatgccatttacttgcgcctttctccttttctgtcaagcgaagactagcgacttcattacgcaaaaagtgatggcctcaaggtga

SEQ ID NO: 171630 - DNA, 540 bp, Enterobacter cloacae; identical to SEQ ID NO: 171588

SEQ ID NO: 171631 - DNA, 642 bp, Enterobacter cloacae
atgcacaccacccaccgcacgctcattctcgccaaccacaccgtccaccacgtcaccttcgatcccacgaccttcaccgacgccgatctcctctggctcccccatcacgctgaacttgcaaacgccggacgcaaacgcaaagcagagcatctggctggccgcatcgccgccgcgcatgccttacctgaccacaccgttcccggcatcggccccagcggcgaaccactctggccagaaggcatttcaggcagcatcacccacagcggcacgcaggcaatggcggttgtcgtccgtcatcccgatgctcgggtgggtattgattgcgaagccatacttccagacagtgaggcccgggaaatccaggacggcattattgatgtgcaggaagcgatgtgcctgacgcgttcgggctatcctttcgcgctggcgctgacgctgacgtttagcgccaaagagagtctgtttaaggcgctctttccgcaggtgaaaacttttatgggttttgactgtgctcgtattatgagactcgatgaaagaacacttacgctggccctgacccgctcccaggctgagtttaaggaaaacatgctatttacagttcactggttacgtgatggtattcaagtcatcactttgctgtaa

SEQ ID NO: 171632 - DNA, 717 bp, Enterobacter cloacae
atgaacgcgatgtttaaaaaaggggtgctggcctccgtgctggctgtcgcggcgtcttcggcaatggcaggaaccagccttgatcttcaggtgagcggtaaagttgttccatcctcctgtacgccttctgttgtcagcggcggtagtaatgcggattttggtacggttaaagcaacttctttaaactacaacacggtaacttctcttccggatactaaaattatccctatttctattacctgcgaaacccctacgcgtgttggtgtgacgtttaacgatgcgcatgcggactccgcgccaaccgaatatttgtctaccgagtttagcgatcctgagtttttgttaacctctcaaagtacagcaggattgggcatgtttaacggtaagaagatcggtgcttatgccatgggtattcaaagggataagggtaccgcgacagacgatacgggtgcgacgctataccccgtattttcacaggatgctaccgcgacttcgggctggcatatcaaatccggaatccattatctgccggttgttacggataaaagtgagacctactctttcaccaaagattccggtgctgatacacctgctgcgctgaaacagattaattttaatgtcggcatcgtggcgcagatcaaccccgctggcgagctgaatattaccgacgaattaacgctggacggtttaaccaacgttgagctggtttatctgtaa

SEQ ID NO: 171633 - DNA, 687 bp, Enterobacter cloacae
atgctgcttttgaaaagaacgctgatttgtgcctgcctgttagcctcgtttaatacactggctgctggaatggtgccagaaaccccactgttgattgttaaagaagacgagcagggcgccagtatggacgttaaaaacacggatgccgacgcccaattgctgtataccaaactggttgatctacccgacgacccaaaacctggcctgattgtgacacagccggtggtacgtgtagacgcgggtaaaacccagcgcgtgcgctttgtactaaaaaacagcgcggagccgctgaaggtggaacacatcaagcgcgttatttttaccgctattccgcagcgtgaaaaaaataaagtaaaagtcgcattcagccagaatttgcccgttattattcgcccgaccgggctggcggttaatctcgaaccctggaaagacttaacatggcaaatgaacaacggcaacgtcactgtcgagaataaaaccccttacgttgttcgcatggaacaaaaagctaaattattgccatccggtacgacggctcaattctctaagacgtatattttgccgggtgaaaaaatgacagcgagcgtgaaaacgaaaataacgtcggcagataaacagattgaaatatatcctgtatcccgttatggctatcaagtgcaaagttatcttactgatctgaaagaataa

SEQ ID NO: 171634 - DNA, 2427 bp, Enterobacter cloacae
atgttaacggtttcctgtaaaaagggaatgctggcgttttgctttacggcgctcgcttttaatagtcgggcggaaataaaccctatagagaatgaaccagtggagtcagaccgggcgaaatttgacaccgaagcgttaaaatcccacggtcttgatccagccattgctgaatactattccatggctgcccgttttgctcccggaaaccataatgtgaccgttaatattaacggtaatcagcgtacccttatgtcggtgaaatttaatgaagaaggtacgccctgtattaatgatgagtttctgaaaaatgcgggcctgattaagaaaaccgcacagggcacctgccctcaaattagtcaatactggcccgggtcgactcttcagtcttccccggagattgaagaaataacagtcgtggttcctccggaagcgttggatcctgatttcggacgtcaacgggtggaagtgcagggtggccgtgcggcaatgctgaattacgccatgttcggtacccacaaccagtatgacgacaacaacgcagaccgtttccagtcgagtttagaactgggctttaacgccggggactggattgtacgcagcacgcagttcatcagcgacggcagcgatcagcgcttcgacttttcctcactcaatacctacgcccagcgtaccttcaccgattatggcgtgatggtacagggcggccagattaacgtggccaatagccgcttcagtattccggtgatatacggtgtacagatgatgccagataacgcgcttgtgccgctggcaggtacgggcgtggaagtgagcggtatcgcccgaaaccctcaggcccgtgtcgatattcgccagggcggacagctgatttactcgacgctggtgcctgccgggccgtttaacctggacgatgtaccgctgtctaacctcaacaccgacctgaacgtcacggtgaccgagaccgacggcagcgaaaaccgctttaccgtggcggcgagtaatttccgcagcagccacgtgggacgtgcgccgggctttaccctggcggcaggccgtgttgaaaacgacatggaatcgcgcctcgaaaaaccgtgggtggtctctgccaacaacggctggtccatcaacaggcgcatgaatgtcgtcgccggtatgttgatggcggataaccactattacggtttctccggcaacctcgataccacgccgatgcagaacctgtatgcctcgctcggttttctggcgtcgttagacaaccagacgcaaacgaagggcaacaaaacgacgctggatgtaggctatgcgctgccgtggggcatcggcatttcaatgggcggcagctacggcacgccgggttatcgtgaaatgacggagctttacggggatgacgacgatatgtcgcaaaccaaatacgacaccaatgtcggtattaactggtccaacaccacactcggccacttttctcttagcttttaccgcaacaagagctggaacagcgaaaacgatagccgccgttttgtctcttcatggtcgcaaagctttacatacttcaacgtaagcgtgaactgggaatcggatgtcagccgtaacgacgacagtgataacgatctgttttacgtgaacgtgtcgatcccgctcggacgtaccggcgtcagcaccagctcctggtatcgtgagggcgaaggcaagcgttcctacggcacgcgtgcgatgggatcgcttaatgaggcgaacgattacgcgcttggcgtctcccaggatcatgatgaaaacaccaccagctgggacggctcactgaacagcaatctgcattacaccagcctggcgctggcagcaggaggcgataacaacagcaacaccaactactccgcgtcgctgagcggcgggattgtggcgcacggcgacggcgtgactttctcgccttatcgcgtggctgacacctatgccatcgctaagctggataaaccggtggcaggcgttgagattggcactacacgtggcccggtatggacggataaatggggccaggcggtgatcccggtgttgtccccgttccacgaaagcacgattgaggtcaacaccgaaaagctgccaggcaacctggatgtcagaaacggcagaacggcgattaaggcctctcatggcgccgtggcgaagtgggagtttgagatgctaagccagcgccgcgtgctgttgactatcagccgcgcggacggtacgccgctgccggaaggtattccgattgtggacgaagcgggtgaatacatcactacggcacccgaagacggcgtgatcttcctgaatgatatctccgccaaccagcagctcttcgcgacggtggagggagagcgttgcaagctggcgtataccctgccggaggaagaaccgaatacattctacgaagaggtgacagggaagtgtctttga

SEQ ID NO: 171635 - DNA, 588 bp, Enterobacter cloacae
gtgtctttgaataacattcataagtacgcgatgttggtcgtgttgctctgcggaccggcagccgcgcaggccgatgatggcgaatgcaaaatgatgtccgccgtgaagacaatcgactacggtcgttatcgtaaagacgatatgcgaaagggttctgctgaacatgtgggcaaagtttataacggttatgcctcggtaacgcgggaactgagggtgtcggtgatgtgtccggatgcgcgtaaaatgcggatctccatcaacggcgctgcccgacaaaacagggcctggcgatacaccgataacggcgcgatgaagatcgcattcaaggatggccgcatggacgggaagagtgtgcaactggccgctgtcgatattggtgcggtggtggttcagggcggggcgcaagaagtgacgttgccgccagaaaaagcgctggctgccgttaacgggatggaagtggcgggagagcaattcaccgcgaccatgatggtgacgacctacctgtcagagaaagccttcagcgtgaccaacgccaccgatcttaccgagacgctgacgctgagcgtcgatacccttccagcgcaataa

SEQ ID NO: 171636 - DNA, 765 bp, Enterobacter cloacae
atgtaccacgatatcacgcacatcctgacggatctgattaacggcacattgcccctgtatcaggtgcactttgtcgcgcctgccgggaagcatatccgaacatcaccttgtctctcagttagcctggaaacccgctgcgaggtatgcttttgcgcatccgggtacgttccgcttcattcttcaaactctctcagaataagcttcggtaaacagcagctgacgcttcagctccaccgggataatgcccttttacaacagcagcaggttgccagacgaggtcccagaacgggcgcgtttctcctgcaaacgctcaatgagctgcacatgcagccgactgagcaggacacggccaggctggtggtattaagtctgctcagccactgccgcgatctgcttggcagcgagatccacactgatagccgcagccgcgcgctctttgaagccattcgtctctttattgacgaacatcatgcctcagcgctgacccgagattccgttgccgaggcgttttatatttcccccaactatctttcccatctttttcagaagaccgggaacgtcgggttcaatgaatacctgacacaaacgcgtctggaacacgcgcgccagctgctcaagggatacgatttaaaaatcaaggatattgcagcgcgctgcggatttatggacagcaactatttctgccgtctctttcgcaaacacacagaacgttccccttccgaatatcgccgtcagtatcacagccagttgacggccaaaaactag

SEQ ID NO: 171637 - DNA, 516 bp, Enterobacter cloacae
atgaacagggtgcagtttctttgtgctgatttccgttacactattcttattgccagtcgtgtcttcgagaacataataatttattgtgatccgcaatacctgccagccagcgcaatggctgatttcaccgcctacggtaagcccttcgcagagactgatcgccgtgaccttgatggtgctttaatcaccgcctataaccctgaaggttgtgtgaccgttttttcaggtagtgacatcgtgtacacgcgccaaatttattacccgttcacccttaaaccttttgaaattcggcagtctgttagggctaaaactcgcaacttggctggcgaggtgatcggcactctatgtgtctgtgttttctgtgggcgcgtaagtgtcgtctgtcctgattgtggggctgtgaatagcgatgcaacttattcagaaatgttggctcctgttgcttttgaagtcaggaggtgttctgatgaatacagtgaagctgtagcaacaatggttctggatgttcacccataa

SEQ ID NO: 171638 - DNA, 255 bp, Enterobacter cloacae
atgaaacctctttcacaggtgcttgtctggttcgcagaactcgcaacccttttcatgtcttattccgtgttttgtttctttttgccggccctggaaatatacgattggtatgtaacaagatatggctatgttttggaggaagagtttcttgattactacacgctgattctgtttaccgtttcgattatgttaacgacaatattgatatggatagcagcgatagtgcatcaaaacattcgaaaaaaacacgtttaa

SEQ ID NO: 171639 - DNA, 261 bp, Enterobacter cloacae
atgaaaaatattcaccatctgtttttctcatataaaacaatgcttttcaaagatatggttcgcgagctaatcaaaatggtcataaataaatcttgtgtttggtttaaaaactgtgataactctttaggtattccttcgaacaagatgcaaaaagaactgaaaatgacagcccttctacgagtgattagcctggtcgtgattagcgtggtggtgattattatcccaccgtgcggggctgcacttgggcgaggaaaggcttag

SEQ ID NO: 171640 - DNA, 399 bp, Enterobacter cloacae
atgagtttaccaatgccgtggagtttggctggacgcctcttcaaatggggttgggaaaagatcacacgattatggttactaaaaacctatcagaaatcgcatgagtataaattccggcgctatcatttaggcgcacactggaaaccacttggtgagcatttagagtactcggtgcggcttgcccattcagccgatcatgagtcggttaaatcccgcgtggcgtttcgggcaaaaggggcgcttgtggagaacctctcgctttatttcgaggcgtcagggcatggtatccgttaccagcagaaaattgagctggccaatctggaccagtctgtgttgattgttaacctaaaccagataccgcgtcaggaactcatggaggtttctgaacgcggaatttaa

SEQ ID NO: 171641 - DNA, 252 bp, Enterobacter cloacae
atgaagtcgttctggcgctggcgactgggggaataccgctatttctcgcttaactacccgcgttttaggccccttactttgaatggtatgtttcgcaaaggcctgtgcagactgcttattaacccctatttaataacgctgcagttctggctggcaatacactccgggcgatatactctgggcgacggcaggcttatgtttagccgtaagagaattaaaaaaatgaagtcacgcaaaatggcaaggctctga

SEQ ID NO: 171642 - DNA, 816 bp, Enterobacter cloacae
atggatgctgcattacttgatatgatgcactcaggcaggaataagtactgggcggaaacaatggttaatctagaggccagaaagcttatcaatacagctaatacgctgtctgctttccacctgagtgatagcctgacccgaatgaagtttgtccaggaaataaaagagtttattgagctgcagttcgccacggcccggagcgcaaaatctgatgaagagtgcatggcctgtataaaaaatcttagggcagagaccgaaaaccttgaagaacaggggcgaatgctacgtacgaaagctgcgaagctttacgccaaagtggagttcgtccgggaaaataacaaaattgtgggttacgtaatttctgctgtgaacgtagtgctttcgggagcagagatagctttaggaacaacgttacttgccagcgctaatccattggggttgttggctggagcaatacttgttgtggatggatttaatggcctaagcaaagaatttagccatcaagtgcttcatgattctacatctgaagggtttgctgctaatgcagctatggctacggctgaatttatggggtttagttctaaaagtggattaggcgtatataaatcaatctcacttgttgctaatgcttacagcatatttggtttaataaggaagcctggatcatggagactgtttcgctacataccagtcgattattacagaaaagtcagtacattaagtaggccaaaactaaccatgaaaatagttggatacggcgtgaaggcaaaagttatttttgatctgatgacaattactgatcgccctcaatcctag

SEQ ID NO: 171643 - DNA, 927 bp, Enterobacter cloacae
atgaccaacaccgggtttattattggtgcgtatccctgcgcaccctcgtttcaccagcaaggggaacaagaagaacgggccttctggcgggcactttccgacacgccggatatccgagggctggaacaaccgtgtctggaaaatctccatccgtttggtgatgaatggctgttccgccatacgccgggcgactggcaaatggttgtcaccgccgttatggaaaccatgcgccgccggggcacccacggtgcgtttggcctggcatctgctgacgaagcgcagcgtaaagcctgcgtcaatttctaccgtcatctgcaccagaaaattgacgccgtgaatgcccgttttccgggaaaaattatcgcgctggagatgcaggcggctccgcagatcggcaatgcttctgttgagcaggccaccgatgcattttcccgctctgttcgcgaaatcaccgcgtgggactggtcctgcgacctggtgcttgaacattgtgatgccatgacaggtctcgccccgcgcaagggtttcctgcctctgaagcaggttctggaggcgatcaacgagaccgatatcagcgtctgcatcaactgggcgcgttcggccattgagggacgcaacacaacgcttccggttgagcatgtgcaaaccgcccttcaggccggaaagctgggcgcgctgatgttctccggtaccaccctccgcggggagtacggcgaatggcaggatctgcacgcgccgttttcttcgttctgcgccgacagcctgatgtccactgaacatgtaaaaacactgtttactgcggcgcacgccgcaacgttgaaattctccggtattaaattactggaaataaatgctaatgctgacgtcgggcatcgtatcgctattttacgcgacggcattagcgcgatgaaaaaagcaacacaataa

SEQ ID NO: 171644 - DNA, 552 bp, Enterobacter cloacae
gtggccaccgtcccgagaaaaggtttccagattgaaaaaggcgtcagcgttgcccgcattgaaaacgacgtggccgaatcagtaaacgcgcctgagagcgtggcatcagacgcgcctcctgtcaccgtgtcgaaagagagcatcgctgaaaccgctgtcgcacaggtgagtgctaaggcgccgcgttatcaatatcgtcgctatgtttcgctattacttatggtcctctcttttggggtggggtattttattctccatctggccgtgcatgactactcaaagaaagatttttttaaagattacacaataaacagcaccgaaaacgggtgtcattttttctcgcgaaacgacgatattaaaagtatcggaaactttacgcgttataaaaaaattatcctgcaaacggggctcgattgtaaaaaatatccgtgggtctacttctcctcatccagtactgctccggcactgtcggtacttatttgcagaaaaccttatgaacaagaagaagatgccggttgcgttacgctttatttcagggggtacaatcagtga

SEQ ID NO: 171645 - DNA, 456 bp, Enterobacter cloacae
atgtgtctcttactgtttgccgttggcgcgctggcgtcatggctttaccattatcacttagaaaaaaaacataatacggaagcctgttccgtctctatcgttgtttttcatgaagatgttcgtgcaaaccttaccctggactttatgtataccatgcagcagcagaccggtgtggtagcggtcagcggtacgtattttaaaaatgataagccgacggcagttatccgaagagatgtgtcctatgtctggacggaaaacaaagattccttccattttacgtcggtaaagatccatgatgtgaatgacgaatcgctgccagataacgttctcggcgacgtgttgcctgatttctttatttacccgaaccataagttaaactattcaatcctgaaacaagggcccagaggttttctatttaccgtaggaaagcgtcctattttcttctgctctcgctga

SEQ ID NO: 171646 - DNA, 2217 bp, Enterobacter cloacae
atgagcgttaacggcatccagctgcgggtgcgtggcaaggtgcagggcgtggggtttcgtcccttcgtctggcagcttgcgcaggcgctgcagttgaccggcgatgtctgcaacgacggagagggcgtgctggtgcgcctcgcgggtaatggggggcatttcaccgcgaggctgcgccaggactgcccgccgctggcacgcatcgacagtatcgacacgcagcccttcacctggacgcatgtgccggaggcattcaccatccgccacagcgcgggtgggacgatggacacccagattgtaccggatgctgccacgtgtcccgcctgtctggcggagatgaacgatccgcacgagcgccgttaccgctacccgtttatcaactgtacccactgcggtccgcgtttcaccattattcgcgccatgccctatgaccgtccggccacggcaatggcgccattcccgctctgcccgccgtgtgaggcggagtatcgccatcccgcggaccgacgttttcacgcccagccggtcgcctgcccggactgtggtcccgcgcttgagtggcggacaggggacgttaatgctgcccgtgaggctgcgctgcgcgcggcggtgcagatgctgaaaagcggcggtattgttgccatcaaaggtctggggggctttcacctcgcctgtgatgcactcaacccgcgggcggtggcgaggctgcgggaacgcaaacagcgtccagcaaaaccgctggcagtgatgatcccgaacgcggatgggttacctgagccggttcagacgttgttatgttcacccgccgcacccatcgtgctcacgccaacagcatggctgcccgccttcccggaaggtatcgcgccgggtctggacaccgtgggcatcatgcttcctgcgaacccgctgcagcatcttctgatgatggactgccagcgcccgctggtgatgacctccggcaatctcagcggcagaccgcctgccctcaccaaccagcaggcactggatgagctcagcgacatcgcggacggcttcctgctgcataaccgtgacatcctgcaacggatggacgattcagtgatggatcgggacggtgtgatgctgcgccgcgcgcgtggttttgtgcccgatgccatcacgttacctgccgggttcgaaaatattcccgccatgatatgcaccggggcggatatgaaaaacaccttctgcctggtgcgcggaaaccaggcggtgctgagccagcattttggcgatctcagtgacgacggtgtggaagcgcaatggcgttcagcgctgtcggtgatgcagggcatttacgcctttcagccggagcgcgtcgtgtgcgatgcccatccgggataccgtgctcgccagtgggcgcacgcgcaggcattgcctcttgaaaatgtgcatcaccatcacgcccacgcagcggcgtgcctggccgaaaacggctggccgctcgttggcggagacgctatcgccctgacgctggacgggatcggcatgggtgaaaacggtgagctgtggggcggagagtgcctgcgggtgaactatcttacctgcgaacgtctgggggggctgccggccgtggcgctaccgggtggcgatctcgcggcccggcagccgtggcgaaatctcctcgcccactgtctggcgtttgtccctgactggcagcattacccggaaacgcgtgcggtacaacgccagaactggccgctgctggcaaaggctatcctgcgcggcatcaatgcgccgcgggcgtcgtcgtgcggtcgcctgtttgacgccatcgcctgcgcactgggtatcgaaacccaatcctgggaaggggaagccgcctgtcggctcgaagccctggcgtcgcagtgcgaaggcgctgtgcatccggtcacgctgtcggtgggtaatctctccctgttctggcagcaatggctggcgtggcaggcggaacccagcgcgcgcgcctgggcgtttcacgacgcgttggcaaaagggctggcggagcttgccgcgctccatgcccggcgcttgtcgctgaccacggtgagtttcagcggcggcgtgttgcataaccgtctgctgcgcgcgcgtctgcgtcattatctttctgactttacgcttctttttccttcgcgcctgcccgcaggtgacggagcgatctccttcgggcaggcggtggtcgccgctgcccggtcatgttcacaaaggatttaa

SEQ ID NO: 171647 - DNA, 1665 bp, Enterobacter cloacae
atgcgccagcttcagaaaatccgtcagtatcaacggctttatcagcattacggtgctgcgccaaagccgaccaccatcgcggaagtggcggaggtggcagtgtgcagcgaacgccacgcgcgcaccctgctgcgccagctggcgcagagcggctggctaagctggaacgcccagccgggtcgcgggcatcgggccatcctgcattgcctggcgaccaccagcgaactgagcgcgccgctgatgcacgcctgtctggagaaaggggattaccagagcgcgctgcagctggcagacggtgatccggccagcctgcatcacatcatcaccccgtttttaggcggcaaatggttaaaacatcagccgacgctgcgcataccctggtaccgcgccctcacgtcgcttgatccgtctcttcagcgccgccgtgccgaacagcatattatctgcgcggttcacgcggggctgacgcgctacgcgcccggccacacgcagccggtagcggatttagcccaccactgggaaattgatgatgacaaactgcgctggcgcttctacctgcgcagcggcgcgcactggcataacgggcaggccatcagtgatgaagatattctcagcgcgctgcaccagctgctggccgacccggcccgcagcgcagggctcgcacacgtaactcaggtatcgcttgtcgccccctggtgtctggagatcgcactcaccgcacccgatgccatgctggcccatcgtctggcgcatcacgcctgtcgcctgccgcatccgcaacagccgggtattggcgcaggtccctttgctatcgcccatcatcattcgcactacctgcgccttgagcgccagccatggtactttgcggcgcacccgctgctgcatgcgatcgagttctggcgaacccgcagcgagacggaaaaaaccgcctggatcaccgtagggaaaggcgaaaacgcccgggggtctgtcacctccatcagcagtggttttgcctggctgatgctcaacgtcgggttgccgcagccgctggcggcctggctgcgtcaggaaattcagcagattaatcagcagaacatccaccgggatgatgtcgacacccgcacggaaattcttcccggcatcacgacccccgtatttccggaagcgtccggggtggcgcttcccgccaccctgtcgctggtttgctatcacacgcctgagctgtgcgagcttgccagcatgctgcaaacacgcctgaaaaagcgcggctgcgagctgatcatccacaggaaagatcgtgaggcgtggcatgtccccgacgcgctgacgcaggcggatatcttactgggggattatctggcgggggaattgccggtctttgcgctggcagagtggtttactgaagagcctgcctgggccaccgccctggggccgggtccgtggcaaaaagcgaagcagaccctgatgcgctattgcgaaagcgaggagagcctgcaaacagcgctgccgtctttcttccagtccttacttgaacgcggcgcctgcacgccgctgttccactaccgctatcgtcttaataccctggaaaacgtgcaggacattgtgctgaccgccaccggctggctcgattttacccgcgcctggctgccgccggctcaggaacgtaccaccagcgcgtcgtag

SEQ ID NO: 171648 - DNA, 159 bp, Enterobacter cloacae
atggcgactttcactaaagaactacactatctttcaacctattttaagcaggttaaaaaatcagagcatatattgtttcgctggctctacctgagcccggaggcgcgcattgagcgtctgcgcgaactgatgatgcccgtgagcgcccctaaaaaatga

SEQ ID NO: 171649 - DNA, 180 bp, Enterobacter cloacae
atgtttgctgtcggtgattatgtacaaccgcgtcagggcgggccaaaactgaaagtgctcgacgtgaagggggatagcattgtggcggtgcaggccagcaatgaagagggtgagaaatttaccctgaaagcagcagaagtcgtgctgtatagcgaagaaggtgatttcggcgtctgctaa

SEQ ID NO: 171650 - DNA, 642 bp, Enterobacter cloacae
atgtcagaaactgttgatgataaaaacaacacatacgaatcaggtacttacaagatatggacggaaaacgctgaagatgttgatacgcatggtacaacaattgtattaaataaaatcagaccacaaaccaaagagacactttctagtttaagcatttgggaaggtctcgccacaagtaaagctgatgccgataatttagaaatagaggatattaaacgtccaaaatatcatatcggtttattaaaagataatgaacatttgcagttactcgccgatgatgacaaagtcagaacattaccgtggcaagatagtgactctccagaagaagcatttaaaaagttagtaatgtgcgtttgggaagagtcaaaacccacaaatcctaatcctaaaattacagatctttttgactattacctcaaaatgatttgggatttagcactgagcattcccaccgattatgttgagaaagatattttcgaacttccttacgacgatcaattttatgcttataaaatatcaaatgtttttaagggcgggcaagcaagtgaaatcaatatacaaaaaggtgagagtttaaaagcctatcttgatttacagcatgaaaaaaaacagattgctttaatgtctatattgataaggtga

SEQ ID NO: 171651 - DNA, 246 bp, Enterobacter cloacae
atgagtgagaagcagcttgcatatgtagatgatgacggcgacttaatcgttatcgacgaatatgattcagaaatcgttgttgcgcttcaacgcattaaaacgcctgctcatattgttcacgagatgtggcggcttactatgaagaacaactacaaaagcgaagctctacttcaagccatagagatcatgtccgagaaaatcggatatgacgcagccaagggcggcgactgggtgaataacgggtga

SEQ ID NO: 171652 - DNA, 297 bp, Enterobacter cloacae
atgatttacgacatgaagaactactacattaacagcaaaacagacgctcgtcttattcgttacgatgttataaaactcaacgatgatacctacaaagtgaaggttttcgacgaccaacagcgaggaatctcccatccaagtttagtggcgcagattgatgattttcagattacccgagaggaatacaataagaagtttccgtcaggattcaatcaacccgtcaggacggaaatggctccgggttttgaaaatactatccatgatagtcttcaaaaacacagaaatacactgtcataa

SEQ ID NO: 171653 - DNA, 240 bp, Enterobacter cloacae
atgaaatcaaagcgtatttattaccgtgtaaaagggcatgacgatgaaacctatatatttctagataagcacgatgatggttctctttctgttcgctcaggtaactctactcacacgagccactttacatgggatggcgaagaggaagttaaaagcgttgaagaattccttgcttctaatccatcttatcaggggcgtgttgaagagcttatagctgagtttaatactgaagaaaactag

SEQ ID NO: 171654 - DNA, 141 bp, Enterobacter cloacae
atggcactccccggcaaacaagaaatgttctgtcgcgagaacctcatcgatattaacgccacgcaagcggctattcagacagggtacattgctaagacagcttaccgcactgcgtccgaaaatctgtcatcctgtacataa

SEQ ID NO: 171655 - DNA, 468 bp, Enterobacter cloacae
atggcaaaaccggactggggcgagtttcagcaatggttcctatcagaacatgccgcaaccggcgtatcaccaaaggaatggtgtgaagcgcagggactgaactacgctaccgcccgtcgctatatcaaaaaacctacttcgcaaactgcgcaaaaacctgcgcataaaaaaatgcgcactgcgcagaaagataaaagcgcaaatgagctggtggatgatgatggacctactgctcggcagcgcttatttgtcgcggagtacctgaaggacaacaacgccaccgttgccgctgcacgtgctggttatagtgacccaaactacggtcgtcagctcatagcgaatcctaaagttgcgcaggccattgcgcagcagcaaaaagcctccattatgcgcacgctttgcagtgccgatgaggtcctcgcgcagatgtggcagcttgccacattcgatgccaaccagctttcgtag

SEQ ID NO: 171656 - DNA, 948 bp, Enterobacter cloacae
atggaaaacctggccctctggtatcgccgttttggcgagccagaatctgttctgcaacctgaaaccgcgtcattgggggcgctagcaccgggtcatctccgtgtccggatgctgttttcgccggtcaatgcgtccgatctcattcccatcacgggcgcctatcggcacagaactccgttaccggcggtagcggggtatgaaggcgtcggtgtcgttactcaggctcccgcgtcgtttagtcatctgctgggtaaacgcgttctgccgctgcgtgggcaaggcacctggcagcgctatgttgattgcccggccgagtatgcgatccccgtaccggacaccattgacgtgcatctggccgcgcgggcctatatcaatccgctggcggcgcagatgatgctcacccgctaccccgctcagggaaaacgggtgttgcttacggctgcaggatcggattgcggcattctgctggggcagtgggcgcgtcaggcgggcgcggaagcggtgtacggtattcaccgttctgcagttcatgcgcaacggctggaggcgatggggatcattcctgttgcgcagcatgacgcgcagcggatcgcctccatcgccgcgcgcagcgacgtcgtctacgatgccaccggcgggccgcttgcggaagcgatcctcagcgtgatgcccgggcaggggatgtttgtctgctacggactgctctccggccagactttccgacagcgagggcccgagccacgcgtggtgtggttccatatccgtaacggcctggatgggctcagcacggaggcgtggcacgcggcgttcgatcgcatctggcttcgcctgcccgccagccggtacagcgatgtcgcggtataccccctggcggaatggcagagggcgctcagtgcttatcgcgaaagtggaaggacctgcaagcctctcctgtcaatgatggactga

SEQ ID NO: 171657 - DNA, 324 bp, Enterobacter cloacae
atgctttttagcagcctgcgctttctgttctacagccggtttggtcgcttttttgtggtgctttttagcggcctgcgctttctgctctacagctggcttagtcgcgtcttgttttacggcttttttgtggtgctttttagccgcttgcgctttttgctcagcagctggtttagcggctttatgatgtttcttgtggtgtaccgcttttgcaggcgcagcggtggtggttgcagctggcgcagcggcagctggagcagttgcagtagtctcagcagcgaacgcagcagaagacagacccatagcagcggcaacaaccagagctaa

SEQ ID NO: 171658 - DNA, 540 bp, Enterobacter cloacae
atgaaaggcataatgaaaacgatggcgttagccgtactgtgtgcgacgagtttaagcaccttcgcggccgcggataacactccgcaagaagcatataacgatatcacccactctctcgctgacctccagcccatcacatttcaggctcccgcagaaaaatacaagctactggtgtttattgataaccagtgcatctactgcagcaacgtggtgaaaaacgtcaggcagtatacggatgccggtttgaccatgtcgtttttgaccgttgcccccgacgctattcgcgactcggtcattgaggatatggggcgcgtctggtgttcaaccgacagggtcaaaagcctgcaaaaagcgatgacgggttttttaccggataacgacacaacgcaggcctgttccgaccggatcgctcgccagtctgcgctggctgaaaggctgggcatcaacatcacaccgttcatggtggtcattgagcctgaatcacgctcgattgttggcagccagccaccggctgcaattctggctgcgttaaagaaatag

SEQ ID NO: 171659 - DNA, 948 bp, Enterobacter cloacae
atgcaaactattctgggcgccagcgggcaaatcgcccgtgaactgacccgcgagctcaaacgcggctacaccgacgatatcaggctggtcagccgccatccgcaaaaaatcaacgacagcgatgtcaccgtttcggccaatctcctcgatgccgggcagacgcagaacgcggttaatggtagcgacacggtctactttactgccggtctgccgcctgattccgcgctgtgggaacgtcagtttccagccatgctggaaaatgccctggaggccacgcggcaggcaggtgcaaaattcgtctatttcgacaacacctatatgtacccccagaacgcggtgccgcagacagaagagacgcgctttgccccccggggacggaaaggaaaagtccgggcagaaatggccaaccgtgtgcttgatgaaatgcaacggggtgacattcccgtgctcatcggtcgcgcgcctgagttctatgggcccgataaaacgcagagcttcaccaatacgcttattatcgacaggctgaagcagcataagcgtccgcgcgttccggtccgtgacgacacgcttcgcaccctcatctggacgccggatgccagccgagcgcttgccctgctgggcaacacccctgacgccttcggccagacgtggcatttaccctgctgcgacgaaaggctgacgtaccagcaattcgtcgctctcgcctgtgagatcttcggacagccagcggactacgccatcctcggcaagctggccttcgccgcgacagcgctgttttcgcagggcgcccgtgaaatacgggagctgttgcccaggtacgacgaggacaacctgtttgattcgacgaaattcaaacgccgattccctgaatttgccgtcaccacctaccggcaagggctggaggaaatctggcaggagtggcaacgcaaagcggcgaaaacggcgtaa

SEQ ID NO: 171660 - DNA, 435 bp, Enterobacter cloacae
atgaaaattggcgaactgtcgaaaatgacgggcattgccccgtcgcgcattcggttctatgaggcgcaaggtttactgccgcgcccggtcaggcaggagaacggataccgcgcctattccaccgatgcggcaacgctgctgaacattatcgacaatgcgcagcgtaccgggtttaccctcgagcaaatacgtcgcttcctgccgcagccgcaacagcgctgggatcatgagggcctgatccagtctcttaagacgcgtattgcggagatagaggcgatgcagaagcagcttgaggaaaaccgtaaagagctgctgacgctggtcgccagtctcagcaaccggccggagggcatcacctgtgacgacaacatgcagcgtctgctggggcagctgcagcactcagacggaagcacgaacccgtcgaacgcgcgttga

SEQ ID NO: 171661 - DNA, 126 bp, Enterobacter cloacae
atgatgaatatgcattgcccgaagctcgacatcgggttcctggtcgcgccagcatttaagacgatggagcagaacggtggaatccagaccaccgctaaaccccaccagcagctggcggtagggtga

SEQ ID NO: 171662 - DNA, 1245 bp, Enterobacter cloacae
atgtttattcgatttgtcctggtcctgatgatgttttcctgtagcgcgtccgccagcctgctcagcgaccaaaaggcagtagcacaatacatgcaaaccacggaagacgcggcgatctgggcacaggttggaaacgcggtcgttaacgttggcaacgtgcgtgcgggacagatactgggcgtggttcctgccgctgcagattactacgaatttcgcttcggttttgggactggctttatcgacaaggggcaccttgagccggttcagggaaaacagcgcgtcgaggatagcctcggcgatctgaataaacccctgagcaaccagaaccttatcacctggaaagacacgccggtgtttaatgcgccttccagcgggagtgcgccgttcggcacattaagcgccaaccttcgctatccgatactgaacaagctgaaagaccgtctgaatcagacctggtatcagatccgcatcggcaaccgcctggcgtgggtcagtagcctggatgcacaggaagataatgggatcccggttctgacctaccatcatattctgcgtgatgaagagaacacccgttttcgtcatacctctaccacgaccagcgtacgtgcctttaacaaccagatggcctggctgcgcgatcagggatacaccaccctgacgatgtatcagctggaagggtatgtgcgtaacaaactgaatctgcctgccaaatcggtggtgatcacctttgacgacgggctgaaatcggtgagccgctatgcgtatccggttctgaaagagtacggctttaacgccacggcgtttatcatttcgtcacgcattaagcgccatccgcagaagtgggatcctaaatcgctgcagtttatgagcgttcaggagctgaagggtatccaggacgtgtttgatattcagtcccatacgcactttctgcaccgcgtcgatggtaacaaacatccgattttgctcagccgcagctatcacgtgatcctcttcgattttgaacgctcgcgccgggggctggcgcagttcaatccgcgagtgttgtatctctcctatccgtttgggagctacgacacgaaagcgattaaagcagcaaatgacgccggttttcacctggcggtgacaacgatgaaagggaaggtcaagccgggggataatccgttcttactgaaacgcctctatatcttaagaacggattcgctggagacgatgtcgcggctgatcagcaatcagccgcaggggtaa

SEQ ID NO: 171663 - DNA, 1425 bp, Enterobacter cloacae
atgactaaaaaactccatataaaaacctggggctgtcagatgaacgaatacgattcatccaagatggccgatctgctggacaccacccacggataccagctgactgaaaatgcgaaagaagccgatgtgctgctgctaaatacctgttcaattcgcgaaaaagcgcaggaaaaagtctttcacgtgttaggccgctggaaacttcttaaacgaaaaaatccggacctgatcatcggcgtgggtggctgcgttgcgtcgcaggaaggtaagctgatccgccagagagccccgtatgtggatattgtctttggccctcagaccctgcaccgcctgcctgaaatgatcaacaaggtgcgcggcgatcgtagcccggtcgttgacgtcagcttcccggagatcgaaaaatttgaccgtctgccagagccgcgcgccgatggcccgaccgcgttcgtctctatcatggaaggctgcaacaaatactgtacttactgcgtggtgccgtatacccgtggtgaagaggtcagccgcccggcagatgacatcctgtttgaaattgcacagcttgccgcccagggcgttcgcgaagtcaacctgctgggtcagaacgttaacgcctggcgcggtgagaactacgacggcaccaccggcagctttgccgaactgctgcgtctggtggccgcgattgacggcatcgaccgtattcgctttaccaccagccatccgatggaatttaccgacgacatcattgacgtctaccgcgatacgccggaactggtgagtttcctgcacctgccgattcagtgcggttccgatcgcgtgctgaacctgatgggccgtccgcatacggtgctggagtataaatccatcatccgtaagctgcgtgaagcccgcccggatatccagataagctcagactttattgtcggtttccctggcgaaaccgctgatgacttcgaacgcaccatgaagctcatcggcgaagtgaattttgacgtcagctacagcttcatcttctcaccgcgtcctggcacccctgcggccgatatggttgacgatgtaccggaagaagagaaaaaacagcgtctgtacattctgcaggagcgcattaaccagcaggccaacgcctggagccgccgcatgctcggcaccgtccagcgtattctggtggaaggcacctcgcgcaagagcatcatggaactctccggacgtaccgagaacaaccgcgtggtcaactttgaaggtaccccggacatgatcggtaaatttgtggacgtcgagattgttgaagtattgaccaactcgctgcgtgcgaaagtggtacgtaccgaagatgagatgggcctgcgtattgcagagtcaccagaatcggtgatttcccgtacccgcaaagaaaatgattctggcgtgggaatttaccagccttaa

SEQ ID NO: 171664 - DNA, 501 bp, Enterobacter cloacae
atgaaaccgtttttgtactgtctttggctggcgactctcccggtggccgcaaccgacgtcaccgtcaatattgcagggaatatttacgatactacctgccaggtggacagtagcagccagaacatggtggtcgatctgggtcaggcactttccagcgatttcaaatccgtcggtgatacaggaagatggaaaaattttgaccttctcctgacaaattgtcctgccagcctgatggtcgcgaccatcacggtcaatggccagccggacgcaaagcatcccaacaagtacgccaacacgggaacagcaggtggcctcgcccttgaactggcagaccggatagattttatcaccctcgccccacaagccagtttcaacacgatgataaatggctcaacccatactgcttattttccgatggccgcacgctattacgcaacgtcgatgccggtaacggctggcaccttcagtagcgttgttcaggccacttttacttaccagtag

SEQ ID NO: 171665 - DNA, 984 bp, Enterobacter cloacae
atgtttaaatatgcctttgcgctgctggtgctcctcaccagcgtatgtctcatgccgcatgcccatgcggcgacaacctgcgacagtgccgatctgccctataacattaatgtcggcacgctgtccgttccaacaaccctcgacacgggcagcgtcattccgggatccgcaaagacgcacaccgtcagcggcagctgcaccggaacgcttgcaaatcatattcttattacctgttattacgggacgggagctgaagtgccgggcatgccaggcgtttatgccaccaatgttgacggcatcggcattgagctcctgaacagcagcgggcaggtcgttcgcggaacggggtatacctgtgactcaagtgctacgccggtaggcagtgtcagcagcgacagcgggcaaacattctctttcacctataccgaacggttaattaaaaccgcctcacgcattggcgcggggacggtttccagcgcgcaggatccgtttggattcggggtatataactctgtcggtatttctggcgcccgcaataccagccactattccaccgcgatttcggagagaacggccacctgctccattgacccgctcaatctgacggtcacgttaggggacttcccggtctcacaatttacccatgtgggcagttatacggcatggaaatcattcaatatcaccgcaacctgtacagaaacggtcaatcttaccgcgtcggtcaccagcgcgaatggctataacagccagtatcctgatgtcctgaacctgacgcctggcagcggtagcgccacgggtatcggcgtgagaatgctgcttgacggcgtcgatcttcgctacaactaccctattccggtgggcggaagtaccgagcccaacgtgcccgacgtcatccccttttccgttcagtattaccagaccaatgccaccgtaacggccggaacagccaataccgttgccaccatcgatcttgagtatcaataa

SEQ ID NO: 171666 - DNA, 1164 bp, Enterobacter cloacae
atgagctgggaatattccaccgaaccacccaaacaacacgggcgctcaatgctgattgcattgggttgtaccctgttgggtgtttgtgtgcaaaaagttctggccggtgattatttcaacccggcgctgctggatattgacaacccgagccagggaaagactgacctgagtatctttgagatcggccctggccaggcgccgggtaaataccacgtcgacgtgttcgttaacaacaataaagttgcagccaaagagattgaattcacgctaaaaaaagacgccagcggaaaatcaacgctgcagccgtgcctgagcgcggctcagttaaaaagcttcggcattaatatccataaatacgtgcaggacgataaggcccaatgtattgatctgagcctcatcccctccgccagcgcaacgtttcatgttaatccccagcaattgctgttaagcattccgcagaccgcgattacccaggtcccgcgtgattacgtcgacccgcaggaatacgatgaggggattaacgccctgctgctgaattacagcttcagcgccgggaacaaccgcggcaaaggtgaaaacagtaccgatcagcacagtgaatttcttaacctgcgtccgggtcttaacctcggggcgtggcgtttacggaactactccacctggagcaaaaccagcagtgacggtgacgcggagagtgcgttttcctccgtctatacctatgcccagcgcgatatcgtgccgcttggcggtaacgtcaaattcgggcaaagctcttcccctgcggacgtgtttgacagcatctctttcaccggggcgcagatcgcttcggacgacgatatgctgccggacagcatgaaagggtttgcgccggtgatccgcggtaccgcgcacagtaacgctcaggtgattgtccgccagaacggttacgtcatttaccagaattatgtcgctcccggcgcgtttgagattaacgacctctaccccaccggcgggagtggagatttgaacgtcaccgtgaaagagacggacggcagcgaacaacattttgtcgtgccctacgcgtcggtgccggtattgcagcgtgaaggccactttaaatacagccttaccgcggggcgctatcgcagctatgacagcgacgtcgagaaaacgccgttcatctag

SEQ ID NO: 171667 - DNA, 777 bp, Enterobacter cloacae
gtgatcctcccggcggtacagcaggccggtaagccaggctacccctggttggtttttctgcacggcttttccggcgacagccgcgagtggcagaaggtgggtgaaaaactcagcgactacccccggctgtatctcgatctgccggggcacggcggatcccggcaggttggcgtggcggggttcgaagagatgagcacattactcacccgaactttaattagttacaacatactcaacttctggctcatcgggtactccctcggcggccgcattgcgatgttccacgcctgccagcagccaaaggggttgctgggcctgatagttgaaggcgggcatccgggcttgcaggatgccgaagcgcgtcatacgcgcctggcatcggaccgaaactgggcgagacgttttcgcaccgaaccgctggataaggtattcactgactggtatcaacagcccgtttttgccaccctgacggacactcagcgcgatgcgctgattaccttgcgcagccagaacagcggcgtggcgctggcgatgatgctcgaggcgacgtcgctggcgttgcagcccgatttacgcgccgcgcttagcgcacgcgatttcgcttttgattatctctgtggcgaactcgatgagaagtttgcggcccttaccgctgaactgaacgccgttcgccatctcattccaaacgccggacacaacgcccatcgggaaaaccccgaagcggtgagcgcgagtctggttcagatactgcgtcttcgaataaaggacaccctatga

SEQ ID NO: 171668 - DNA, 942 bp, Enterobacter cloacae
gtgtctaatacagaactgcataacgatgttttctatccacatcgcacacatattatttctgagctggtgaaaggcaaacggactcctgggccaatctggcagaaacgcgaatatcgcctcaagttccttctgcgttcgcttctgttctggtcctccacccatcgcatgctggaaagccttgcaggtcgcgacgatttcgacagactgctggcctctcaggtaaccttaccgagcaagacccatcggcagtacctgatgcgcggcctgacggcgagcgatcgcgctgacgctatcattcaccactatcactggattgatagcctgaaagagaagggcctggcccaggcgctcaccagcccgcatgagcaaccgttcgtccagttcagggccaaaaacgacgcgatctataccgtcaatgcctcttgtgccgggaaagccgagcgcgaaggcgaaagcacgctgtggctgcgcgataacgagaatacgctgcttgccagcctgacctttaccgttgcgcgcagcaatggccagcgggtcatcgtaataggtggacttcagggcccccgccgcaacgtctcgcgggatgccattaagcaggccacccgcgcctgccacggtctgttcccaaaacggctgctgatggaggtgattttccagctggcggcacagtcgtcagtgcgggcaatttttgccgtcagcgatgagggacacgttttccgcgccttgcgctatcgcctcagtaaaggtcgccacttccacgccagctatgatgagttctgggaagcgctggacggtaaaaaattgtccgccttctgctggcaactccccctgcagatggagcgcaaatcccttgaggacattgccagtaaaaagcgtgccgaataccgccgtcgctttgaactgcttgatgaaattgaggcgtccgttaaatcgcgcttttaa

SEQ ID NO: 171669 - DNA, 291 bp, Enterobacter cloacae
atggagctcagaaatttacaggtgattagagctatcgccgcaatgatggttgtgctaaatcacttttgggggcccgtttttgggtgggtatttaagggcatcggaggaatgggtgttgatattttctttgtgctttcaggttttcttatggtgtacactcagaacgatagcaagggaccgttgcggtttttctgcgatcgagtaaaaaggatttacccgctttacataatagtgtccatccccctcattcttgcgaacattcctgttgcacagcattacaactttgggtga

SEQ ID NO: 171670 - DNA, 144 bp, Enterobacter cloacae
atgtttttttgtgattggtatcttaaaaacgaaagaaccgaaatgaaagataagaatgcgaaagagtcgaaagcaaaaaaaagcatggccgaaaccatgctaaaggaggtttacagtaaactcacgtcacaggcgccgggttaa

SEQ ID NO: 171671 - DNA, 132 bp, Enterobacter cloacae
atgggatacaccaacggttgcgacatctcccgtacgctccgccgcaacgacatttattatgtctacaaagtttatataacctatcatccgcacccactcgtttttcaggctcctgaaaaagcgccccattga

SEQ ID NO: 171672 - DNA, 1569 bp, Enterobacter cloacae
atggctaagggatatatccttcatatgtacgaccccaccacttgtggcggtcgtattctggaaggagcaccaaaccgaaggactaatggaactccggtagcccgtatgggggataaaatttcttgtggtaaagacaacaaaacctatcagatcatcggcggcatatcatggataaaaactgagggccgtcttgtcgcaggcagtctggacagtttcagcagttgcccgtgcaatgcaaaaatcatcccgcagataaccgtacaaacctatgagtcgcgcagcgaatccaaagaaaattcgccagtagcggcaaccccaccttcgacagtcgtttcttcaaattcatcagccttggctggttccgctaccctgttacccgttcctgtctttgcaaaatccagagaacgcggagcaggaaatacagatgcaggaaaacaacaagaacctcatactaattttgcggagatgggtctgttccgggcagcacctgctgctgacgctgtaatagattcagatgctccgcagcacgcacagacagcaaagaaaaaaccaaaagctccggaaaatataccaaagcccaaaaagcgaagcgctctttataagtcgttcaacggcaatcatgaggaggtggaatatcaggccgcggttgcagccgccgccagtgcaacaagagcacaagcagcaaccgctggcgttaacgtgcttgagcagatcgcagggcgatttactacctatggcacatgggccgccacgggtgcagaagttgctgctggtggtataggaatatctgttgcaggtttcttggttggcatgatgcccggcagactcaatgacgatgagcaggacttcatcgatcgtatgcggcttgcgcagatgagtgaagcgcctacgcgcgttcgctatacatgggagaatgacagcaacggaaatcccgttccgcatggctggcataccccaccgggtaaagatatggtgcgggtccgtaaaatgcagtgggacagcacccgacaggcgtacaccttcaccgccgaggaagaaaacctggtaacaatcatctggacaccggacagttcgggagttaacacaccatcaaacacaggcgatcagtcacagccacggcttccggggacaatactcgttaacccgttacccgatggaactcagataagcagtacgacaaccccggcacctgatgagaaaaatttcgcggattatatcctgatcgttcccgtatcggatattccgccgatttatatctacctcagtaatgtgcgtgaagggcttccggagaaagatcatagctatcacccagcaccaaaaacagaggagattgttgggatatctgttattcaaaaagctaagaaaaagacaccaaaacaaggtggaggggggttaagagagcgatggattgatgcgaaaggcaaacgaatttatgaatgggattcgcagcatggggaactggaagaatacagggcaagtgatggcgaacatttagggtcagtagactataagactggaaatcaattgaaacccgccgtgaaaggcagaagtattaaacgatatctgtga

SEQ ID NO: 171673 - DNA, 249 bp, Enterobacter cloacae
atgggacttaaactaacattggaatggtttagaaaatcggatgaaatttttgtgggggaagaaacatctgcggacttgggaaacgatggcagcatcattaataagcttggcttaccgttcgatggtaggatctatgatggtggtttcgacgtattagcatcttggataattgatttacagccattgtttactcacaagattgatttccaacggtttgattatcaattggtatttgaacgcatcgaatag

SEQ ID NO: 171674 - DNA, 987 bp, Enterobacter cloacae
atgggacaactcgtagacggcgtctggcaggatgtctggtatgacaccaaatccaccggtggacgctttaagcgctctgtttcggccttccgtaactggctcaccgccgacggtgctcccggcccaagtggcgaaggcggctttgcggccgagaaagatcgttatcatctttatgtctcccttgcctgtccgtgggcgcatcgcacgttgattgtgcacaagctcaaaggtcttgaatccttaattccggtttccgtggtgaacccgctgatgctggaaaacggctggacgtttgacagtgacttccctgccgcgaccggcgacgatttataccatcatgatttcctttaccagctctacctgcgggccgacccgcactacaccgggcgcgtgaccgtgccggtgctgtgggacaagaaaaaccagacgattgtcagcaatgagtctgcggaaatcatccgcatgttcaataccgcatttgatgcccacggcgcccgcgccggggattactatccggttgagctgcgcgataaaattgatgagctgaacagctggatttacgacaacgtcaacaacggtgtctacaaggccggctttgccaccagtcaggaagcgtatgacgaagcggtcggaaaagtctttgaatctcttgagcgtctggagcagatcctcggccagcaccgctacctgacgggcgatcgtctgacggaagcggatatccgcctgtggaccacgctggttcgctttgatccggtctatgtcacccactttaagtgcgacaagcaccgcatcagtgactatctgaacctgtatggtttcctgcgcgacatctaccagataccgggcatcgccgatacggtcgacttcgaccatatccgcactcactatttccgcagccacaagaccattaacccaacgggcattatctccattgggccgtggcaggacctggatgaaccgcacgggcgcgatgtgcgttttggataa

SEQ ID NO: 171675 - DNA, 690 bp, Enterobacter cloacae
atgaatatgctccgtaatttcacaatacgtttcgtcatgctgacgatcctcgggatcttttgtgtaatgtgggcggggggtgggctgtacagcacctggtccctttcccgcgtttccgatggcaatgacgtggaccgccagctggttaaacagatgacggtactcagccagggtaacgatcagtatttccgcttcgtgacccgtctgagccgcgcaatggaagtcaaagccgcaggcggcacgccggatctggcctctgcccaacaggcgctggataacatgggcaagaaactggccgagatgaaagccatctccccaggcccgatggatgagcaggtttcatcccgggtgattggcgcctggcaggcgctgctcgaacagggggtgaccccgcaaatgcagcaggcgaaacagggcgcactggacggctatcgtcagcaggcgaataatgtcaccccaccgctgagccgcgcgttcggtgcggcggctgaggcattcaacactgccgccgcgacgtcgctcgacagcacccgtgtggtggtggacggcctgaccagcatgacccggacggtgattatcgtcgccacgattatcggcctgctaatcctcctcttcaccgaccgttatctggtggcaatgctggtcaaaccgctggatcgtattcgccagcagttccgccagattgcctag

SEQ ID NO: 171676 - DNA, 324 bp, Enterobacter cloacae
atggctatcagtgagaaagacctgcttgaggcaggtttcagccaaagcgaagtagacaatttacaggcccgactctcagcagctggaggcaccctgcagcatctcatcgatgcgctctcacggcgcttccaggtttcggtatggctcacggtcgcgctggttctgattatgctggtcaccctcatcgcgggtaaccggacacacattctttccgggagcatgagtttcctcattatcctgatcattgcctgggtgacctttccacccgctctgggctggaaagcattccgcctgcagaggactcttacccggaaggctcgatag

SEQ ID NO: 171677 - DNA, 2481 bp, Enterobacter cloacae
gtgttatgcaatggattcatgataaacaaatggcaaatagatatggaaagttcacttcgcttcaatacgttattcttttatcgcatcccaacattattgttcctgttattactctttcctgttctggttcaggctacgggatccgtttatgagcaacagattcagcaggcgcgtaacggtaattacactccgtttctcgattatgttcagcgttatcagcaacagcatgccctgacgcctgagaacgttgcggactggctacaggtagcaggatgggcaggtcgcgatgacgaggtgattcaggtctggcggcgttatggtatttatatgccgcttcccgcccggggcgttgcggccgtcgcgcagtccagtcgaaatcagaaagcgtggcagcccgcgttatcgctctggaatgaagcgcgtagccttgccccagagaatgacgattaccgtatcggctacatcaaaacccttgccgatgcccgcatggatacccttgcgctgcaggaagcccggcagctggtggctgaaaatccctcgcaggcccatcttcagacgctcgcgtatgtctggttaatgcagggaaagaacagcgatcggcttttagcggacacgcgcgcgttgaatatcgcgccagagaataaggcgctgcagagagacctcatcgatgcgcttacggataaccgggtgaatacccccgcgcttcaacgttcacagcgggtggcgctgactaccgcgcagcgtcgccgtcttgagctgaatgccgctgccgaaaccgttcgccttgctgacgtgcccgccaggacagaaaaagagcgcctgcttcttgcgcaacgtgcactgaatcgttacgacaccctgtttgctcgctggcaaaacgatccgcaggcggcggacgacattatccttgcccgtatcgacaggcttggtgcgctgtatgcgcatggcgattatccgcaggtcatccgcgagtatcaggcgctgacggccgcacggcatccggtcccgggctgggcaatcggctgggttatctcctcgtatctgcaggagaaaaacgccgctgccgccttctcacttctgcaacgctatccacaatatgcgtccgatccgcaggacgaggagcatgcgctgttctatgcctggctggataccggtcagtatcaggccgcccgccagtatgctgagcgccagacccgcaacatcccctggagtcgttacgatttcggttcccctacccctcagcctaacgatcgatggcttagcggacagtcgctgcgctttaactatttactggcgacccacgccgagccggaagccgaaaagctggctcagcgtatggccgcaacggcgcccggcaaccagggattacagattgactatgcctccctgcttcaggcccggggtctgccgcgcgcggccgagcgaaagctgaaaatggcagaggcgctggaaccgtcgaatctggagctggaactgcagcaggcctacgtcgcgatggatctgcaggagtggcgacagatggacgtactggccgacgacgtccttgcccgcgcacccctcgatcgcagcgcccggcgtctggacaggctcagagcggtccaccacctgtccgagctgcgtctcaatgcgggaaaaggcttgcactccgataaccccgttagcggtacccacgacatgaactgggacgccacgctctatggtccgccaatggcagataactggcggctgtttgcgggcacccgctacgcagagggtaatttcgatgaaggcaaaggttccagccgtcacctgtcgggtggcgtcgaatggcggcctcgtgacctccagctcgaagccgaactctccggaaaccgctatcacggggccagcaagcccggggctcgcctctcaaccacctacagcctcacggataactggcaggtcagcggcagcctcgaacgcctgtcccgcaccacgcctctgcgggcgttacgcaacgggatcagtgctaaccggggtgaaggcggcgtgcgctggtatcaaaacgagcggcgtgagtaccagttcagcgccgccgtcagtcacttttcagaccataaccgccgacaggaatacaccctcacagggaaagagcgtctctggcaggcgccgtccctgacgctggatctcgaaccggagatcgccgccagtaaaaacagtctgcggaacacgctctattacaacccggcgcgggacctgtccgtgacggctgccctgtccgtcgatcatgagatgtatcgccattacgacaccctctggagccagcagatcgtggcgggaggcggcaggtactggcagaaaaatcagtccgccggggccatcaccctggtgggttacggtcaacgcatccagtggaacaacgtcattgataccggcgtgatgctgaactgggataaacgcccttacgacggcaagcgcgaaagcaatctctccgtcacgtttgatgcgactttacgcttttaa

SEQ ID NO: 171678 - DNA, 552 bp, Enterobacter cloacae
atgaaaagcggtgtaacaacgcgggtggataatactcaggctattctcgacgcgctcaaatcaattggcaagaaagaggtgctggtgggcatacctgaagctgccagcagcagggaagattcaccattcagtaatgccgggatcggttacgtcaacgaatacggttcaccggcgcaaaatatccccccgcgcccacatctcgtacctggcgttaaatctgtagaagatcagacggtgccagcacttaaagttgcggctcaggccgcgctcgcaggtaaggacgctgcggcaatgaacgcactaaaccaagccggaagattagctgttcagggtgttcatcgatttatcaggaatgcgaacttcactccgcttgccgatagtacggttgaggcaagagcgcgtaaaggcagaaaaggtgccaaagctgaaatggtacggcgggcagcaaaagaaccagccagcaccgttggggcaaaaccgttgtatgacacgggtaaatatcgcgacgccatcacccacgttgtgagagataaagatgatgaatatttctaa

SEQ ID NO: 171679 - DNA, 699 bp, Enterobacter cloacae
gtgacagcgcacaacctgatcgatacgcccccccggttagaatacatctctcaggagatcgtcggcatcaagcttgagcccatcgtcgccctccgctctatgcaccaggtgggggtggaggtcctcagcgtcctcagtgaatcacggtacagtgagggctttttcggcgatcggtctgcagagtggtcgatatcgctgcttgaagcacagcttgccgcgttaaaaaatacgccgcgcggtcataacctttttattaatctgccgataaccgtcctgacagagtctgcgccttttcagcggcttatcaggctgtctggcgcgccgctccatattgagattgtcgaccccgcaacgtttctggcgttgtctgccgcacagaagcagcgcgtcattgagaatctgatgaagctcagaaaccgggggcacgctgtctggctggatgacgtagatgagatcctggtgcagtcgtttttatccagccggcttccgttaagcggcatcaaaatagataaggaagcattctggcgtttacgcgacacccctgcgctgaggcaactggtttcccgctgctttcagcttgccgggcacgtgcttatcgaaggtattgagactgaacgcgatcgtacctgggcactggaggcaggcgccgatctcggccagggatattactggccgtcctggacatggccggaggattaa

SEQ ID NO: 171680 - DNA, 591 bp, Enterobacter cloacae
gtggcacgtccgaagagtgaagataaaaaacaggccttactggaagccgcaacggtggcatttgcacagtcaggtattgccgcctcaacggcgctcattgcccgtaaggcgggtgtcgccgaaggcaccctgttccgctactttgctacaaaagacgatctgctgaatgccctctatctgcatctgaagcaggatctctgccagaccatgctggcgaacctcgatcgcaccatcacgctgccaaaagaacatacccgcaatatctggaacagctatgtggactggggaattcgtaacccggttgcccatgcggctatccgccagattggcgtcagtgaaaagctgagcgccgaaacggaacaggcggtgaaagagatgttcccggagctgcatgaactttgccgtcgctcggtgcgtcaggtgtttatgtctgatgagttcaaaacgttcggcgatgcgctgttcttatcgctggccgaatccacgatggaatttgccacccgcgatccttcccgcgccgtcgaatttaaagcgctcggctttgaggtgatgtggcgcgggcttgcccaggaagagagcgatggagagtaa

SEQ ID NO: 171681 - DNA, 540 bp, Enterobacter cloacae
atggataacggctccccgtggggagacaccaccggcacctggacggcgctggagctgtggctgatgcgccagggtatccgggtggggcactcccggccgtatcatccgcagacgcagggcaagctggagcgttttcaccgcagcctgaaggcggaagtgctgcaggggaagtggttcgcggacagcggtgaactgcagcgcgccttcgaccactggcggacggtctataaccttgaacggccgcatgaggcgctggatatggcggtaccgggctcgcggtatcagccgtcatcgcgacggtacagcggcaacacaacgcccccggaatacgacgagggcgtgatggtcaggaaagtggatatcagcggaaagctgagcgtgaaaggggtaagtctgagcgcgggtaaagcgttcaggggagaacgagtcggactgaaggagacgcaggaggatggctgctatgaagtgtggtggtacagcacgaaagtgggggtgatcgacctgaagaaaaagtcgatcaccatgggtaaaggatgttaa

SEQ ID NO: 171682 - DNA, 744 bp, Enterobacter cloacae
atgaccgatacccgacacatccgccagacttttcaccgcgtctcaggccttgagcggcgcagcacgtggcagagcacgcaggcgtacaaacgtcactgtcaccctcagctctccatcggcgcgattgtggaaggccagacctgctgcgtgtgtcatggcaaagagtacattcttcaccccggggagctcattgtgatcccggcctctgcgccgcacagctgcaatcccgtcgccggcaagccgcgcagctatcacatgctgtatatcgacactgatctgccagtggcatttcaggtcattcgcaaccctgcgctctttaagcactaccttgctattgtggagacgatgtctcctgccgccgtggagacgctgctttctgcccttccccgcagtgcggataacgcagatacgcttcgctcaaccagccagcaggttcagcaggcgtttcttgctaacctggccgcaccgccttcgcttgatgaactcgcccgacgattttcgctgcgcaaggagacgctgatccgcaccttcaggcaggacaccggcctgacgccgggcagcttcctcaatatctcccgggtggagtacgccaaagcgcggctgcgcgccggggataatattgctgatgtcggctaccagagcgggtttgccgatcagagccattttcacaagacctttgtcagctataccgccgccacgccgcgccagtacgccacgggccgatcaatatccgacaataaatag

SEQ ID NO: 171683 - DNA, 513 bp, Enterobacter cloacae
atgaaatatattattgcactattcttcttatgcttaccggtgggtttaattgctaaaaaccacacgcctgaacagatactgcaaatgataaacgacaaaggagccagggtcgttgtaagtgaaatggattcaaatgataacggtgagtcagaatggtggaatcatgtcattccagagataggtaaaggaactcaggcatggttagccgtagcgagcgcccttgagcccggagtggacgccagtacagctgaagatctcaaggcggcgctttctaaagctatcccccataattctgcaggcgttttggcaattttaaaagacgataaaccgttactcactattgatcaaatctgcgctttcgctaattttccgcagacagaagcagagagcaataagctttttgtcgattcaatcagggagatgtttaaaataaaaagcgctgaggggcaaagatgtctcgccgttatgatcgcaactgtggaaaactctgttccattcgataaggatatgtaa

SEQ ID NO: 171684 - DNA, 456 bp, Enterobacter cloacae
atggcaacattctattttgataataaatacagtagtatttgtactaaactagctgatgaaaaagttgttaagacgggagacaaaatatttaatacattaatggatctcgccgttttcgctgctattgtcgcaatcaacaaaggcccaactaagatagagaaaaatggaagtgaaattcctgagcgtatttttactaataacaacaaggaaggtcttatatatatgatcgcacttatggaaactaaagatccatatatattgaaggacgatagattatgttggaagatatttcaagagtatgcaaacactggtatgtcggagattgctggatggctaacagacaatcctacagacataactggagtagataccttactaaatgtaatagctgacagggcttctaaattattagatattgaagaaggtgataaagaaattcctgatattgcattttga

SEQ ID NO: 171685 - DNA, 540 bp, Enterobacter cloacae; identical to SEQ ID NO: 171588

SEQ ID NO: 171686 - DNA, 498 bp, Enterobacter cloacae
atgtctgaatcatttcagaacgagataccccgcgcacgcgtaaatataaaactggatttggtcacaggtggcgcccggaagaaagttgagctgccgctgaagctgctgactgtcggcgattacagcaatggcagggcggaagggaccctttcagaacgcgaaaaaatcaacatcaataaaaataacttcaacagcgttctcgctgatcttcatcccgaagtgaatatcgccgttaaaaataccctggcgaacgatggctctgaagaaaacgtgaagctggcttttcagaatatgaaagattttgagccagaagcggtggcacgccaaattccacagcttcgtgcaatgctcgccatgcgtaatttactgcgggatttgaaatccaatcttctggataacgtcactttcaggaaagaactggaaactattttaaaggacccggcgctcactgatgaactgcgccgcgaactgaacgcgcttgccccggcccaggattaa

SEQ ID NO: 171687 - DNA, 1950 bp, Enterobacter cloacae
atgaaaatttaccgcccactctgggaggatggggccgttctggccccgcaacagttccagcagcaggcccgctggaacgcctatattgccgacaccgttgcagggatggggatttcccatcactggggggtggttgcggcagaatttgatgatgcggcgctcgcactctctcgcctgaatgccacccgtctggtggtccgttttcaggacggcacgattgttgataccgagctggcagataaccttcctccggtctgtgatttatccgctgcaaacagcagtgaagccgttgatgtcgtggtggcactgccgctgctgagcgcgaatggcggaaatctggataacgggcaggacagcgaacgcccgcgccgctggaaagccgagcgcgtggtggtgcaggagcttgccgggcatgaaagtggtgaactggccgtgctgcgtcatgccatcacgctgcgcctgtccacgcaggaaaacagtgcttacctgacctgtccggtggcccgtctggtgcctaatgtgcaggggctgtggagccgtgatccgtcctttatcccgccgatgctctcggttgcggcaagcccggtgcttgtgaccgaactgggcgatttgctggttcgcctgcaggcacgacgcaagcgtctgatggcgatgcggcgtgaaagcaacgagcgtcttgcggattttgctgtggccgatgtttccctgttctggctgctcaatgccctgaacagcaccgagcctgtgctgaccgaactgctgcagaccccgggacgtcaccctgagttgatctaccgcgagctgacccgtcttgcgggcagcctgctgacgttttcacttgagcacgatgccggggacattcccgtttaccggcatgatgcgcctgaacgtgtattcccgccattactgacgctgctggataaactgctggaagccagtcttccctcccgggttatcagtattcaactggagcatgtcgatcagatctggaaaggcccgctgcatgatgcccgcctgcgcgaaggggccgacttctacctctccgtacgcgcttcaatgccgaaccacgaactgcagacgaaattcccgctgctgtgtaacccggcatccctgctgcagcaaatatgcagtgccttaagtcgcctggaaaacggtgctctgcatgagaagacctcccggggtactgctttgcctgaggaagcggtgcgacctgccagccagttggtctatgtcatccataaggagcccgaggtcagggtgcgggtggcagagatgccaacagttaaagcaaaacggtggctcgtctttgtggctggcatggcaacctcgctggtgctgggcgcagcaacggcttttgggtggcaggtcctgcatcagccggatgacgccacaaataccctggccgcctccgttgccccgctgccagaacccatgactgccccgcaaatcgatgccttcagaaagacggataacagccggacagaatctgccatctggcttgagcgaataacgaatcaggtcaacggggtcatgaaccagtcgccgggatggcggcttcgctatgcccagggactggtgacgcaggcaaaatccctgtggccggacgacccggcaacccgtgagctggtaaaacgctgggagcagtatcagatggcccggacgctgcccgccagcaagctccagggctggaatgagggaatgacgcaacttcaggcgctgtcggcaaagctggatgcgctggatcaccagaagggaaaatacctgacgggaagtgaactgaagacgatggtctggcagataacccgttcgtttgccagtgcagtaccggcagaagagcaacttcggctgctggttagcgcaccgggggagggtaacacccccggagtcagtattgaggaagcttcacgacatctggattctttgagctttatccttctaacagcgcagtaa

SEQ ID NO: 171688 - DNA, 1602 bp, Enterobacter cloacae
atgaatgctaccaacgctatcgaccaactggccccccaaaaatggaccgaaacatctcccgcagagcgtttgcgccttctggaggaaatccgttcaaacatgaagaagtacggtgatgaccttgccctcgctgacagcaagatgaagaatggcatcctcggtgcgcctcttttttcacaccccctgtctaaggttgcgaccgtcgttcctatggcgagtacagtctcggccgccattctcctttacgaatccattctcgacggcaagatgcctcagtcgctgagcgtggaaaaagttagcaaggatctctacgacatttatgtctttccgcaggagcggaaggacaagttgatgtacgcggatcagaagagtcgcatccgtgtgaaaggtgaaccgaaacaaatcaatccgatggaaaagcctgccggtattattgccgtgctgggggccggcaactacagttcggcgctcgaggtgttgaaagcgatcttcttcgagaactgtgcggtcgtgcacaagccgcatcacctgaacgaagaaaccgacaggatctgggcgaagatcatgcagccactgattgatcagcacgttctgagcttctgcgatgccgatcagggacaagacctgaccgtcgacccccgcctctccaggatctactttaccggtggaaccggaacggccgaagccatcatgtcagccactgagacgcctctgatctccgaatgtggcggcaacaacccgtgcatcatcgtgccgggcgaccggccctggacaaagaaggaaattgagcaccaggcagtgcagatcgccaccatggcaaagttcaatggtggtgcgaactgtggtcgtcctcagaccctggtgacaagtaagtactggcctcagcgcaaggaattccttgatgcactgcgggtcgcactcgcggagacgaccccggcgatgggtatgtactacccaggagctgacaaggtggtggagggttttcgacaggcctatcccgaggcggaagtactgcgcccagaaggcggcaagtatccgcattccgatgtcatattgatcaccggagttgagcccggcggctacgccacttcacatgaagcgttcagcctggtaatcgctgaggtgccacttgacctgccagccaatgccacgggcttcctccctggtgccgtcaagttcgccaacacgcagctactgggcacgctcgccagtgcgatcctgatcgatgaggacaccagaaaagcccatcagaaagtactcgaacaggctgtgtctgacctggaatatggtgcggttgccatcaatgccatgccatctttcatttttcttaacccttatcttacctggggcggaaatgaggccggcaaaaagttcgtttctggtcgcggcaacttcggcaatttgctcaattacgaaaacgtcgagaaagcgatcatggaagccaggtttatgtcaccagggcacatgctgtacacgaacaagcgcgctttcgacaacatggccgcgaacatggcgtctttcgcagtcgagccaacctggatgaacctgacctgcctgatgggggatgccatccgcgatagcttccgcaaaaaagatttctga

SEQ ID NO: 171689 - DNA, 1035 bp, Enterobacter cloacae
atgagcaataatgacggagttctgagggtgcaaaacaaaacgtttccaatggatatcggctggctggccatactgaaggacctgggtattgagcctggtcatgtattgcgtcgggccggtcttccggacgatttactctcccgtgcgagacaaggactgtctaccgaagactattttcgtttctggcgcgctttggaagctgcggcaagtaatgtcatgtttcccttacgcatcgtcgagaccctctcggctgattctttcaacccgccactgttcgctgccctgtgcagcgctaatctggtacaggccatgcagcgcctcgccaaatacaagcaacttgtggctcccatgagcctggaagtaaacacgggcgacgcaggcgagctggtagtaacgcctcgctggttgttgatgcaaaccgatgtgccccattcgctgcaagtggccgagattgcttttttcgtccgactggccagactcgctacccgtgagcccattaaggcgcatcgcgtcattcttccgccgcttccgtccgctcattatccccgacgttacgagaatttcttcggtgtgcccgtgcaaaacggggagtgtccaggtatcgctttcgccgctgtggatgctttgcgtccatttctgacggtcaacgaaagcatgtttcgcgcgttcgaacctgatcttcgccgtcggctcagtgaactcgatgcgacggcgtctacagcggatcgcgtgcgtgctgtcttactggaactgttgcctggtaatgcggctaccatcgagaaagctgcagagcgactgggcttgagcaagcgtacgcttcaacgtcgcctcgaggaggagggggaaaactttcgaaccctggtcaatagggtgcgtgagagcctcgcccgccactacctggcaaataccacgatgtccggcgcagagatcgcgttcctcctcggcttcgaagatcccaactccttttatcgcgcatttcagctctggaccgggcaaacacctgacagcgcccgcaatgccatgcgcttgaattga

SEQ ID NO: 171690 - DNA, 342 bp, Enterobacter cloacae
atgactctcaatcgcttttgctatctactcctgattttcactgccatcggcagtctgttgaccccgaatccattggttatctggtttctgctgatcaatgtgctgacgatggccatgtatggcgcggataaaatggcggcgcgtaaagggatgcgcagggtcccggaagccacgttgctgatcttcggcgtaacgggcggctggcctggcgccattgtaggccaacaactctttcgccataaaacccaaaaacagccttttaaaacctgtttttttatcagcgtcgttatcagcatcgcggtgatggcggcagcgtatcattttttccctttttctccttaa

SEQ ID NO: 171691 - DNA, 450 bp, Enterobacter cloacae
atgaaaatagcctctattacactggcagtactggtggccttttctgcaccttgctggtctgcttttcaggagcgggaatataatacctggtatctgaagaatgcggtgctttatgacatgacgcaaacctcagagggtttccccgtcatggtcagcatatctcaacccgagcggggttctgccaatttgctggtgtcctatatcactgaagggcaatgcagcgagaataaaccactgctcaacgttaacggtaaagtgctgccggcaaaatatttttgtgttcaggtcgggcgaaacaaaattgagcatttttctgtgatcgatgcacagagcgtcaatgagatggtgacgcatctgaaatctgatttcactatccttctgcaaaacaatatcaaaatttgggccgccaatattaaaacgccaaaatacgggctgacgccgcgtttttaa

SEQ ID NO: 171692 - DNA, 408 bp, Enterobacter cloacae
atgccattcaaaacggctattaaatggattcatcgccttattaccctttcgcttctggttctggtcattggatttctctggttaaaccatcagcccagtcagcgaaacagcgacgaacttcagcgcgtttataaattatccgatagcgtctggctctatatgaccgtgaacaatcagggtggcgcaaccgtaccaacaatctaccgctactatctctcgaaggcgatcgccgggaaaggtaccgacattatccatcaacttgctaagaaacatccggtcatcgagggtacaggcacgattaccgctgccagtattgatgcaagtggggaagtaaacattgcctatagcggaaaggttatttcgattgagagcaatatctccagtctccggttctcagttaaaccctga

SEQ ID NO: 171693 - DNA, 339 bp, Enterobacter cloacae
atgaacggtcttacgctggaaatatcttctgccgccattgaattaataaaaaagcatcaggggctttctctggagaaatatcgtgacgaacacggattatgggttatcggctacggccacgttatccgcgatcgggagcagtttcacggtcctgtcactccgctggaggccgacgcgctgcttcacgaggacattcgcttgtgcgaggcgctgctgcgggaaaatgtgacacgtccattaacccaacagcagcatgacacgctggtgatgatgatgttcagcttcggagagataccctcgctgccggaagcgatttttcaggccgtcgcccgggtgtaa

SEQ ID NO: 171694 - DNA, 603 bp, Enterobacter cloacae
atgcgagtaatcatgtttgacaggcagtcactatttattcatggagcgatacacagtctgcggacgttaattccggaaataaatatcactggtacctgtcaggcagaagatttatgggcgcagatgtccgcgtcgccgtctgctattgtcctgattgacggtaatttaattcaggatgagggatgtggtgtgctggatgacatcctgcatcgcttgccgacgatacgcgtgatcatggttctggcgaaaaaagaggccagatgggttgaacaattgcgccagcgaaacatcatggccattattccccgcactgccagccccgagcgcttttctgccgtactggactcggtgtccagagggatggtctgctttcccggagagtgggtcagaaagccgtcgtcgccacaggcgttactggcattaagtgaacgccagcgcgaagtgctgaaactgctggcggcgggggagtcaaacaaagagattgggcgcaacctcaacatcagtgcggccacggtaaaagcgcatctggaggcgcttttccggcggctggacgttaaaaacagaactcaggctgcgatgtattacacccgggcgacggcctga

SEQ ID NO: 171695 - DNA, 540 bp, Enterobacter cloacae
atggataacggctccccgtggggagacaccaccggcacctggacggcgctggagctgtggctgatgcgccagggtatccgggtggggcactcccggccgtatcatccgcagacgcagggcaagctggagcgttttcaccgcagcctgaaggcggaagtgctgcaggggaagtggttcgcggacagcggtgaactgcagcgcgccttcgaccactggcggacggtctataaccttgaacggccgcatgaggcgctggatatggcggtaccgggctcgcggtatcagccgtcatcgcgacggtacagcggcaacacaacgcccccggaatacgacgagggcgtgatggtcaggaaagtggatatcagcggaaagctgagcgtgaaaggggtaagtctgagcgcgggtaaagcgttcaggggagaacgagtcggactgaaggagacgcaggaggatggctgctatgaagtgtggtggtacagcacaaaagtgggggtgatcgacctgaagaaaaagtcgatcaccatgggtaaaggatgttaa

SEQ ID NO: 171696 - DNA, 1272 bp, Enterobacter cloacae
atgttttattatgagcaagaacgagcctcattaatcagaaggtattttttgacgatctatcttttttttaatgttgtttgtgggttttattttatttatgatggtaatttaggtggtgatttccagggggagtatccaaccgaacctgctttaatgattatcgccatattgctagtttttgttattttctacatgatccagtccctcatttttcctttttttgaaagggtaagagtgagagaaatatcatattgcaaaaataaaacattggactactttgttgttctactgctgtgtttatctatacatgcagcgataaacttaaatgtcgggatctcaggattaaaacttgatgaacctgatggaagttcaaaaatttattttttcctaatttcaatatttcaaccagtgaattttgcactgatctatctgttctatcgagtaatcggttccagactaaataaggtagttttgttaaacgtcttattatatgttgtttatgttattgttagcgctcaaacaattaatattttaacattatttgcattgtttataatctcgctccagttaaaaaatattagagtgacagcgaaaaaattattcacattaactgccctaggattgttgatctacccaattattcgttttttaaaatatgcgattgtaagtagcggaagacaaaacgttgccttagtaagtactttccaaaataatcttggtgatggtgcgacggcgatgtactttgatttcttctttaaaagtattgaacgctttcaaatggttgccaatattcaatttatcatggaacagtgggattctttaacttactcttacagcagtgctgttaatggtggttatagtttcctctcttcatattggtttatcgatgcggtgcttagacgtgtttttggagagaatctatttgccggtgggttatccccacaagattttatggctactgctataaatgggcaagacacctggtcttcacatattagttttctgggatatatacctttctttgggttttatagtgttcttgtttacacattaatgctcttttttgttttcttaagtattttcctttcccgaaaattgatggcaaatcgttatttcttaacattgacatggttaatgtgtctatttttggtgtgccatggctggtttataccatttataaattatatccaatcattattagtttttattttcgtcattatgacattgcaagtttttaatgtgggacgaaaacagatacaacctatcaggtaa

SEQ ID NO: 171697 - DNA, 609 bp, Enterobacter cloacae
atgataaagctgattggcatgatggattctccttatgtacgccgcgtggcggtctccctggaactttatggcgttgcgtttgaaagccagccgctgtcggtattcagcacatttgaggaattttcccggatcaaccctgcggtaaaagcgcccacactggttctggataatggaacacgtctgatggactcatcgctgatactgaattattttgaggcccaggctgcccctgaacggagactgctgcccgtggcaccggatgcgctggcaaacgatctgcagacgctgggctttatcctcgccgccgcggagaaagcggtccaaaatgtgtatgaacaccacctgcgcccggcggagaagcagcatagttcatgggtcgagcgcattaccgtccagttgctggcagcctgcaaagaatggaacacgctgctggaggcgcgtccgaccagccccctgcccgaccaggtcgccattaccagtacggtggtctggacgtttattcagtcgatgatccctcacgtcgttaacacagcggatttcagaaagattcaggcggttactgatgccttcgaggcgcaagcggtcttcaaaaaatatcctttcaactaa

SEQ ID NO: 171698 - DNA, 600 bp, Enterobacter cloacae
atggaaaaactaaacatcgttgtggtaacaaacaaccgctatttttctcaagggataatgtccattttaacccaggacgagcaagagcactgcactgtctggacgcccgtgcaggtgggcgtaaatatcaataaacataaaggcgctgatgcgggaagatgctggattgttgatgtcgataattatttcaacaatacgctcttgtttttagatcttttaactgcgctggtggatctaaagaccaccttaaaccggcgtctgcgggtcttgctttgctataacaaatacatttgcctgccttcgcgggactgttatgcgtctttttcagtggttaatgcggctcgcggtataaagagcgtcgagcataaggtcaggtccctctccgggcacgatcggaaagatgtagaggtaacgaaatcaaggaataaaacggcgctaactcgccaggaatatctcgtgttaaatgccttgtctcaggggctaaacgtcagtcaggtggccgaaagatatcacatcacaccaaaacgggtcagccaccataaatgtaacgggctggctaaaatgaagaaaaagcgtttgtatggcgtttatggagaataa

SEQ ID NO: 171699 - DNA, 669 bp, Enterobacter cloacae
atgatgagcctcattggtgaggcattcggcgtggttaatgtcgatcggactcgcgtgattttcagcgcaggcgaaatggcccagtcgctgaatctctctaacgatggtgaaacgccagccatgattcaggtctggacagacatgggcgacccgctggtgccgccggataaggtcagcacgccgattgtggctacacctccggttttcaaaatgttgccgaaggaaattcgttcgttgcgtttgctgcttacggcacgtcaggggctgccgaacgatcgggaaagcgtcttctggctgaatatttttcagttccagcctgagagcgacctgacccggcagaaaaagcaaaagttaattctgccgttacgcttaaggatgaaagtctttattcgtcctgccggcattggcgaccctgatgcgcttcagtatcagacactccagttcagggcccaggatacccggttaatcattactaacccgacgccctggaatatcagcctcaacgttgagatacccgggcaaaggccgctgaccaatattatggtttcgccacggatggaacaggcagtgtcgcctgataagcccctattgccgggaataaatttaacctatcgtgtgattactgatgacggtaattatcgtgactatcagaccgtagttcgaaaatag

SEQ ID NO: 171700 - DNA, 831 bp, Enterobacter cloacae
atgaaatttataatgaataagcagataatttttgactcagatatgtgtacgttgggcctcgaagattctcaggatgagttgattcaaatttcgaatcctacaaagagacttttattgttgctgatcgcccataagggagaggcaataaaaagggaggttatatttaagaaagtctgggacgactatggcatggtttccagcaacaataatcttaatcagtgcgtaagcaagttacgcaagattatgaagaaccttggcatggatgaggaggtgattgttaccgttcccaaaataggctttatgctgcatcagcaggttgatgtcgaaaaatgctcagagccggttgacgtcatcgaggatatcccttctgaaaccgaaaccgcttatattgccgacgggcgtttactaaacggcaaaattgccgaacgcagcacaggagaagtatcacgctggcgcattatgaaaacaggaatattaaatcagctgatgctttttttctctgttatggcgctgggcggggctgcaggattctggtttgccagtaagcccgtggaacgtaatgagatttacataggaaatgctggctcctgtaaggtcatgatgtctgaacaggcgctgaacagtataaccaatcctgacgtaaagaaaggcgtgatggattttgcgataaagctaaaccccgtctgtaagagtaatgagtatgtcctgatcatcaaaagcagttcgtttaaaacgtattcttccaatctctcgcgtctctacttcatgcgctgcggcataatgagtgacggcaaagcagagatatgctgggggttattgccaccacgctga

SEQ ID NO: 171701 - DNA, 696 bp, Enterobacter cloacae
atgaaacgttttacaattcgactgcaacccataatgtcactcactaccgggcaacttcatggatatgaggtactgtctgagcctcccgctgaggtcaatattgcagagtggtttgaacagtgctcttccgcccagcttctgcagttgagaaagtggcagctcaacacccttgcaagacaaagaatccctgtaaagctctttgttaacctcaccacgaccattctcgccagcgaagagggagccgcggcgcttctgcaagaccctttaccgggggtcattgaacttcaggacccaatggcaatcgcccgtcttgacgcctccaggctcgcattactggatgagaatctccggcggcttcagcatgccggtatggaggtctggctcgatgattatctcagcgactatgacagtacgcttaccgatagcgggctggtgtttgatggggtaaaactcgactgcgctgctttccagcagtatcgcaacgattgcgcgggtttagcgcaactgatcgctgaagcacggcgtttcggaacggtggtccttgcagaaggtgttgaaagtcagggtgacgtcagaacggcatcgctggcgggtgccgatcttgctcaggggttttactggccggagaaaaaaatccatgcggtgcaggtcccgtctgttcaagccgcccggggctctatgcgcaatgtcacataa

SEQ ID NO: 171702 - DNA, 429 bp, Enterobacter cloacae
atgccacctaacggccggttcatttttgtcatcctgatgaccgatcccacacaaattcgttgcgccagggggcacgatcccctcaatgagtatatgagcagtggcgcggttgacgccgtggaaggccatacttccctctccggggggctgcaggtgctctatgcgggtgatatgctcatcaacaatggtattctggtcagctggagtaacaacagcggtcactatcagcccacgccgcaagccagacgaacaaaccttctgccgcacattcagttgttgctgccagagcatcttttccagcctgtcagcttcaggggctccagcgctgcatctgcacgatctatgggctcgcgtatgaatgatttctcctcaaccgggagtttttcctcgtatcacggttctgaagggggaggaggctattcctcgtaa

SEQ ID NO: 171703 - DNA, 540 bp, Enterobacter cloacae; identical to SEQ ID NO: 171588

SEQ ID NO: 171704 - DNA, 534 bp, Enterobacter cloacae
atgataacccatcaaataatacaaagtgaagttgaagagttaaaacggattctgactgagaaggatttgatgatcccctcgttctggagttgtatctggcctggactgacatgtatgttatggtttcttctttcatcctatttttcgtactggctaagtgattatgcttctggtattgataaaataacagttatggtttttgcgggtgcgatgggttttttttccatcgtagtgacagctaaaacgcgatcttattttctttcgctacctgaatcattcaggaaaaattcaaggtttgttaattttcttctggctaaatgtaagatgtatggggtctgtatcttatttatatttccatgtttagcattttatttttcatttactcatctagattctattatcttctgtgtaataacattcttctgcataatagttacggttatggtgatgaatattgatctcggtcgttatcagttaactactctgacgtctgttattgaatcggttaaaaataaagaaataaaactgcaataa

SEQ ID NO: 171705 - DNA, 429 bp, Enterobacter cloacae
atggataatctcaacaaaatatattcttcgatacccgtactggaaagaaataaacgcctgaagttatcccggcaaaagagattcgatgtttattattgtctcgcttttatgtttggttttgccggattatttctgtggtggggaagccatgcttttttcaatgtgttcactgacctgttaaccccgccggaaaaactggagtcggcaaataacatcatcaatcagtggaatgtcctgatgtatttcgttccctttattcttttctcgctttccattggttgtctggcaacggctttactgggggtactcattgccgaactagctttttggtttgaatatgcctttgaaaaaagcttccagagatatttaaaccgcaaccttcgacggaaaaataaaatgaaagaaggagagcctgatgttcatccgtaa

SEQ ID NO: 171706 - DNA, 327 bp, Enterobacter cloacae
atgtgtataagagacaggtacccccaccacgccgctgacggcaacatcatgctcaagcaggcgaaacagtgccgttggcgcattgccaaagacgaagatcttctcactctcttccgtcaccgcgatatcaacggccgccatcgagcgggttattccctgtgcttttgcctgtgctaccacccgcgggtcgctgatatagcaacgacattcgcccccgaatgtggccagcagcgttttgttgatcccggagagcgccatcgtggtatcggtatagatgacggaggggcgacggagcgccgcgcaaagctgctctatggcgtcatctga

SEQ ID NO: 171707 - DNA, 960 bp, Enterobacter cloacae
atgactctgctggcatggtgcttcgcgtggctgctcgatgtcatcatcggcgacccacaaaactggccgcacccggtgcgctggataggcaacctgattaatgcggtgcagcgcggcatacgccactgctgccatagtgacgcggcgttacgcattggcggcggcgtaatgtggctggcggtggtggggctgacctggggcgtggcctggggcgtgctgacgctcggacggatggtacatccctggctgggctgggccattgaagtgtggatgatttttaccgtgctggccggacgcagtctggcaaacgccgcacgggacgttcaacgccctttgcaagcgggcgaccttgatgaaagccgcgaaaaactctcctggatagtggggcgcgatacctctcagcttcagccggaacagatcaaccgggcggtggtagagaccgtcgcggagaacacggtcgacggcattatcgccccgctgtttttccttctgctgggcggtgcgccgctggcgatggcctataaagcggtgaataccctcgattcaatggtgggctacaggcacgaaaaataccgcgcgatcggcatggtcagcgcccgtatggatgacgtggcgaacgcaattcccgcgcgcctgagttggctcttgctgagcattgcggcgtggctatgccgcgagggaccctcccgcgcgctgcgcgtcggctggcgcgaccgctacaaccacagcagccccaactgcgcgtgggctgaagcgacggttgccggcgcgctgggcgtccggcttggcggacccaacacctattttggccagcgcgtggaaaagccctggattggcgacgcgctgcgcccgattgcggtagacgacatttcccgaacgattcgactgatgtgggtttcctccaccctggcgctggtgctgtttattgcagcacgctggctgatggttggcgtggcctga

SEQ ID NO: 171708 - DNA, 1380 bp, Enterobacter cloacae
atggagccaaagcagtacgcgtttgttctggcaggtacaggaagcggttgtggtaaaaccacggtgacgcttggcctgttgagtctgttaaaacagcgtgggttacgcgtccagccgtacaaagtgggccctgactatcttgatactggctggcataccaaagtcagcggtaccgcctcccgcaacctcgacagcttcatgctgcctgaatcgatcctcaacgcgctgttttgcgagcatatgcagcaggcggatatcgcggtcattgaaggcgtgatggggctgtatgacggctacggcaccgatccgaattattgcagcaccgccgcgatggcaaaacagctgggctgtccggtgattctgctggtagacggcaaggcggtttctacgtcgattgccgcgaccataatgggttttcagcgattcgatcccaccctcaatattgccggggtgattgttaatcgggttaacagcgaatcacattatcagttgctcaaagcggcaattgaacactattgcacggtacccgtcctgggttatgtgcctcgcgttgagggtgtcagtttacccgagcgccatctgggattggtcaccgcccgggagtcggttgcggactcgcagacctggcagaattttgccgcccttctcgaacgtacgctggatatcgaacaacttctcgcactcagccagatggcgtcgctgccgcagggtgcctggcctgcgctgcctgatggggacgccgggcgcgggttaacgctcgcgatggctgacgacgacgccttcaacttctattacccggataacatcatgctgctcgaacgtaccggggtcgagataatccgctttagtccgctccgggagagccgtttacctgactgccagatggtctggctcgggggcggttacccggagctttatgcggcacggcttgcggaaaacaccacaatgctcgccagtctgcaggaggcgcaccggcgcggcgtggcgatctacgccgagtgtggcgggctgatgtatctcggcagcgcgctggaagatagcgagggagtgacccaccggatggccgacattctccccggctacagccggatgggtaaacggctgacccgttttggctattgtgaggcgcagacgcgccagcccacgctgctggccgatagcggggaggtgctgcgtgggcatgaattccactattccgacttcttccccgataccccagcggtgctggcgtgccgaaaagtgcgcgatggcgtgacgatgcaggaatgggcgggcggctggcaggttggcaacacgttcgcaagctacctgcacctccactttgcccaacgtcccatgatgctcagccgctggctggcggcggcgaggggggcgcgatga

SEQ ID NO: 171709 - DNA, 891 bp, Enterobacter cloacae
atgactgaccagaaaggtgagaacgtggctgttgcgcaatgccccgcgtcgtgcggtgagcttatccagggctggattttgggcagtgaaaagctggtttcctgccctgtcgaatggtacagcactgttgaggtgagccacggctcagccctggcggatgaacgcccgctgtcgcgcgcgatggttgaacgggtattgcagtactggcactacccggcgcagttgagccaggagattcgcattgatgtgcactcgaccatcccgattgccaaagggatggccagcagcaccgcagatattgccgccaccgccgtcgccaccgctcaccatctggggcatcagctcgacgaaagcgcgctggcaacgctttgcgtttcgctcgaacccaccgacagtaccgtgtttcgccagttaacccttttcgatcataacgacgcctctacgcaaattccctgcgacgcccagcccactctcgacctgcttgttctggaaagtccgcaaacgctgcgcacggccgattaccaccgcatcccgcgtcaggcggggctacatgccggtgcgccagcgctgaaacgcgcatgggaaaaggtacaggaagcctgtatgacgcaaagcccttaccggctgggcgaagcggccaccctcagcgccatcgccagccagacgctgttgccaaaaccggattttgacgctctgctctcactggtggaggagtgcggtatctacggggtcaacgtggcgcacagcggcagcgtcgtggggctgatgctggacagaaataaagacgatgtcgattatgtgaaatggctgttagcgaaaaaacagctcacccgccactggcctgaacaacacctgctgcggatggtaaaaggcggcgtgacgctactctga

SEQ ID NO: 171710 - DNA, 648 bp, Enterobacter cloacae
atggactatttcccgattttttgcaacctgaagggtaaacgctgcctgatcgtcggtggcgggcaggtggcgacgcataaggcgaagagtttgctggcagccggggcagtgctgcgtctggttgcccccaccctgacgccagaacttgccactctgcacgcgtgcggagacatcgaatggttcccggcaacgtttgcgccgcagtatctgcacgcctgctggctggtcatcgccgcgaccagcgatccgcaggtgaaccgtcaggtcgccggggccgccagcgcgaggcatctgttttgcaatgtcacagacgacctttctgccgccacctttatttcaccggccattattgaccattcaccggttattattgcgctcagctgtgggggcaacgcgccggtgtacagtaagatcctcaaagcgcatgtcgccgcgcatcttcctccaggtatgcaggaaagcgtgcggctggcgggagcgcttcgtgaaagggtaaacggtgtgtgcagtgaccgggagcgcaagcgtgcattttgggccgcgttcttccggcatgttccgctgcaacaggcactggcgcaggaacacgaacacgaggtcaggcagcaggtggagtggctcattcagcacaggctgctctcagagtag

SEQ ID NO: 171711 - DNA, 1071 bp, Enterobacter cloacae
atgagtgagcatggtggtaacgttctggaaacggggctgcagttggggatcgatcccgggttgctgttggactttagcgcgaacatcaatccgttagggctacccgagcgcgtcaggtcgctcattttgtcccatctggatatcatcatgcagtatccggacgttgaataccgccatcttcaccaggcgctggccagcgccagtcggtgtgactatgaccagacgattgccgggaatggcgaaacggagttgatctatggcctggtgcgaacgcttgcccctcgccgggcaatgctgctggtgccggggtttgccgagtatcgccgggcattgcagcagcagggatgccagataatcgattatgtactgagtgagtcgaacgggttccaggtggatttttccctactggacgccgttcgcgcacaccggcccgattgcctgttcatcgcgaccccaaacaaccctaccgggttaatgcctgatgccgatctactcgaccgcctggcctcgctgtgcgaagcgctgcagattgcgctgattgttgatgaagcattcatcgattttatgccgcagggctcgtcgctggccccacggctggctgagtcacgctatctttacctgctgcgttcactgaccaagttttttgccattcccggactgcgcctgggatatctgctgagcgggaatacgcacactattcgccagatgaaacgcacccgtgaaccctggtccgtgaatgcgttatcggcgctggtggggcagcatttgttactggatgaggactatatttctcgcagccatgcctttatcgcccgggagcgggatttcctgtggcaggcgatgacgcgcttttcatcgctggtggtctgggagccgcaagccaattttaacttcttccgctgcctgcgtcaggggttcaacctgaaggcagcgctgctcggccatcacatccttatccgccactgtgaaaactacccagggctcgatcgtgactactatagaattgccgtgcgtaccgaagcggagaaccaccggtttattgccgcgctgagtcaggttttagaaggctaa

SEQ ID NO: 171712 - DNA, 774 bp, Enterobacter cloacae
atgatgagtaaagggaaagtttggcttgtaggggcagggcctggcgatgcgtctttgataacggtaaaaggtctgcactgtatccgccacgcggaagtgattgtccacgatcgcctggttaaccccgaactcctggcgcaggctccggcaggctgtttgattattgatgtcggtaaaaccccgagccatcatccggttcctcaggaacaaatcaatgccctgctggtcaggcatgccggggagggacggcaggtggtgcgcctgaaaggcggggacccttacgtttttggtcgcgggggagaagaggccgagcagctggcgaaagacggcctgtcgttcgaaattgtgccggggatcagttctgcgattggcgggctggcctatgccgggatcccggtcacgcaccgtcattacgcctccagttttcatattgtgaccggtcatatgtgccaggggaacgacccgcaaaactggcatgcgctggcgaaaatcaacggaacgctgatcgttttgatgggaatgacccggctgacagaaatctgccagcagctgattgagggaggcatgtccgctacgacgccggtagcggtggtgatgtatgccagccagtctcgtcagcagaccgccaaaggtacgctgaccgatatccatcttgaggttgaacgtcaaaaactgcatgctcctgcgcttattgtcatcggtgaggtcgtcaacctgcaggagatactggcgtttaccgcatcacatcttgcgctgaatgaggttgctgtctga

SEQ ID NO: 171713 - DNA, 450 bp, Enterobacter cloacae
atgaagaaatcaacacttgtcattggcgtcattggtgctgactgccatgcggtaggcaataaagttctggaccgcgtttttacttctcatgattttcacgttatcaatcttggtgtcatggtgagccaggatgaatatattgatgcggccatcgaaacaggtgctgatgctattgtcgtttcatccatctacggccatggcgacatcgactgtctggggctgcgtgagcgctgcatcgaacgcggtatcggcgacattctgctttttgttggcgttaatctggtcgtgggtaagcacgattttgccgatgtcgaagccaaattcaaagagatgggtttcaaccgcgtgttcgccccgagccacgacctggaagacgtctgtcggctgatggcgaatgatatccagcagcgtcagcgcgttgaagagctctgtcttgaagagggcttctga

SEQ ID NO: 171714 - DNA, 1389 bp, Enterobacter cloacae
atgcaaatcgtctcagtcgacattggctcgacgtggaccaaagccgcactcttcacgccggagggtgatgcgcttacgttggtcaaccacgtgctgaccccaacgacgacccaccatctggcggagggcttctttaccagcctgaaccaggtgctaaacgttgccgatgcgcgaccgttgctgaacagcggggacgttacgctgaaatactcttcgtcggcaaaaggcggcctcgccgttgccgcaatggggctggtgccgtcgataaccctggagtcggccaaagtcaccgcccattcagcgggcgccaaaatcgctcagtactactcctacaaactgaaccgccacgatatccaggcgctggaggactccccgccggacatcctgctgttcacaggcggtacggacggcggagaagagagctacggtcttgccaatgcccgcgcgctggcagcgtcctcgctggattgcgccattatttacgccggaaatcgcgatattcaggacgacgtgcaggccattcttggccataaagatttgatcaccgtcgacaatgtgttgcctgacctcgatcacccgaatccttatgccgcccgcaaggccatctgcgatgtgtttctttcccgcatcgtgaaggggaaaggactggacgttatcgtcggggaaaccggcgaagagccgatgcccacgccatggaccgtctacgagctggtgaaagcgatcagtgaggtcgacagcgcgtggaaagaattcatgctgatcgacatgggcggtgccaccaccgacgtctattccgccagcgccaacacgctctcgccggataccgttctgcacggcgtgcctgagccatttgtgaaacgcaccgtagagggagacctcggcatgcgcgtctcggcggtcgtggtcggtgaaagtacgcaggaactggtgaacgcggtgttcgcccatcagcctcagcgcaaggacgcgttttatggctatctgcgtcatctggtcgcacatccggattatctgcctgtcaccgaagaagaaaaacatttcgacacgctactggccgggctgtgcgtggggtacgccagcgaacgccatgccggcaccaaaaaacaggtctgtacctgcgtcggcaacgtcgatttgcaggtggggcgcgatctcaccaccgtgcgcaaagtggtgggttccgggggatggctctcccgcgccagccagttcgatgtgcaccgctggctgaagtaccgcgagctggacgacagcagcagacgcgttcttttacccgggcagtttgattattaccgcgatgcaaaaggtctgcttcctctgctggcgaatgtcgccaggctggacccgcaggcggcggctcgcaccagtattcattgtttaaccctataa

SEQ ID NO: 171715 - DNA, 1446 bp, Enterobacter cloacae
atggaacttcgaaataaaaagctaacccatgacgaattcatgactgagcggcaacaggtcttacaaacctggcataccggcaaggacgttgagaacttcgaagatggcgtgaagtaccagcaaaccattcctgagcaaaaacgcttttctcacgcactactgaaggccgaccaggaaggtaaaaccctgagccagccgcgcgcaggcgtagcgctcatggatgaacatattgccctgctgaaaacgctgcaggaagagtgtgatttgctgcccagcaccatcgatgcctatacccgtctgaatcgctatgaagaggccgcggtagggatccaaaaatccatcgaagcgggtacctccaaactgaacggcttaccggtcgtcaaccacggcgtcgccgcctgccgccgcatgactgaagcgctggagaaaccgattcaggtacgtcacggcacgccggatgcgcgcctgctggcggagatcgcgatggccagcggttttaccagctatgaaggcggcggtatctcttacaacattccgtacgctaagcgcgtcaccctggaaaaatccattcgcgactggcaatactgcgaccgcctgatgggtctttatgaagagaacggtattcgtatcaaccgtgaaccgtttggcccgctgaccggcaccctgatcccgccgtttgtctcccactcggtggcgattatcgaaggtctgctggcgctggaacagggcgtgaagtcaatcaccgttggctacggccaggtgggtagcctgacgcaggatgttgctgctattcaggctctgcgtgaactgtcccacgaatatttccataaccacggttttgacgattacgagctgagcaccgtcttccaccagtggatgggggggttcccggaagatgagtcgaaagcgtttgccattatctcctggggcgcagcggtggccgggatgtccggagcgaccaaagtgatcaccaagagcccgcacgaagcattcggtatacccaccgccgccgccaacgcccagggactgaaagcctcgcgtcagatgctcaacatggtgagcgatcagaaattcccgccgtgtgccgccgtcgagcaggaagtcgagctgattaagagtgaagtccgcgccgtgctgaagaaagtcttcgagctgggcaacggcgatgtcgcgcgcggtacggtgctggcgtttgaagctggcgtgctggacgtgccgtttgcccccgcctcctgcaacgcgggcaaaattctgccggttcgtgataacgccggtgccattcgcgtgctggaagccggcgcggttccgctgccgaaagatatcctcgacctgcatcacgattacgtcgccgagcgcgcgcgttttgaaggacgtaaaccctcattccagatggttgttgatgacatcaacgcggtatcccacagtaaattaataggaagaccataa

SEQ ID NO: 171716 - DNA, 1242 bp, Enterobacter cloacae
atgaaaattaaacaggcccttttcaccgcaggctactcctcgttctattttgacgatcagcaggcaattaaaaacggtgccggacatgacggatttatctataccggcaacccggtcacgcctgggtttacgtcagttcgtcaggcgggtgaatgcgtctccgtgcagttgattctggaaaacggcgcggtggcggtgggcgattgtgcagcggtgcaatattcaggtgcaggcggtcgcgatccgctgttcctggctgaacacttcattccgttccttaacgatcacatcaagccgctgctggaaggccgcgacgttgaccgcttcctgacgaacgcccgattctttgacgaactgcgtatcgacggccatctgctgcataccgccgtacgttatggcctgtcgcaggcgctgctcgacgcgacggcactggcgaccggtcgtctgaaaacggaagtcgtttgtgatgaatggcaactgccgtgtgtccctgaagccattccgttattcggacagagcggcgacgaccgctatatcgccgtcgacaagatgatcctcaaaggcgttgacgtactgccgcatgcgcttatcaacaacgtggaagagaaactgggcctgaagggggaaaaactgcgtgagtatgtgcgttggttatccgaccgcatcttaagcctgcgcaccagcccgcactatcgcccgacgctgcacatcgacgtgtacggcactatcggtttgattttcgatatggacccggtacgttgcgccgcctatatcgccagcctcgaaaaagaggcccagggcctgccgctctatattgagggaccggtggatgcgggtaataaaccggatcaaatccgcctgctgaccgccatcacccacgagctgatgcgtctgggctctggcgtgaaaatcgttgccgatgagtggtgtaacacctatcaggacattgtggacttcaccgatgcgggcagctgccacatggtgcagattaaaaccccggatctgggcggtattcacaacatcgttgatgcggtgctgtactgcaacaaacatggcatggaagcctatcagggcggtacctgtaacgaaacggaaatcagcgcccgcacctgcgtgcacgtggctctggctgctcgcccgatgcgcatgttgatcaaaccgggcatgggcttcgatgaaggtcttaacatcgtgtttaacgaaatgcaccgcaccatcgcattgttgcacactaaggattaa

SEQ ID NO: 171717 - DNA, 1371 bp, Enterobacter cloacae
atggcacgtacatttaagatcttatcgccaacggcaatcctgggctatggcttcccggaagagagttttcgtaaggccatggaagcctcgccggatcttattgctgttgacgcgggctcatccgacccgggtccccactacctgggggcaggtaagcctttcaccgaccgggcgggggtaaaacgcgatctgcgctatatgattgtggctggcgttaagcacaacatcccggtggtgatcggcaccgccggagggtccggtgccgcaccgcatctggagtggtgccggcagataatccttgagattgctcaggaagagaagctctcattctcgatggcgctgatcccatcggatgtcgataaagccacggtgcatcaggcactggacaacgggaaaattacagccctggatttcgtcccggaactgacccacgaggccatcgaagagagcacctatatcgtggcgcagatgggcattgagcctttccagcgggcgctggcggccggggcacaggtggtgctgggcgggcgggcgtacgatccggcctgctttgccgcactgcccattatgcagggcttcgatgaaggtctggcgctgcactgcggtaagatccttgagtgcgcggcgattgccgctacgccagggtccggctccgactgcgcgatgggcatcattgacgagcacggctttacgctgaaaacgtttaatccgaagcgtaaattcaccgaaacgtcggccgcggcgcacaccctgtatgagaaatccgacccgtacttcctgccggggccgggcggcgtgctgaacctgaaagggtgcagcttcaaagcggtcaatgagggcgaagtgtacgtcagcggttcccgccacgaagaaacgccgtatgcgctgaaactggaaggcgctcgccgggtcggcttccgctgtctgaccattgccggtacgcgcgacccaatcatgattgccgggatcgataacatcctcgaagaagtgcaggtcagcgtgaagcgcaacctctcgctgaatgacgacagtatccgcatgacgttccacctgtacggaaagaatggtgtgatgggcaaccatgagccggtgcagtctgccgggcacgagctgggtattttgctggatgtggtggctcccacccaggatatcgccaacagcgtctgttcgctggtgcgctctaccctgctgcattacggctatgaaaaccggatcgccacagcgggcaacctcgcgttcccgttctccccttccgacattcagagcggcccggtgtatgagttctcaatctatcacctgatcgaagcgagcgacgcgctgcgatttgatttccaccttgagcaggtcacgccagaaggggttcggttatga

SEQ ID NO: 171718 - DNA, 318 bp, Enterobacter cloacae
atgaaacagagtattcgctcactggcacaggtcattcgctcaaaaaacgccggaccgtatgagctggttctggatattttatttaaaacgcatgaagactatcagcgggtaaaagcctcgaagcaattaacgccacagcttatcgcccgtttatataacgtgaagcctgactttatacatcgcattgtctggttcgacccggccaatgcggtcaaaatcgtcatgcctcgcgatattatctccggcaacattggtgacaatgatgtttatggtgcccagcagcatgcaccgttattaagcattgagtttgatctgtaa

SEQ ID NO: 171719 - DNA, 1293 bp, Enterobacter cloacae
atgaaaaaaataagcttaacaaaaatgatcatattaggtttgatactcggcatgatagccggggtggtcattaataatatggcatcagcagatacagcaaaatcgtacgcacaggatatttctattttcaccacgatattcttacgcatggtgaaaatgattatcgccccgctggttatttcaaccctggtggtcggcatagccaaaatgggtgatgcgaaaacactcggccgtatattctccaaaacctttttcctctttatttgtgcttcgctgctgtcgatcgcgctggggctggttatcgtcaatatcttccagcctggggctggcattaactttgtcgctcatgacgccggggccgtagcagccgttcagtccgaaccgtttacgctgaaagtgtttatctctcacgcggtaccgaccagcatcgttgatgccatggcccgtaacgagattctgcaaatcgtggtgttctcgattttcctgggctgcagcctggcggccattggcgagaaagccgagcccatcattaaggtgctcgactctctggtacacgtgatgctcaagctgacgggctacgtcatgctgtttgcaccgctgaccgtgtttgccgcgatctccgggctgattgccgaacgcggtctgggtgtgatggtcagcgccggtattttcatgggcgagttctacatgacgctcggcctgctgtgggcgattctgattggcctgtccaccatgattgtcggtccgtgcatcagtcgtctgacaaaagcgatcctcgaacctgcgctgctggcttttacgacgtcaagttcagaagcggctttccctggcacgctgaacaaactggaaaaattcggcgtctcctccaggattgccagctttgtcctgccgatcggctactcctttaacctcgtcggctcaatggcctactgctcgtttgctaccgtgtttatcgcccaggcgtgcaacatcgaactgagcattggggagcagatcaccatgctgctgatcctgatgctgacctcaaaagggatggcgggcgtgccgcgtgcatcaatggtggttattgccgccacgctcaaccagttcaacattccggaagcgggcctgattctgctgatgggcgtcgatccgttcctcgacatgggccgttccgccaccaacgtgatgagtaacgcgatgggtgccgctatcgtcggtcgctgggaaggcgagcacttcggcgtcggctgccgcggcaaggttccggccaaagaaagtaccgcttcagacactgaaatcgccatgtattga

SEQ ID NO: 171720 - DNA, 1002 bp, Enterobacter cloacae
atgaagataaacattttcggcgtcagcctcttatcggtcagcctgttttttagcgccgccacgctggcgcaacccgcgccggattacgcgcagctgctggagcaggctcatcaaaaatttaaagataattttgagggaaaagtcgccgactacattcccgccctggcgacctatagccccaataatttcgccatcaccctcgccaccgttgacggcaacatttaccaggttggcgatgtgaaaaaagcatttcccatggagtcgctgagcaaagttttcaccctggcgctggcgatggagcagcgtggcccacaggaggttctggataaactcggcgccagtgcgaccggtctgcccttcaactccggcctggcggttgagctgaccaaaggggcgccggaaaacccgctggtcaatgcaggggcgatgagcacggtaagcctgattgaggcgaaagataagtccgaccgctggaacaaaattctcgataacctcaacgcgtgggcggatgcctcgctgaccgtcaacgagccggtgttcaaatcagaaatggagaccaatcagcataaccaggcgctggcgatgctgatggcgtcctataacagcttttatggcgatacccgggatgccgtcgaaatctatacccgccagtgttctgtagacatcaccgttgagcagctcgccaaaatgggcgcggtgctggcgaacaggggcaaatcgcctttcaacggtaagcagttgctgaatgaacgctacgtgccgcaggttctggcggaaatggcgattgccgggctgtacgacggcagcggcaaatggctgtacaccgttgggatcccggcgaagagcggcgtcggcggcggcatggttgccatcgtgcccggccaatacgccatcgcggtctattcgccaccgctggatgtcgccgggaatagcgtccgcgcccagcagacgattgcgtatgtcgctgaggcgacgcaggccagtctctttttagcccattga

SEQ ID NO: 171721 - DNA, 1653 bp, Enterobacter cloacae
atgtctaaaccatttgtctggcaggacctgtttgttcagagtgaagatacgacggaatatgaactcctcagcgcgcaacacgttacggtgacggagctggagggcgaggaggtcattaaagtggcgcctgaggcattgaccctgttggcccagcaggcattttatgaagcctcatttttcctgcgcgccggacatttaaagcagatagccagcatcctgcacgacccgcaggccagcagtaacgataagtatgtcgccctgcagctgctgcgcaacgccgaagtatcggcaaaaggcgtactgccaaactgtcaggataccggcacggccaccattgtggcgagcaaaggccagcacgtctggaccggcggggacgatgccgaagcgctgagcagagggatttacgccacctttagcgagtgtaacctgcgctattcgcaaaacgcaccgctggacatgtataccgaggtaaatacccagaccaacctgccggcgcagatagacatcagcgccgcaccggggagcgaataccgcttcctgtttgtcaataaaggcggcggttctgctaacaaagctgcgctgttccaggaaacgaaatccattttacagccggagaaactcaccgcgttcctgatcgagaagatgaagtcgctcggtactgcagcctgtccaccgtaccacattgcctttgtggtcggcggcctctctgccgaccaggcgctgaaggtcgcgaagctggcttcaacaaaatactatgacaatctgcccaccagcgggaacgagctgggtcaggcgttccgcgacacggcgctggaaaccacgctgctcaacgccagccgcgaattcggcatcggcgcccagtttggcggcaagtacttcgcccacgatattcgcgtcatccgcctgccgcgacacggcggttcctgccctgtcgccatggcactgtcctgctccgcagaccgaaatatcaaagcgaaaatcaacaagcagggtatctggctggagaagctggaacataacccagggaaatacatcccggacgcctgccgtgaggaaaacgacgcccggaccgtacagatcaacctgaaccgcccgctgcgcgagattctgcgcgatatgtccaccctgccgatcggcacccggttgtcgttaagcggcccgatcgtggtcgcccgcgatattgctcacgccaaaatcaaagcgcggctggataacggcgaaccgatgccggagtatatgaaaaaccatatcgtctattacgctggaccggcgaaaacaccggagaatcaggcctgcggttccctcggtccgaccactggcgggcgcatggatggctacgtcgatgctttccaggccgcgggcggaagcctgatcatgctttccaaaggcaaccgcagccagcaagtcaccgatgcctgccataagcacggcggcttcaacctcggcagtatcggcggtgcggcggctctgctggcgcagcagtatgtgaaaagcctgcgctgccttgagtatcccgaactgggcatggaagcggtgtggatgatggaggtcgaaaatctgcccgcctttatgctggttgacgacaaaggaaataatttcttcagccagtttgagcagcagcatcgctgcgcatcctgccctgccggacattaa

SEQ ID NO: 171722 - DNA, 603 bp, Enterobacter cloacae
atggaagcgcgagctaacgcagacagacaccgccaacggcagcaaaagcgtaaagagcaggttgagagccgcgtagcggcggcaacggagaagagaggcattctgatcgtcttcaccggcaacggaaaaggaaagtccaccgccgccttcggcacggcgacgcgtgccgtcgggcacggtaaaaccgttggcgtcgcgcagtttattaaaggtcagtgggataatggcgaatacaacaccctgcatccgctcggcgtcgaatttcacattatgggcaccggttttacgtgggaaacacaaaaccgggaaacggatatacaggccgcaacggcggtgtggcaggagagcaaacgcatgctcgctgacccacgttatgacctggtggttctggatgagctcacctatatgctggcttatcactatctggacagtcaggaggtgatcgcggcggtggagaaccgtccggtacagcagaccgtgattgtcaccggacgcggctgtcactcgcaattactggcgcttgccgacacggtcagcgaaatgcgcccggttaaacacgcatttgacagcggtatccaggcgcaggagggcatcgactggtaa

SEQ ID NO: 171723 - DNA, 1005 bp, Enterobacter cloacae
atgagaggaaaaatccccaagagcgagttgctggtgacgttcgaagttgtggcacgtcacgaaagctatacccgcgccgcagaagagctggcgttaacgcaaagtgcagtgttcagacaggtgacggccctggaggagtttttacacacctcattatttaaccatgccaaaaaacggatttttctgaatgcggcaggaaagcattatctgaatatcgtcaaagagacgctgaataagctggagcgcgataccaatatgataatgaattggcagcctgctgttcaggtagtggaactggcggtcaatcccaccttcagtacgcattggctgatccccaatttatgggagtttaataaattaaatcctgatattattgttaatattcactcgctggccaatatcggcgattttttgaatcgtgaatatgatgcggctattatgcgcgcagatttttgttctccgtggtcggaagtcgattatttatttgaagaggagatcctgccggtctgcagccgaagcttgcttcctcatgcggagcagaagctgggggttgaggagttgctaagggagttcccgctgttacatcaaagcactcgcatcaatggctggcaggagtggtttgcgctttccggtattaccagtccggatgtgaatctgggcccgcgttttgacctcctctcgatgctgattgccgcagtacgatcgaatcttggggttgcgctgcttccccgcttcgccatccagcatgacctggactgcggcgagatggtaatcccctgtgatgtgcctatccgcaccggcaaccgctttatcatgacatggcgggaagaaaagtctcaggcacagccgttaaagtcttccgcgagtggctgttgcaaaaatcagtggtatccccggttgagtcataatgccggatggcggcagtgccgcgcgccatccggtgcagacacgcttaccagtcgatgccctcctgcgcctggataccgctgtcaaatgcgtgtttaa

SEQ ID NO: 171724 - DNA, 1428 bp, Enterobacter cloacae
atggctaatgctgttggtcaacaaatgaaacaggtcggagaggcggttaatggatatataaatatccgctatgataaattatcaaccttatccaatgctgccggaacaggaaccgatccgggtccaagaacctgctcaggttcagtatgtgaaattacttaccagacattgattaacgaaggtttgctaccttcaacctacacaggcactaatgctaataaatcttcgtatagaatcatattaaaacgtgatggaacttcccctaactatgttattaatggtcttataacgacatcgacggcatggattgaaggcggaaaaacacgttatgatttattagggaaagccatgcaaacagcgggtattgacagtggtatgacgcaatcagcaacgttagcatcaggtttgcagggtgcatggaaagaaacatcaacagtttacagtaatatcaccagtgcaggtcttatggcctatcgtgttggatacgattctgctatgtattctgtttatctccgtcgtgatggaacattgccgatgacgggaaacctcaatatgggagctaatgatattgataatgcaaaaaacataacagcatcaggaacaggtgattttggaagtgatataacatcaggaggaacagtaacggctgctggtcaagttatagcgcacaatggatatggcgacatgataacattcggtggtgatgctgctaataatgattatgaaatacgtttaggagcagcaaagcagttaacgttatactcaccatcagcaggaaactatactactgtattacaagttaatagaaatgttaagatagatcaaagattagggataatgggatatgacccgaacgatttacctgccggatggggtggcggtttaagaacgcttgatgtatatgccgcgggcactctggcaacaggaagtgggggtaatctgacatcatatatgaatgctacgggtgttcatacacagtccaatattacagcctctggaaacatagaggccgccaaaaatgtcaaaggcgccacattagaatccactggacgcactacggtgggagaatttatacagcttaatggacaggcatcagttaatagtggttgctcacctaatggtttacaagggagagatgatgaaggttcggcattaagttgtgttaatagggtatgggttaagtttaaacttaatgaaaagatatatagtgttgtatttgaatcttccaccactggaagtggtgatgtttataaaacattaaatcttggcaaacaccttctgtgtgttttttcaggagatcagtctactgatatggcaactaaacactctattgtttatcgttcaggcgacacatggattttagaaatgagggttactggttggaaagcaggtgttgttacatgggcaagagcttcttgttttaattga

SEQ ID NO: 171725 - DNA, 516 bp, Enterobacter cloacae
atggttgaccttcacattaccgttcgtcccacacgttccggcgatgtggccgccctgtccgctattgaacgcgcggcggccggacgatttcgtgacatcccggaattcgcctggcttgctgacggcgaggtcattaccgctgagcaacacctcgactatgccgaacgcgggttcagctggctggcgctggcgaacgaccgccccgtggggtttatcctcaccgaagcgcacgcgtcgtcgctgtttattgtggagctttcggttgatcgggcctggcagggaaaagggataggtcgacaactcatcgcctgtgcggctgaccatgcccgcaaaatggggctgactgcgttaacgttgacgacgtttcgcgaggtgccatggaatgcgccgttctatgcgcggctggggtttgaatacgtcactgaactcacgcctgagctgcgtcagaagagggaagaagaggcagcgcacggtctggcgtatgatgctcgctgcgccatgcgcctgcctctttaa

SEQ ID NO: 171726 - DNA, 540 bp, Enterobacter cloacae
gtgaaaattaacgtcatcggaaccagcggaagtggaaaaagcacgctggcgaagcagattgcggccgagctggacattccctgtatcgagatggaccgactctactggcgccctgactggcagggaaccccggacgacgtgtttcaggaaacgctggagcaggcgctgcaggcgtcgccagactgggtgcttgacggtaactataaccgcacgcgcccggttaaatggcgccatgtcgatgttgtggtgtgggtcgattatgggtttacccgcaccctgtatcaggccgtcaccagagccatcaaacgggcctggcataaacgggaactttggccaggcacggggaataaggagagttttcgccgcgcgttcctgagcagagaatccattatcatctggacgataaaaacctggcgcaacaaccgcaggcgttatgaagccgatctgcaaaacccgcgctacgcgcacattcgctttgtccgtattacccgccgcagtcaggtagatgcgctgattgcctctctgaagacatattcttag

SEQ ID NO: 171727 - DNA, 231 bp, Enterobacter cloacae
atgctgcacagggcgctgggaagtggttggggggtattgctaccgggagccgttctcggcgggttgatgtttgccgatctctcccttgctgtctggaaagccattatcgtggcagcactattagtcacgtcagcgatgatttggcacaagcaactgcgccactttgtgttactgccatcctgtgtcgcactggtcagtgcaatgctggtgatactgatgagtctgaaataa

SEQ ID NO: 171728 - DNA, 840 bp, Enterobacter cloacae
atggacgcttttttcacgccctggtacccatggctggcattactcctgggggggctgattggcagttttctcaatgtggtcatttatcgcttacccatcatgatgctgcgtgaaaatgcgactgatgaagaaaagttgactctgccagatgttaatttatggtggccgccatcgcattgtccccggtgtcagcaaaaagtgatgccatgggataatatccctgttgtcagctggcttcttttgcgtgggaaatgtcgatattgtcactgtgcaatatcggctatttatccattaagtgaagctgtaatcggtgtgtttttttggggggtagtattctgcttttatccgcaatatagccttgttcagctgacgttcatcgcactatttttatgcttgctctatacgcttgcacttatcgacatcactacgtttttgctgcccgacagtcttgtgtatctgttgttatggaccgggcttatcgccgctgtgcgtaatattatcccggtctctccgcgagatagcgtcatgggcactgtttttatatggggttttacctggttgatggccgaaggttaccaacggattaaaggacgtgaaggttttggaaaaggcgacgtgaaactgtatgccgcctgtgcggcctggttgggggcagcgaacgttgccatgctcattctcggatcagcgttgctggggtttgcttgttttctgctgcgtcattgcttcgctcgttgccgtctcatcgcggctaaagaagataaacaagtgtatatcccattcggcccggcgattgcggtgatgtcggtgtacctgatgtatacggagatacttcatctatga

SEQ ID NO: 171729 - DNA, 1176 bp, Enterobacter cloacae
atgatctcgctgctgcttcatttacttctgtttcagtttgcacctgatggcgtgagtactccgactgagcatactgtcacccgcgccacgcagaggctgttatccccttctggtttatatgatcccgccttgttagccatgttggggcaaataccgcgtactcctgacatgcgtgcatacccggcgtggcgttccatgtacattggattcgagccgctttcctgtcagatcagcgctaaaacgttatggcgtaaggctttcgctcttttaccttctgagatcatgccctataaaagaggggatttttcctgcgcacccgtcatggcactggcccggttcttttccgttgttgctccgtatgaagccgaagatgtcgcctatgaagatgatgaggctgccagcaatgttttctctgtcctgaatctgacgatcccgacgcgaagcgcttcgcctccagtatggcggcctttattgcaacaacgtactgcttctttgatggatgacattcccaaagaggcattcatttacccgctcacgcatgacatcgtggtgacctcaccttacggaatgcgctatcacccgataatgcatcaatttatgcgtcatgaaggcgttgatttccgtgcgcctgtaaatagccaggtcatggccattgctgatggagatgttgtggagacgggttatggccctgtgacgggcttctacattaccgtcaatcatgaagatggctggagcagccgttacctgcatttaaattctgttcaggtttttaaaggcgataaagtgctgcgaggcaatgttattgcgttatccggagcaaccgggcgcaccaatggacctcatcttcatctggagctcagtcagcatcagcagcttttggatcctatgaatgtgctttccgcgtcgacgttgacgcctaacgtcagcgttgctcagaggaaaccagcccaggaagaggccgcaaaaccgaaaacagggcccgtctctaccactcccacgatcgcgctgatcagtggagaaggggaaaatatgcaggtaggcgttcgagtgggcgccagaacgtttttttacagcccgggtgagccagttgagactgatgcaggcatatggcgcatagttaaacgttatggaaaatataagcttgttaagcaagagaagaagggtgattacaattag

SEQ ID NO: 171730 - DNA, 540 bp, Enterobacter cloacae; identical to SEQ ID NO: 171588

SEQ ID NO: 171731 - DNA, 2577 bp, Enterobacter cloacae
atgtcattccgatacgcattattctctcttctgctgtgtgccgccctgaatgcacacgcagaagaacatactgcatcgtctgttaccggaggcgaaaataatgatattgagtttaacgatcagtttttatttactactgacgggaatattgatgtgcatcgtttttcccgaggtaaccccgttacgcccggtattcatcgcgtaacgcttgttgttaacggcataacaaaagcggtgacggatgttgaatttaccgataacggtaccgcccgtgccacaccctgtattcccctcaaaatactaaagcagatggatgtagatatttctcatctcaaaatcggcgataacgacgatacgtgcctggatatcgccaccttatatccaggttcgacggttgattttgacaccacaagccaggcgctgaacgtcagcctgccgcaactgtttctgctgaaacacgcggcgggctatatcgacccgtcactttgggacgagggtattcccgcggggttgctgtcttacgatatgaatgcctggcataaccagggccagcagtcgcagcgcgacagcgcctatgccgggcttcactatggtgttaactacgggccgtggcggttgcgctcaaacggaagcctgaactgggatcagcagagcggtacccgctacgataaccaggatatttatctgcaaagggatattacgccgctcaaggcgcagatggtgatgggcgattcctggacacgtggagatgccttcgatgccctccatcttcggggtggccgtctgtttaacgatgaccgaatgctgcccggcggaatgtccagctacgctcctgtgatccgcggcagggctaacaccaatgccaaaatcaccgtcacccagagcgggaataaaatctacgaaaccaccgttccccctggggcatttgagattaacgatctgaatgccaccggttatggacaagacctcaccgtgactatagaagaggcagacggtagccaacacgcttttaccgttcccttctcctcggtcacacagatgttacggccaggctatgcccgctgggaggccggggtgggtgagttgcaggatgaggctttacatcactcacccagactggcgtttggcacactctattatggcctcaataacctttttaccggttataccgggctgcaagataccgatatgggtttttctgcagctctggctggcatcgccatgaacacgcctctcggggcgtttgcctttgatgtgacccgttcttcagcacagattgatacgattccggcaatgaaaggccagagctaccgtctctcctggaacaagaccgttgaccagacggatacgtctctgaatgtcgcagcgctgcgcttttcaacgcaggactatctcagcctggatgacgccgcccagttgcaggatcacattcagtatgatggccagagtgcggacgaagccaaacaaaacctccagcaaatgaagaaccagttacaaataaacctgaaccagccgctggacataaataaacagaactatggatctctttatattaacggcagctggcaaagctggtggaacgggaataaccagacggccagttatgcgatgggctacagcaacaattttcgttatggcagttataacgtgtctctgcaacggacctatgatgcatttggcgaagcagataacagcctctatttaaatttcagcataccgtttgactcgttcttaaaaaataaaaacagtctcgccggttttaacaacgtgaatatgggaatgagctcagacctgagacattcacataacctcaatatgacggctaacggtgcttcgcaagacagtcgctataactacagtgtgacgacgagttatagccaaagcaccgctgaaaatttaagtcaggtgagcgcctatggcagctataacagcgactatggccctcttagcctttccgcgtcgtcagattcacaaaacagccaacagtactctgccagctacagtggcggagcgattattcacggtggcggagtcaccttcacgcccggcagcattggtgaaaatgacgcgctggcgctcattaaggccagtggcgcaaagggagcccatgtgagcaacagccgtggcgaaatcagtgactcagggtatgtcgtcatgccttatctctctgcataccgcgaaaatcggatcaccctggataccagtaccttaacggaggatgtcgccgttgaaaataacagtaccgtggaggtaccgcgtaatggcgcggtggtgatggttgattttaaaacgaatgagggtcgctcggcggtgctcgaattaacgcgttcagatagcgggtttattccgctgggcgcagacgtcatgaatgaaaagggagacatcattggaagcgtaggccaggcagggcaagcatatgtcaggggggtaaatgaaacaggtaaattaaccgtagtatggggagcaggaacggatgaaacctgctcagtaaattatcattttggtactgatgaacagaaggtgggtttaaccaccatcctccataaccaaacatgcattatgcaaaggaaacattaa

SEQ ID NO: 171732 - DNA, 597 bp, Enterobacter cloacae
atggaaaataacgtaactgcttttgataaaaagcgatttctcgtccataccgcgctggttgctgttttattttcggcgacgtgcggcgtcagagcagcagagaacctcgacctgaccttcagcgcaaatatccgggaaacaacctgtgatattaaaattgatgggggaacaggtgatggcacaaataataccattacgattggcgctaacgggaatacccgtgtagatacgattgcaacgggagaagcaaaagaaaacttcaaactggtgatcaccgagtgcccttccagtctggtttcattaaagacggaagtggcaggtaccgcttcaggtagcgtcaacaccgctatcgcgaacggcatcgactcaccagcaggaggagccgccaacacggggctgtctattgcgcgtgtctctgctccggatgccccttttgtcatcaattcgacagatgacagtaaacggctggtatggacaccagcagaaatcagcgcaaaagaagttgggctggtggccacgatggtagaaaccgtagccaatcaggccacaacgggctcatttcgagccattgcgacgtttaacttcagttacgaataa

SEQ ID NO: 171733 - DNA, 555 bp, Enterobacter cloacae
atgcgtaaacatctgacggctttaacaatggcgatttgcggtggactgttgtccttcgcctcacaggcacagatcagcggtacatccagtctgacggcaacatttgaaaccaatgttgtgccaggcacctgtaccgcagaaattcaggattccacaggcaatgcatcgacagaaattaattttggcgatgtgttcaagtccgatctgacggcgaaaagccgtatcgaagcctttaaactgaatttcagcaactgttcgggggtgaaaagcgccaccgtgcaggccaccccgggcgcaggcacaagctgttctaccggatccagcgacaaatttggttcaacacacggaacggctttcgaagtctggaaaggtcttgccgataccggcaccgttctcaattgcaccacccaacctacccaaaacgtgacgatcagttcgggttccggttcgctggatatgaatgcgcgtattgttattgccgatggaaaaaccattgccgatgttacgcctggtgcggtgacatccctggtaacgttcatggtgacctatcagtga

SEQ ID NO: 171734 - DNA, 1107 bp, Enterobacter cloacae
atgataaaaaagagtgctttcaatgccctggtgatgcttctggtatttgccgcctttggaatgctgtgccgcccggcattggccgatcaaagctgttatatcgaaagcaataacgcgggcacatataccactggaagctcatcgcttcttaacctctcgacaaataaagtttccacgccaacgagcctggatgtgacatccacatatgtgatccagtttattaccagcaacccgataggctgtaaaaactggaccccctacgacaataccgtccactttacgaatgccgcagggaatttgctcgatacgcaatacaccacgccagagggcaacgccctgcttaaaaccacggtgccgggcattgactacactgtcgagttaatgtgttacgtatcagagggttgtggttcatcgcatccaacggttgatctctatctgaagggaggaaatggcacggataatacggtgccatcacaaagcagtggggctccctatgccgatgccgacagccaatggaagctcaaatttacgctctggatcacgccacaatttaaaccgcagaaaggtatcaataccggaaactcactcgccggtacgattgcctatttccaaattggaaccagcagtcagcccaaaattatcttcagtgccacaaccagcacgctgaaatttacggtcccggcaagcagttgctcatttggtgtcgcccagggtgataccgtctcgggtaataacgttgcgctgggtgattactggatagatgatattaaaaacaacaacacgccggttattcccttctcaatctcgcttgcaagctgttatacccccaagctcaaggtgaagatgacatcggcctttgtttctccggatcacagcatgttagggctgagtagcgggagcgcggcaggggtcgccgtcaggatcattaacacggatacttccagcatgatgatcccaaacagtgaaaccagtaccgatattgatcgcagcagtgactggtcatctctggagaatcttcacttttcagcccaactgttagccgatggcggggcgattaaagcgggcgatttcaatgcagcagcgacctttttgatggattatgaatag

SEQ ID NO: 171735 - DNA, 270 bp, Enterobacter cloacae
atgcgtttgtcgggctatgagcaaaaaaaagcccactcaggagtgggcaagaaatactggaagcaatgtgagcaatgtcgtactgaatacctgagtatttctctcaactattcagtgttgagaaagataatctttctcaacaaaagatgcaaccctacatttcatgtggcgcgatctgtccgctggctaatcgttacgcactctctcgttgtgatgcttatcacgaatttcctttctcagatcctgtgctattcttttttgtgtcgttga

SEQ ID NO: 171736 - DNA, 1839 bp, Enterobacter cloacae
atgtctcagcgatataaactctatcgtcgaaccagcggcatttatgttgtccgcatcagcgttccccaacgttttcgtcgatacgcaggacagtgtgagattcacacttcaacaggcactcatgaccttcatgaagcaaagcagaagtccgcgctcctgttggcggtctggtatcagaccttacaagagtatgaactaatggattatcaaactttgagcggcagcgccccgttacttgacggagagggcatgatctcgctttctaactttgcacagtcaatcgagttacctgtatcacagttaattcgagaggtgattaatcgtaatctgccgatattctggctggcgagtggtcaggcaggcttctatgttgatgattttgacgcagtggaacgagaaaaaggggcagagcgagagccccaacccggcgaggaagaagagccgcccaaacaagtcatcattctcaatagcgcatttgagttgggtatagagagtttcgtaaatggctatttgcggccctttaatccccggcatacgttagattgtctgctgaaagctggtgtatctgaagaggaagctgcatttcgaacgactggtgataatcaacgtgcaggctggtttttcgatttgcctggcgtagatctaactgctgataacttgctgattagcaaagttcatgcagaaagcctccggctaactaggctagctaaaaccaccccaccagttgtaattgctccaactatcgtatcgcctgcgagcgataatgattatgttaatcggaaatattatggcaacaatctctcctggcttcgcgataaatatctaaaatacagacgcgaccacaaggctaaggagtcggtgctcagtgctcaccacgatttctttgccttgatgatagaagtaatgggggatatccgacttgagcatttcgatcgtgatttcctacgtgcttatgaaagcaagttacgcactatccctgcaaatcgtaatttaaagaagattaaatacggcgttaaaacactggatgaactcatagtaaagtcggcagaatatggcgataagttgatgactggcgagtcagtccgcaagtatataaacggcctctatggctcaatgaagtgggctgtatctgaggggatacttatcaagtctccatgcgttgacttcttcccttctgaagataaaaccgagagagaccaagataaagttgatgtttttgaaccgaatgatttaaaagctattttctcgttaccgcaatatgtttcaggaactggcgagagaaataaacatgggcgttttcatcaatatcagccttattactattggatgcctttgcttgcattatttacgggggctagagttaacgaattagctcagctaaggcttgatgacattcaggaagatgacggtatttactttttcaaccttgatgttgatggcgaaactgataagaaactgaagaatgccaacgcgcgtcgtgagattcctattcactcaatgttgattaaattggggcttatcgaatatgtaaaagcattgaggggtgccggctatgaacgtttattccccgaaattacaccgaatacagttaaggggcatggcaaagccgtctccggatggttcaatgaatcggttcttaagaataaattgaaacttgaaagggatagaaccaagtcttttcattcttttcgccattcagtatcaacatacctcaaagagaaaggggtcaattcggaactacgtgcccagttagcaggacatgtgcgcggaaaaacggaaacagaagttcgctatagtaaagatctcaagccgattcaggtaatgactccaacttattga

SEQ ID NO: 171737 - DNA, 1440 bp, Enterobacter cloacae
atgtttaaacatgcttttgcaatattacaacaaatcggtaagtcattgatgttacctgtatcagtgttgccaatcgcaggaatactattgggggtaggtgctgctaatctgagttggttaccatccgtggtctcacatgtgatggctgaggctggcggatcggtcttttcaaatttaccaatcattttctccatcggtatagcgcttggttttacgcacaatgatggtgtggcagcacttgctgcggtcgttgcctatgggattatggctaaaacgatgtcagtcgttgcgccgcttatgttgcatctgtctgcagaagaggtagcagcaaatcatttggctgataccggggtactaggggggattattgcgggcgctgttgctgcatatatgtttaaccgtttctaccgtattaaacttccagattaccttggcttctttgcgggtaaacggtttgttcctatcatttcgggacttacggctattgtgctaggggttctgctgtcatttatatggcctccagttggaagtgcaatacagaatttttctgaatgggctgcctatcagaacccggtacttgcttttactatttatggttttgttgaacggtgtctggttcctttcggtctccatcacatctggaatttccctttcatgatggaagtcggtcagtataccaatgcagcagggcaggtctttcatggtgacattcctcgttatatggctggtgatccttctgcgggtatgttgtcggggggattccttttcaaaatgtttggactccctgctgcagccattgctatttggcattcagcaaaacctgagaatcgtgctaaagttggcggtattatgatctctgccgcattgacttcattcttgacggggattacagaaccgattgagtttgcattcatgtttgtagcccctgttctctatatcatccatgctattcttgccgggttagcttttcctatctgtattttgttggggatgcgtgatgggacatcgttctcgcatgggttgattgattttattgttctgtcaggaaacagtagtaagctttggctgttcccgattgtcggagcaggttatgcggtcatttactacacagtcttccgagtactgattaagatgcttgatctgaaaactccggggcgtgaagatgtgactgaagacagtaaatctggtttaagaagtgaaatggcacccgctttaatcagtgcttttggtgggaaagaaaatattaccaatcttgatgcttgtattacacggttacgcgttagcgtggccgatatatctaaagttaatcagggggaactgaaaaaattaggggcagcaggtgttgtagtggctggttcgggtgtacaggctatttttggtacccgctctgacaaccttaaaacagaaatggatgagcatatgcggtcatggacaacctga

SEQ ID NO: 171738 - DNA, 852 bp, Enterobacter cloacae
atgtccggaaacaattttatcgatgacatgtttgaaggtatccaagaatctccagaaggaagaatcattaagaacaatttcttcccttggcataatccaagaaaacatctagttcgcatcgaacaatgggttcattacatttcccactacttaaaaaaacctttaaaaggggtaacgcagttaaaatattttagtcttccgggtgatgatctattagatattagaacaattcatgatgaaatatgcttaaaaagcaaaatcacattgcgtttcctagggttcaatgatcatactagtgaaatatcgcgtgaacaaaacgcaaacttatcgttggctgaggtgcgcagcctcccttatattgataaatcctcccaatatcatgacaacgacatattaaatatcacatctaaagaatcattagtctatcaaaggtttaaagtattcggtgattttgacatagttaacctcgatttctgcggaagtattacaaggcacaagcctgcaaataaagaagctaatcattacaactttttaagtaaaataattcaactacaaaatcatcgggatagaccttggatcatgtttttgacaactagggtaggaaacgatcatattcacaaagatacattggaaattttaaaaagatgcttcttacaaaacctaagtgatgaggagttcaaacgaagttctgaagagcatttcagagtttcggacagtgacagcttacaagacaagctaaatactgatgagttttttagaaaaataatttccacctctttctgtaaatggttgctaacctattctttaaacttaacacctaaaacaacaatgaaagttttagacgtaatgtaa

SEQ ID NO: 171739 - DNA, 519 bp, Enterobacter cloacae
atgacctgcttattcgcaccttccctaaatattgatcgcgagtcatacaatttttcccatccacatgtagtaatactaacaaaatggctgcatagtgcgtttcgtcagcttacaaatgccaataaacagcttgcaaaaaaattaagggaaaataacagggaaaataaaagctccgaaatcaaaagtcaaataagtaacattgttgaaaacgcatgggcgcgctctgataaagacattgctaccattccacccaaaatcgaaattatcgaaactgaagaacaaaaagcaacagttgataaccgcaatagttacatagttgattttactggaataaaatcagatatctcaattactaagaattttagagaacgcaggaaagcaactctaagtgatgataaaatcaaagctatcacttctattttagctagttatggggtacttgaatcattatcgcctaataaaaggaatgccatgatacatgccatttatgaggtaattattgcggagggagagttataa

SEQ ID NO: 171740 - DNA, 345 bp, Enterobacter cloacae
gtggtagaacacagcggtcaaccgcgtggttttctgttagcagaagcacaggattcgacgctgtttattgtcgagctctccgtgcatcaggcgagtcagggaatagggttaggtcgacgccttcttagcgatgtcgcggtagaggccaaagcaaggagcttcacgtcgctcacgctcaccacctttcgggatgtaccctggaacgcgccgtggtatgcccgaatgggattcgaaatgctaccggaaacgtcattgaacgctgcgctacggcaaaagctggcacaagaagtggcgcacggcatggcgtatgaatcacgctgcgccatgcgcctgatgctgagctaa

SEQ ID NO: 171741 - DNA, 1668 bp, Enterobacter cloacae
atgttaaaacgtataaagatcgtcaccagcctcgtgctggttttggtgttgtttggcctgttacagctggcgtcagggggactgttctttaactctttgaagcatggcaaagaggacttcaccattctgcaaactgtgcgtcagcagcagtcctggctgaacgggagctgggttgctctgctgcaaacccacaataccctgaaccgtgccgggatccgttacatgatggatcagaacaatatcggcagcggcgctaccgttgccgagttgatgcagattgccaccaaatcactgtctgatgcggaaaaacgctggaccgagtacgaagcgatgccgcgtgacccgcgtcagagcgaagcggcggcgctggaaatcaaacgtaactacgacatctaccacggcgcgctgtccgagcttatccaactgctgggtgcaggcaaaatcaacgacttcttcgaccaaccgactcagggttatcaggacggctttgagaaggcgtacgtcaactatctgcaacagaacgacagcctgtacgacctggcggtcaacgacagcaatgcctcctacacgcaggccatgtggatcctgtttagcatgatgatcgccgtactggccttgatcatctccgtctggctgggcgtgcgcaagacgcttatcgaaccactgaatcgtttaatcgacagcattcgccacattgcgggcggtgacctggtcaaacgcatcgacgtggaaagcgacaacgaaatgggcgagctggcacactctctgcgccatatgcagggtgaactggcgcgcaccgtgggcgaagttcgtcagggggctcacgcgatttacagcggcgcgagtgaaattgcgatgggtaacaacgatctctcttcacgtaccgagcagcaggcggcttctctggaagagacggcggcgagtatggaagagctgacggtgaccgtgaagcagaacgccgaaaacgcccgtcaggcgagccatctggcgctgagcgcatcggaaaccgcgcagaagggcggtaaagtcgtggataacgtggtgcagaccatgcgtgatatcaccgccagttcgcagaaaatttccgacattatcagcgtgattgacggtattgccttccagaccaacattctggcgctgaacgccgcggtggaagccgcacgtgccggtgaacaggggcgtggttttgcggtggtcgccggtgaagttcgtaacctggcgcagcgcagcgcccaggcggcacgggaaattaagagcctgattgaagactcggtaaaccgcgttgacctcggttccacgctggtagaaagcgcgggcgaaaccatggatgaaatcgtgaatgcggtgacccgcgtaaccgatatcatgggcgaaattgcttccgcatctgacgagcagagccggggtatcgaccaggttggcctggcggtatcggagatggaccgtgtcacccaacagaacgcctcgctggtggaagagtccgcggcagccgccgcggcgctggaagagcaggctagccgactgacgcaggcggtggccgtgttccgcatccagcagggccaggcaagtaccgcgcgcgaaccggtcagcgtggccgctgcgccagcgccggatacgctgcgtaaagcggcggcaaccgacaccggggaaaactgggaaaccttctga

SEQ ID NO: 171742 - DNA, 1011 bp, Enterobacter cloacae
atgacaacggtaaacatcgcgcttaaggaagcctatcaactggccttcgacgtcctcagctcaaacggattttcagccgcacacgccgacgctatcgcccgcaacgtcaccgcgggtgaacgcgacggctgtgcttcacacgacctgtggcgcctgctggggatcgtagaaactctgcgcaaaggcaaggtgtcgccggatgcggaaccgacgattgtcgatcaggcgcccgctatcgttaaagcggatgccaacggggcgtattcgctgtgtgcccatgaaaaggcgctgccgctgctgattgaaaaagctcgccactgtgggattgcggcgctggcgatcaaccgttgcgtgcacttctcggcgctgtttgacgacgtggaaccgctgaccgacgtggggctggtgggttacgcctgtacgccaagccacgcgtgggtggccccggcgggcggcacccagccgctgttcggcaccaacccgattgcgttcggctggccacgcggtgcgaagccgccgtttatttttgatatggcagccagcgccgcagcgcgcggtgaaattcagctgcaccaacgggcgggtaagccaattccagaaggctgggggattgatagcgacggccagccaaccaccgacccgcaggcggtgctggacggggcgatgctgaccttcggcggccataaaggctcggcgctggcggcgatggtggaactgttcgccggcccgctgattggcgatatgaccagcgccgaatcgctggcgtgggataacggcgcgggcggcctgccttacggcggcgagttgattctggcgctcgaccctcagcgtttcctgggagcagaggccgggacgcatctggcgcgcgctgagacgttgtttagcggcatgcaggcgcagggcgcgagactgcctggcgagcggcgctatctggcgcgcgagcgaagtgagctgcatgggctggatgtttctcgtggcctgtacgacgagatttgtgcgctgcgcgggtaa

SEQ ID NO: 171743 - DNA, 792 bp, Enterobacter cloacae
gtgatcccttatgtctcctgccatgaatgttctgcgtgccggagcgggcgagagaactgctgtgaaaatattgcggtgattggcgtacatcgtgatggtgggttcagcgaatatttatgcgtacctgagcaaaacatcctgctggcggaaggcattgcacccgaagcggttgcgctgatcgagccgtttgccatcagcgcacatgcggttcgccgtgcggcggtgaagcccggtgacgcggtcctggtggtgggcgctgggccaattgggctggggacggcagccattgcggcggcggaagacgcgcaggtggtgatggtggatactagcccggagcgccgcgcgcatgtggcgcaccagctggcgttaccggctctcgatccgctggccgatgacttcctcactcagttgcgcgatagctttggcggtgaccttgcacagacggtgattgatgccaccggcagcgcgcagtcgatgaatcgcgcggtggagttgattcgccacggcggcagcattgtatttgtcggcctgtttaaaggcgacctgcagttctctgatccggagttccataaaaaagagaccacgctgctgggcagccgaaacgccacaaaagcggactttgcgcgggtgggggagctgatgcagcgtgggctgctgcgcgccgacatgctgctgactcaccggttgcactttgatgagttgggtagcacctatgaacgagatgtcatcaataatccacggctgattaaaggcgtgatagagtttagcgagaacattgctggcgctcaataa

SEQ ID NO: 171744 - DNA, 741 bp, Enterobacter cloacae
atgaatcgtttgactgagattggttttatcaaggtgggattctggcagattatagacggtagcctgaagtaccatctcgatgacagattcacagatgttaagaacaacctctatgcatttgtttgtgatggtgaggtaaaatacgttggtaaaaccactcgtctactacgtaacaggatgtaccattattcacgtccaggcccttcccaatctacgaatataaaaaataacgctaacatcattgagatgctatctaataatgttgccgttgatatcttagtgcttccagattcgggacttatgcactacgggcaatttcacttaaatcttgctgctggtcttgaggattccatcattagtgccattaaccctgaatggaatggaattcagaggccagaactgaagagtgaggaagtaatatcaactgaagctgaaatcatcacacatagcagtattaaacaattcactttcaacatgacagatacgtactggcgaagaggattctttaatgtgccggtagtaagttctcaaaagtttggtaaagacggtgagaacatcaagattgttcttcatgatggcatgtcttccatcacggcaatgattaaccgaactgccaatcagtctggttcaccccgcattatggggggcgttgagcttaggcaatattttcaactcaattacacaattggtgatgttgtacctttcgaggtgctcacacaaaatatgatgaagctaaaatga

SEQ ID NO: 171745 - DNA, 369 bp, Enterobacter cloacae
atggaaaataatgacttaacagtagtattggagcatgactatttagcacaatcatcagacaatacctatcaaggaaaatacacggtcggacgattttacctgaccgagacgttcatcgttgagtatatgaagctgatacatggaatcgaaatacctgattcatgggtcagtagtagcttcactaacatatcagataccgacacccgcaaggttatgtatatggaaggctgcgatatgttatctaaagacatcatgaatgaaatccgtagtgccgtgaagtccccgcctgacaacataaaaatataccgtaatggcgaacatgttaccaaaatagaaatcatggaagaacgaaatgaaatcattttatga

SEQ ID NO: 171746 - DNA, 918 bp, Enterobacter cloacae
atgatgatccataagccctgggggtttgctggtggtgatgcgactgatatgcgcgactatgcggatcttctcgacaaggttgaatccgttcttatcccggcttacgcgcagaaaaccgggaaatccaccgaagaaattgcggcaatgctggaagacgaaacctggatgagcggcagcgaatgccttgaactgggttttgccgaccaggtgactccatccctgcaggctatggcctgtatccattcaaaacgtattgaggaatttgaaaaaatgccaaaaagcattcgcaacatgatcaccccgccgcgcaatactacccagcgtgacccggttattacccagtctcaggcaccgcaggcaaaaactgatccggcgccggatgaaaatgcgatccgcgcgcaggtactggctgagcagaaagcccgtgttaacgccatcggtgatctctttgccatgttcggtaataaacacacggaactgcaaaatcagtgcgtggccgaccctgattgttccgttgataaggcgaaagatttgctgctggcagagctcggtaaaacagctacgccatccaacaaaaccacacaaccgcatatttatgcgggcaacggtaatttcgttgcggatggtattcgccaggcgctgatggcgcgtgccggttttgaaggccaggagcgggataacgtttataacggtatgacgctgcgcgagtatgcgcgcatggccctgacagaaaaaggtatcggtgtatccagctacaatccgatgcagatggttggcctggcgctgacgcacagcacctctgactttggcaatattctgctcgatgtggcgaacaaagcgctgcttcagggctgggaagaatcccaggaaaccttcgaactgtggacggctttgttgaataaatcgaacttttgctga

SEQ ID NO: 171747 - DNA, 360 bp, Enterobacter cloacae
atgaaacagaatgtacgtgccagggtcgcttcaatcgtcgcggcgcataagttaaataagagaatcacaagtgtattcgatcaatcgaggtccacttatataaatctcgacactaaattggatggcggtatagtgaatgggtttgactatacatcctcgtcttacttttcgggttccaatgcgcaaacgctgaatttttttaattatgattcaagtagttatgtagaccttaagttatctggaagtaattactcaggtttcgattatgactcatcatgttattttgatgtaactatatcaggtaatagcatcaccatattcgattatgaaactagcagttattacaacttttctgtttaa

SEQ ID NO: 171748 - DNA, 693 bp, Enterobacter cloacae
atgagtacatccgaggttttatatttcctaaataaaaattctggtgcgctaaccgttctattcacagcagttgttactttatcaacggttgtttattccattcttacaggaaaactggtttctgaaacaaccaaaatgagacaagttcagacagaaccaaagattgaaataaccatcaaaccttttgattttgctataaatatcgttcgattgcatgtcaggaacataggcctcgggcctgccataaacatcaaatttaatctaaaagtcatctctggtggtcaaatagcacaaactctcattgatgatttcactaaagcaaattttttaaaaatagggttgaagtacttcggcccaggacaagaacgtttctctcattacagtcaaatgacacagcattataatgataaaattgagtctgttctagttatcgagatttcataccagagtacaaccggcgttaagtatatagaacagtcaatcattgatatgtcagagcttaaaggcacataccagttaggaacgccaaatctctactcaatcgcaaaaagcctcgaaaaaattcagcaagatatatctcacatcaccagtgggcataagaaaatcagcacccatatatatacgtcagaagaccgtcaaaaagagaaagaagaccttagggcgtttatcgaaaaaaaatcaggacattcctaa

SEQ ID NO: 171749 - DNA, 267 bp, Enterobacter cloacae
atgaaatcagatgttcaactcaacctaagagctaaagagtcccagagagcactcatcgatgccgctgcagagatccttcataaatcgcgaaccgactttatcctggagatggcctgcaaggctgcggagaatgtgatccttgatcgccgtgttttcaattttaacgacgaacagtatgcagagttcatcgatatgctcgatgcaccagtcgaggatgattccgccattaatgaactactggcaaggaaacctcagtgggacgtataa

SEQ ID NO: 171750 - DNA, 294 bp, Enterobacter cloacae
atgcagtcggttcacccgcgcaatcgcctggataaggttgtgggacttaagcggcttgtcgatatacagcacggtattcttcggctcatcaaacccggtgagcagtttatcaacgactatcagcaatttgagcttctcatcggtatcgaaacgactgatgatattgcgggtatacacagactcatcctgcgtgccgacgttatctttccaccatttcgtcacttccggcagtttgctttcatccacctcagtattcccttcccgggtatccggcgggctgataactacagctga

SEQ ID NO: 171751 - DNA, 1227 bp, Enterobacter cloacae
gtgctgggtaagcgcatggaagatcatttgcgctttgccgcctgttactggcataccttctgctggaatggcgccgacatgttcggcgtgggctcctttgaccgtccgtggcaacagccgggtgaggccatcgagctggcgaaacggaaagccgatgtggcgtttgagttcttccacaagctgaacgtgccgtactactgcttccacgatgtggatgtgtcgccggaaggtgcgtcgctgaaagagtacctgaacaacttcgcgcagatggtggatgtgctggcggcgaaacagcagcaaagtggcgtgaagctgctgtggggtacggcgaactgcttcacgaatccacgctacggcgcgggggctgcaactaacccggatccggaagtgtttagctgggcggccacccaggtggtgacagccatgaacgccacgcatcagctgggcggtgagaactatgttctgtggggcggccgtgaaggctacgaaaccctgcttaacacggacctgcgccaggagcgcgagcaaattggccgctttatgcagatggttgttgagcataagcataaaatcggtttccgcggcacgctgctgattgagccgaaaccgcaggaacccaccaagcaccagtatgactatgatgtggcgacggtgtacggtttcctgaagcagtttggcctggaaaaagagattaaagttaacattgaagccaaccacgccaccctggcgggccactcattccatcacgagatcgcgtctgcgattgcgctgggcattttcggctctgtcgatgctaaccgtggcgatgcgcagctgggctgggataccgaccagttcccgaacagcgtggaagagaatgcgctggtgatgtatgaaattattaaagcgggggggttcaccaccggtgggttgaactttgacgccaaagtgcgtcgccagagcaccgataagtacgatctgttctacggccatattggcgcgatggacaccatggcgctggcgctgaaagtggccgcgcgcatgatcgaagacggcgagctggataagcgcgtggcgaagcggtatagcggctggaacagtgagctgggccagcaaattctgaaaggtcagttatcgcttgcggaaattgcgaagtacgctgaacaacaccagttggctccacagcaccagagcggacatcaggagctgctggaaaatctggtcaatcactacctgttcgataaataa

SEQ ID NO: 171752 - DNA, 750 bp, Enterobacter cloacae
  misc_feature (436)..(445): n is a, c, g, or t
atgggtaaaaccggcgtaggtaaatcgtcattatgtaatgcaatattccagcaagatgtttgtaaagttagccatgttgaggcttgcacaagaaaacttgaagagttacaaattgatgttgggggcagaaaacttacccttattgatttgccaggagtgggtgaaagtgaagcaagagacatcgagtataagagtctttatcaagaactaataccaacacttgacttggttttatgggtgatcaaagctgacgacagagcactcggtcctgatgaaaatttctataaaaacgttattaagccgcttagtgctgaagataaaatcttgtttgtaataaaccaagctgacaagattgaaccctcatacgaatgggatggctctaagaaacgcccttctgctacacaaatagaaaatcttgagcgtaaagaaattgatnnnnnnnnnnagaataataatggatgtatcgcggtatcggctccgtcaaaatacaacatcagcaatcttgtcaagaaaatggttttaagattaccaaagcgttctaaagctgcggtgtatagtactcttcgtgaagaaaataaaactgaagaggttaaacaagaatcaaaaaaggggtttaccgaagcagtaaaagatgtccttgattccattatagataatgctccaattccaaatattgtgaaagagcctcttaaaaaagccaaagattatgtttgcgacaagatctcaagcttctttgactcgtggttttga

SEQ ID NO: 171753 - DNA, 276 bp, Enterobacter cloacae; identical to SEQ ID NO: 5786

SEQ ID NO: 171754 - DNA, 315 bp, Enterobacter cloacae
atgaatttccctgtcgaacacgagttacgttcaaaagtgaaagtcaataactgggctgtattgtatgtcactcaagctaatgccggagccatgacatcatacacctatcactactatttactggatgcaaaaacaaaagaggctgaatttttatcgcatattgaccaggccacgccattcatggtgactaacgatcctgaagtgaaaatcgatgttaaagacgacggtgtatatctgcatgttcgtggggacgtatactctttccataatacgtctaaactcgccaatattcttctggatgcctccccctactga

SEQ ID NO: 171755 - DNA, 723 bp, Enterobacter cloacae
atgattggaaagattgaggatgtctttacccgccaggccaatttctctgccgatatcgcgcatgagatcagaacgcccatcaccaatctggtgacgcagactgaaatcgcactgagtcaggatcgaacacagagggaacttgaggatgtcctctattccagtcttgaagagtataaccggatgaccaaaatggtcagcgatatgctgttcctggcacaggcagataataatcagctgatacctgacagggtcatgtttgacctcagagcggaagtcatgaaagtcttcgagtttttcgaagcctgggccgaagaacgcaatatcacgctcaaatttaacgggatgccctgcctggttgagggagatccacaaatgttcagaagggcgatcaataatctgttatccaatgccctgcgttataccccggagggacaggcaatcaccgtctcaataagagagcaggagagcttttttgaccttgtgattgaaaatccggggaaaccgatccctgaagaacatttatcaaggctgtttgaccgtttttatcgggtggatccatccagacaacgaaaaggagaaggcagcggcatcggccttgcgattgtgaagtcaatcgtggaagcacatcacggaagagtgcaggtggaatcagacgtacgctccacgcgttttatcttatccgtgcccagactggagaaaatgatcccggaaacccaatgctga

SEQ ID NO: 171756 - DNA, 504 bp, Enterobacter cloacae
atgccgggcaaccgcccgcattatgggcgttggcctcaacacgattttacgtcacttaaaaaactcaggccgcagtcggtaacctcgcgcatacagccgggcagtgacgtcatcgtctgcgcggaaatggacgaacagtggggctatgtcggggctaaatcgcgccagcgctggctgttttacgcgtatgacaggctccggaagacggttgttgcgcacgtattcggtgaacgcactatggcgacgctggggcgtcttatgagcctgctgtcaccctttgacgtggtgatatggatgacggatggctggccgctgtatgaatcccgcctgaagggaaaactgcacgtaatcagcaagcgatatacgcagcgaattgagcggcataacctgaatctgaggcagcacctggcacggctgggacggaagtcgctgtcgctctcaaaatcggtggatctgcatgacaaagtcatcgggcattatctgaacataaaacactatcaataa

SEQ ID NO: 171757 - DNA, 357 bp, Enterobacter cloacae
atgttcagaagagcgatcaataatctgttatccaacgccctgcgttataccccagagggacaggcaatcaccgtctcaataagagagcaggagagcttttttgaccttgtgattgaaaatccggggaaaccaatccctgaagagcatttatcaaggttgtttgaccgtttttatcgggtggatccgtccagacaacgaaaaggagaaggcagcggcatcggccttgcgattgtgaagtcaatcgtggaagcacatcacggaagagtgcaggtggaatcggacgtacactcaacgcgttttatcttatccgtgcccagactggagaaaatgattccggacacccagtgctgggaataa

SEQ ID NO: 171758 - DNA, 360 bp, Enterobacter cloacae
atgcagagcctgatcgatacgctcaccgttacccggctcatggcggcgttcgtacagcgcataaaagctggcactttttggcagtacaaaacgctcgttggccatcatggcttcaatgagttctggtgcatcaccatactgttttttatattcatcgtaatgatcctgccagacatccgaaatgtacttaaggaacagcatggtaaggataaagtctttataggtatcagcactgatggtgccacggaacgtatcacacgcggcccacagggctttgttgatcgtgtcctgactgattttgtcgttcatgaatcatcctggtctgaagaaaagcctgcgatgaagggcattgcatcttaa

SEQ ID NO: 171759 - DNA, 270 bp, Enterobacter cloacae
atgataagaatggaatttaacacatatgatgatgaatcatactatttcctgtatgttacagagaaagtacgtattgaaactaatggtgctgatggtttgcagatggaaacattcgattcgagagtaagggatttaggtgatccgttccagtacttaaccataagagaacgaaaggatgagtactttaatgaaagtcttatcaatccgtttttggatgatgtgatcaaagcagtacaggtactatgtgtaaatttagatatggaaaagtaa

SEQ ID NO: 171760 - DNA, 144 bp, Enterobacter cloacae
atggttgtttctgaatttggttatgacccatatcaagtacagaaggaaattgaattagaggaagctaaaacaattaataataaacaggaagttattcaggatgaagaaacaactaacgagggaactaaacctacagaaaattaa

SEQ ID NO: 171761 - DNA, 414 bp, Enterobacter cloacae
atgcccgccttcagcaccgttcataccctgatggcccgtcacggcctgctgccgggcacttcaccgggcattcccgccacgggacggttcgaacatgacgcgcccaaccagctctggcagatggattttaagggccactttccctttggcggtggccgctgccatccgctcactttgctggacgaccactcccgtttttccctgtgcctggtgcactgtaacgatgaacgtcgtgagaccgtgcagcagcagctggtcagcgtgtttgaacgctacggcctgccggacaggatgacgatggataacggctccccgtggggagacaccaccggcacctggacggcgctggagggtcaggaaagtggatatcagcggaaagctgagcgtgaaaggggtaagtctgagcacgggtaa

SEQ ID NO: 171762 - DNA, 186 bp, Enterobacter cloacae
gtggatatcagcggaaagctgagcgtgaaaggggtaagtctgagcacgggtaaagcgttcaggggagaacgggtcggactgaaggagacgcaggaggatggctgctatgaagtgtggtggtacagcacgaaagtgggggtgatcgacctgaagaaaaagtcgatcaccatgggtaaaggatgttaa

SEQ ID NO: 171763 - DNA, 690 bp, Enterobacter cloacae; identical to SEQ ID NO: 171675

SEQ ID NO: 171764 - DNA, 633 bp, Enterobacter cloacae
atgcaatacatccagcaaccccaggcaattgaagccaaaagtttcgacatcattggcgagatcattcgcgaaacgcggccggagtaccggttcgccagcccgctgcatgaggcgatcgtcaagcgggtaatccataccactgcagattttgactggctggatattctctggttttcagatgacgccatagagcagctttgcgcggcgctccgtcgcccctccgtcatctataccgataccacgatggcgctctccgggatcaacaaaacgctgctggccacattcgggggcgaatgtcgttgctatatcagcgacccgcgggtggtagcacaggcaaaagcacagggaataacccgctcgatggcggccgttgatatcgcggtgacggaagagagtgagaagatcttcgtctttggcaatgcgccaacggcactgtttcgcctgcttgagcatgatgttgccgtcagcggcgtggtgggggtaccggtggggtttgtgggggcggcggagtcgaaagaggcgctgacgcacagccatttgcccgctattgcggcactcggacgcaaaggtggcagcaatgtggcagcagcgattgtgaacgccatgctctattacctgcagggggcgcgatga

SEQ ID NO: 171765 - DNA, 255 bp, Enterobacter cloacae
gtgttaagcgaatatgacattgttgtgtctgacagtgagcaaaccggagacggtcagcggttttggttacgcatgattgactgggcgttcagcatgaattatcggataagcgtggcggacggtacggtaggagaagagtggcatttaacaccggtgagttcatacgccgagctggaagagcgctggattgcgtttgcctggggatacgatcgcgatgtccatccacatcgcaggttagtcatcagtaaagcgtaa

SEQ ID NO: 171766 - DNA, 480 bp, Enterobacter cloacae
atgaaacaatggaaaaaaacgcaatatgaaaactacatagtaagctctgacggtgaagtttttaatactaagactaatagaaaactaaaaaactcattaagtaaatcgaatgggtattataaagtatcattatctgtaaaaggatatggtagtaaagttgttgaagtaaatcgtcttgtagccgaagcatttataccacgcaatcaatcgttgaaattagtagttgatcatattgatgataatccgttaaacaatgatgttagtaatttacaatggattactcagaaaaataatattgcaaaaattagaaacagaaagcctggtgttcgttttacaaatgaagagaaagaagaaattattagtacttacaaaactggcaagtactcattgattggaataacaaaccatttcaataatctttggaatcgttcagtatcacgtcaagcttataccagaattataaaaaaagcagggcaataa

SEQ ID NO: 171767 - DNA, 879 bp, Enterobacter cloacae
atgaaactgaaaatacaggacctgagactgtttaatctcgtctttgaaagcgatccgggctggatactcgatttctccaaccgtacgctgtcggctttttttgatgaagagctgaacattgatattgatgatgaatgttataaggaagaaggaacctcaaaagctaaacgggtaagatgtttgctgaaacaggtggatcgtgagacagccctgcgggttcttgataccctgtggcggtataaaatggagaccatgcctgagcaggccgaacaaagccgaaatgactggcttgcactgatttcacggctgaaaaatacggacgctgatacagccaaaggcgacaggcctgtgcaggcatggcacggtgtcgactggccttcactgatagccgaaatgaacgagatgaaatccctgtcgccacatccgcggggtttccgttttgaagcatggcttgcagaacttttcagtatctttaagcttgccccccgctcgtcattccgtaacacgggcgagcagattgacggcagcttccggctgaatgatgacttttacctgttggaagctaagtggcatcagaacagaacgccagcggcagatttgcacgtattcgaaggaaaactcagcaccaaggcgaagtgggcccggggcgtgttcatcagttggatggggtttactgatgaaggtctgacagccttcgtgaaaggaaaacgggtgatctgtgtcagtggttatgatctttaccattcactcagtcacggtatcgctctgcccgaccttctggacgcaaaactccgacacgcagcggaaacaggggagccttatgcccagtttgacaggctttacactcttaagggcataataaccggcacgccgaaataa

SEQ ID NO: 171768 - DNA, 615 bp, Enterobacter cloacae
atgaatgtccgtatctactgccgtgcatctaccgaaggccaacatgctgatcgtgcattagttagcctgcgcgaatttgcgcaaagcaaaaactggcaagtagccggagaatacattgagaatgccagcggtgcgaagctggagcgtgtggaactaatgcatcttcttgaagaagcacaacctggcgatctgcttcttattgaagcgattgaccgtctcagtcgtcttcaacatgaagaatgggctgaactcaaagctacgctgaacagtaaagggctggttattgtatcaatggatttgccaacaagctggcagatggttgaaatgtctggtagtgacctaaccagcggcattttgagagcagttaatgccatgctgatcgatatcctcgcgacaatggcacgacaagattatgaaacccggcgtaaacgccaggcacaagggatcgcaaaagcaaaacaggcaggtttgtatacggggaaagaaaaagatatgcaagcccgtgaagtggttcgggaaatgctggcacagaacgttaaaccagcccacatcatgaaagcagcagatatcagtcgcgccactttttaccgaatcaagaaggagttagtaagctaa

SEQ ID NO: 171769 - DNA, 723 bp, Enterobacter cloacae
atgatgcaacaatctcaaatgcagttccaatcgtcgattttttcaaccacttgttttcgtaacgtctaccatgaacacggtcgttacaaaaccatcaatggcaactcctttgttcatgatggccacgaataccgtattaacaccagaatcggttctggtgttcgccatgacatacttatgtcaacaatcaacgaactgaaagcaatccagaagcgctacagtcgagtgttccttacccgttttgatcttcacctccctgcgttgacttctgttgaagcgggtaacaaatacatacgcaaactgttcaaacgattacgtgcccgcctggagtctgggaataacggcttatcgaaacctatcatcgattttgcttacggttgggtttgcgagcaggaaaaggcattacagccacattaccattgctggattgcgcttccacatcgtctggtaagatggtttggaacgccagaaagagggatcgctggtattattactgagatctggatgaaactgacaggtggtgaagcaacgctggtaaacttgtctaaagctacgaaggactatcgcgatcactacgtcattcatcttgacgatccttcatcactcgaaggtccgatattttggctttcttacctggcaaaagaacgcgggaagtcgcaaacagggaagggaacgcgcttgtattcaacatcaaagttgagtcgtaaagcactggattcgtaa

SEQ ID NO: 171770 - DNA, 198 bp, Enterobacter cloacae
atggtcaggaaagtggatatcagcggaaagctgagcgtgaaaggggtaagtctgagcacgggtaaagcgttcaggggagaacgggtcggactgaaggagacgcaggaggatggctgctatgaagtgtggtggtacagcacaaaagtgggggtgatcgacctgaagaaaaagtcgatcaccatgggtaaaggatgttaa

SEQ ID NO: 171771 - DNA, 672 bp, Enterobacter cloacae
atgtgtttttcttcttctactcctaaaggatatgaacttggatcagtctcagattggctgaacaccgccggaacgttaggtactctaattgtagcttattttgcgtatcggaaagtacctgaatggatggcacaaaagcattatgatattgcttacgggatcattgaaaaaagtatttacaatgatcttcgtgccctacgccctttaagtttcgctattcaaagtaacattaaccagatacttaatgtttttaaagagactattaattctggtgtggcgaatactgaaatcagtgaagaagatattgatcaaatagataaatcggctcttttatttcagcaaaattctgaagttatcatagaacaacttaatgctgtaaagcgtactaattatgaacttacgaaggatgcagatgaagtaatttcccttcttataaagtcacgtctaaaccattttttaatatgtgatgatttatatgaattgaatgataaactcaattttgtctatactggcgatgttgatcaaaaaaatgagtacaatgaaaaaataactgttctgcaaaacagtactaaaggcaataatgcttcgctcataaaaatgataaacgatattaaaaatggtaacaaagctatttcagacttcatcacacctaagaaacaaaaacacccctga

SEQ ID NO: 171772 - DNA, 264 bp, Enterobacter cloacae
atgggaaaatatattattaacggttttgtttatgaagtgattggtaatgtgataaccgtccagccagtacaagagtttaagattcaattttattcaagcggaaatcaaccatgtccagtatttgctatcaaacaatatgtcattgatgaactactaaacatgggaaatgatgagttattcaatgcttcactaactgatgagactatcataatagcgaaggatttagtgtgtaatcaaaatcgagcaaaaacagtaaatatatag

SEQ ID NO: 171773 - DNA, 1143 bp, Enterobacter cloacae
atggctcgtgattcgctttacccagtgagcgttaaagctggaaaaccgatccttggaatgctacctacaggatggcaaaagttatcattagaaaagtgcttaaatatagaggcaagaaaggcatatatacaagataatcaagagtatgacttagttacagtaaagcgctccagaggtggcgtaataagacgtgagcatcttaaaggaaaagatatctccgtaaaaagtcaattctatattaaagaaggcgactttctcatatcaaaacgacaaattgtgcacggtgcttgcggtcttgtacctaaagaactttctggctcaattgtatcgaatgaatattgtgtgcttacagggaagtccggtttttatcttccttatatggaatttctatcggagtctctatatttccagcaaacctgcttccactctagcattggtgtgcacatagagaaaatgatttttaagttagatagttggtttaagtggccatttaatatccccccactgtctgaacaaaagagaatcgttaaaatcctgtcaacctgggataaggcgatttcggtgacggaaaagctgctcgccaatagtcagcagcagaaaaaagccctgatgcagcaattagttaccgggaagaaacgcttgctggatgagaatggggtgaggtttagtggggagtggtgtacgtgcactttgtctgaagtagcacatattattatgggatcatcacctaaatccgaagcctacaacgataatggcttaggtttgccattaatacagggtaatgccgatataaagtgccgagtttcatgtcccagagtttatacgtctgacattacgaaagaatgtactcctggagatattcttctaagtgtcagggcacctgtaggtactgttgcactttctcaacataaagcatgtatagggcgtggtatatcggctataaaatccaagagaaaaatgagtcaatcatttctttatcaatggtttctttggtttgaaccaaaatggtgttacctatcacaaggtagcacatttgaatcaattaatagtgatgatataaagacattaaaattatcagtgcccaattttgaagaacaacaaaaaattgccgccgttctgtccgcagccgacgggctttgttga

SEQ ID NO: 171774 - DNA, 411 bp, Enterobacter cloacae
atgctgactgtgatcttaaagttctttgagttgttcactaagttaccaaagtctgttcaagagcaaattataaatgctgttattctaactcttacacttggctttaaacgtttcttcaaaaagaaaaaagaagaagatttaaggaaagctactgaagaagcagttagtccagaaaaatggcagactacatcagttgcggtgagtaatctcatgccttctctttactctcaaaagaaaaaagaagagtttgctaactcagttgttgagttaattagaagcgactcattcattaaagaattaagtacacgcatcgaaaagattaactctaatgatgaagaaagctacgtggctttgtgttctatcgaaactaaaaagctaatcattgaaatgcttgagaagaacaccaagtaa

SEQ ID NO: 171775 - DNA, 612 bp, Enterobacter cloacae; identical to SEQ ID NO: 139461

SEQ ID NO: 171776 - DNA, 225 bp, Enterobacter cloacae
atgccagataacaccaccttccctgcccccatcgggtctgcgggtactgatgcgttccagcagtcttttaatcccgaacacctgctgatagcgggcaacaatttttccggtctttttatcaaacagggtgaagaagcgggtcatctccagcagacgttccggcgaaagcagactgatgagcagcttatcctgcccgctgacagccagttcccccccggcgattaa

SEQ ID NO: 171777 - DNA, 381 bp, Enterobacter cloacae; identical to SEQ ID NO: 168699

SEQ ID NO: 171778 - DNA, 564 bp, Enterobacter cloacae
gtgaccgcgccgggcggacgggataacgacaccggcgtggtgctggccgcgctgaacagccgcgacatatcgacccagaccatgaactcgctggcacagagtggccaccgtgcggaagtgttcaccgccgaagtgcaggaccgggctgaagcccggttgcagcgcatgaagacaaatgcctctcccgtgcagctggtcaaaaacctgagcggacaccaggacgtcagtcaggcggtggattcactgcatgacagcgtccggacggacgcgggacttgccgtctggcgtgccattaacgaccagcgcaccgtggttatcagcgagctgaagctcgcgacggaagcgcagaaatatcatcccgaccttgaggccatcgggaatgaaattggcgcgatgatcaaaaacggcgagctgttatccgtatctgcagggggagagccggtactggtttcccggtccacctgggagatggagaaagccattctgcgcgtggtggaggaaggaaacccagtccgctttattgtcggtgtaaatctggacgtgctccttgacgcgggaagttga

SEQ ID NO: 171779 - DNA, 558 bp, Enterobacter cloacae
atgaaaattgcattcatgggaatatcgggtagtggaaaagatttccttgctaattatctaatatccaactatgaatttgttagattatcatttagcgatcaactcaaaaaattggccaatcatatttacccttggatggaaaaggattatagccctgaaaagaaaacgttatcactcaatataaccttacctacaggcgactttatcaaccattcaccaagagatatatggctgagcttagacaaactaagggaaattgaagaaaaaatatttattagaatgctatcagaagagttgaaagttttagaggaaaatgaagggacgaataaaaacataataattactgacataagatcaaatgaagaattcgcatggtgtaagaacaatcaattcacaatagttcatatagaacgggaaaataataattataaaagatacgaaattgacaagtatgtaaatgagaacaaaacaaaatcagactatcattttaacaatagtgtgaacggaattgatagttttaaaaactttttcgaaagggtattatttagtgaacagtaa

SEQ ID NO: 171780 - DNA, 141 bp, Enterobacter cloacae
atgaccaacacagacaccatctttacgatcccagaactcaacctcttggcctttatctgttacttccagaacatcaacactactgaaaccattagcttgttgagaaacatcaagcagtccctgattagccagaccttttaa

SEQ ID NO: 171781 - DNA, 174 bp, Enterobacter cloacae
atgtctgaagtcagcggttacggcactggtaatttcactccagagtcagcaggaataattgcggataagcttaatgaaattgccgatcgaattcgtaatgacccatcctttctcattgagttcgaatggcaggagtcagagggatcgaaagaaatcagcataacgtataagtag

SEQ ID NO: 171782 - DNA, 1656 bp, Enterobacter cloacae
atgacaaaagaacaacttaatcagcttggtaaaaccctctgggatattgctgatcaattacgcggcgcaatgaatgccgatgacttccgtgattacatgctgtcttttcttttcttgcgttatctgtctgataactacgaacaggcggccaaaaaagagttagggcatgattaccccgaaccgggcaatgatgatcgtcgcgcaccgctagccatctggtatcaggacaaccaagctgatattgccgattttgaaaagcagatgcgtcttaaaacacattatgttattgagcctgcttttttatggagcagtgtggcagaaatggcacgtactcagcatacggatttgctggatacactatggaaggggttcaaatatattgaagagaagtccttcaacagcacgtttcagggcttgttctcggaaatcaatctgcactctgaaaagctaggcaaaaaacctgctgatcgtaatgctaagctctgtactattattcaaaaaatcgccgaaggtatttctggctttagcaatgctagggacgatctgggtgatgcctatgaatacttgattggccagtttgcagcaggttcaggaaaaaaagctggtgagttttatacacctcaacaagtttctaccatcttgtcagaaatcgtcacattagatagccaagacccgacgacaggcccaaagaaaaagattaaacaggtgatggacttcgcctgcggctcaggttcgttgctattgaatgtacgaaacaggttaagtgatgaaggaggctctataggtaaaatatttggtcaagagaaaaatatcactacctataaccttgcgcgcatgaatatgctattgcatggggtaaaagataccgagtttgaaattcatcacggtgatacgttagagaatgactgggatattcttaatgagatgaatcctgcgaagaaaatgcagttcgacgccatcgtcgctaacccacctttcagtttgcgttgggaaccgaccgaggcattaggtgaagatttccgcttcaagaactatggtcttgctcctaaatcagcggctgattttgccttccttctgcacggtttccacttccttagtgatgacggggttatggcgattattctcccacacggtgttttatttcgtggtggtgctgaagagcgtattcgtaccaagttattaaaagatggacatatagataccatcattggccttcctgcaaacctgtttttctcaacaggcatacctgtttgcattctggtgctcaaacgctgtaagaagtcagatgatgtgttgttcatcaacgccgcagaacactatgagaaaggaaagcgtcagaattaccttcgaagaactaatgaaatgcctaatggagagttgggcgatatagaaaaaattatcgacacctaccaattccgaaaggaagaagagcgatattcccgtcgagtatctatggaagagattgagaaaaacggcttcaacctgaatatctcacgttatgtcagtacagcacagactgaaaaaagaatagatctaaaagatgtccaaagtgagttggtattattggaagaaagaattaagagagcaacgctctctcataatgcattcctcgaagaactagaactaccaccacttcccttagccgaaaaaggctaa

SEQ ID NO: 171783 - DNA, 1080 bp, Enterobacter cloacae
atgagttttgatgccgtagcgcaagagctgaaagaaatagatgagaatatagttctaatatacgcctttaatggtacaggaaagactcaactatctgtggcttataagaaccttactaaagctgaaaacaatgatgagcatgcgggtgtttattacaacgcctacagtgaagacttatttgtttgggataatgatgaggaaaatgatggtgaaaatatcagactaaaaattctaccgagtagtctgaaccgctttcatagttttctatacgaagatggactatccgttgtcaatgcaatggctccgtacaatccaaagtttagctttcgacttaacccttatgatgatcccgaagaaggcttagagtctgtaactttctataacgaaggtgaagaagataaggctattaaaatatcaagaggagaagaaaggatttttgtctggagcttctttcttgcattactggaagtcgatggctgggcaaatgctcagaatgcacacatatttatagacgatccagtctctagcctagatgagcataatatttttatcacagctgacactttgtttcggcaggttgaacaacactatgacaagaagcgaataattattactacgcaccacatcggattgttctcaattttggcaaataggcttaccaaaggagagaaaagtggtcgttataaaaatttaactgctatacgaatattgaagcgcagtaacgatcaacgtcatctggtgacgccgaataaaaacgtattcttacatcacctccaccttttacaggtgttggacgaggcaattaaaagccagctttatacttatcattttgcattgctaagacggttacttgagactatcgcatcatttttgggttctggcagtgctggttacaccctcagtgaaattggtattcagaatactgaagaagttatgcatgtagtgaacactcaatcgcatagaagcatttattacgatcagacagaaatgatgagtcaagcagatcaaaccctctttatggacatttttattaaactggttgaaaaataccattttcatttttttgcaggtagatcatga

SEQ ID NO: 171784 - DNA, 1197 bp, Enterobacter cloacae
atgcgtatgagtaaacagagaaaaggtctggttccggaattacgcttttctggattttcagaacaatgggaagtcaaggcattagccccttacttaaaacagcacagtataaaggttccttcatcaactgagttggatgtcttcagctcaactcgcgaaggcttgaagtcacaaaatgaatattttgatggcagtaatcttactaataaaggtgagtacggtgtggtccctgagggatactttgtatatcgtcatatgagtgatgacaatatatttaagtttaatattaataagttagggaagcagattgcagtaagtaaggaatacccggtgttcaagacgcaaaaccttgatcccggctttcttctaaatgtcttaaatgaaggccgcgcgtttaaggcatttgctgctagccaaaaaaaaggggggacacgaacaagactctattttaaaacgctaggcacatttgagttgccgctgccatcacctaaagagcaacaaaaaatcgccgattgccttgcctccatcgacgagctaatcacactacacaccaaaaagctcggtgctctcaaagcccatacaaaaggcctgatgcaacagcttttccctaccgctagagaaaacgtgcccaagcttcggtttcctgagtttagaggtaaggaagattggatagacgcagttctcgcggatctatgtgaaatgcaggcaggcaagtttgtaaaggcttctgaaatatgcgaactcagaacggaaggattgtatccctgttatgggggaaatgggctgcgaggattcacgaaaacttatactcatgatggaacttattcattaattggtcgacagggagctctatgcggtaacgtaactcttgttggaaataaattccatgcaactgaacatgctgtcgtcgtaaccccaaaagaaggggtcaggacggattggttgtatttcctgctgatttatcttgaattaaaccgatacgctactgggcaagctcaacctgggctatctgttgaaaacctcaataaggttgagcttaaatttacttccctagaagaagagcagcgtaaaattgcatccttgctaagtacgagccaagagttaattgacaatcaaattctgaagattgaacaacttaggacgcataaaaaaggcctgatgcaaaaacttttcccagccatggatgaggtaaattga

SEQ ID NO: 171785 - DNA, 3054 bp, Enterobacter cloacae
atgactaaagaacaacaaattgagcaagatttaatcgccagactacaagacctcaaatacacccaccgcagcgacattcgcgacaaggccagcttggagcagaacttccgtaagaagttcgaagctttgaaccgagtcaacctatccgatgcagaatttaaccgcctccgtgaagagatcatcacagcggatgtctttttggcagctcaagcgctgcgtgaaaaggggaaatttacccgtgaagatggcactccgttggaatacatgctggttaatcttaaagactggtgtaaaaacgactttgaagtaattagccaacttcgtatcaacacagataacagtcaccatcgctatgacgtaattctattactcaatggcctaccattggtacagattgagctgaagtccttaaagatcagtcctcgcagagcgatggagcaaattgttgagtataaaaacgacattggcaacgggtataccaatactctactctgctttatgcagttatttatcgtcagtaatggtaacgatacgcgctatttcgccaataatcgcaaagagcacttcagctttaatgccgatgagcgttttctgccgatttatcagcacgcagataagagcaacaagaaaattgctcatttgcatgagtttgctgatgacttcttgtcaaagtgtaccttgggtcaattgatcagccgctatatggtactagtgcagagtgagcaaaaaatgctcatcatgcgcccgtatcaaatctatgccgttaaagctattgtggatgctattcaccagaaccgtggtaatggctatatctggcataccacaggctctggtaaaacactcacatcattcaaagcttctacgctattgaaagataaccccgatattgaaaaatgtttatttgtggtcgatcgcaaagatctcgatcgccaaacgcgggaggaattcaacaaattccaagaaggatgtgtagaacaaaacaccaacaccgaaacgcttgtacgccgcatgttatcggaagactatgccgataaagtgattgtcactaccattcaaaagcttggtctagccttggatgaaaatagcaaacgcaacaaggctcagcagaaaaatggcaaacagacctataaagagcgtttggagccgctgcgtgataagcgcgtggtatttatcttcgacgaatgtcaccgctctcaatttggtgagaaccataaagccattaaagaatttttccccagagctcagttatttggctttaccggcacacctatctttgacgaaaattcaagctatcagcaagtagatggcaacttggcctctttcaaaaccacggaagatattttcgaaaaagagctacacgcctataccatcacccacgccattgaggacaaaaacgtactgagtttccacattgactattacgggaaagacgatggtaaagatggtcaaaccaagcctaagaaaaaagaactaccaccacctgaagcggtaataaaagccattctcgataaacacgatagcgccacaaatcagcgccgctttaatgccgtgttagcaacagcatcgatcaatcacgccatcgagtactttgagcaatttaaaacgcttcaagcacaaaagcagtctgaagacgaaaatttcgagccattaaatatcgcctgtgtattctcaccaccgggccagatcgctaaagagaacgatggtaacggcaatggtagtgtaaacagcaacaagaatgctgcagacattaagcagcttcaggaagacctgccccaagaaagtgccgacaaccaggtagagcccgaaaagaaaaaggcagccctgaaggcgattattgccgactataacgcgcaatacggcaccaatcacaccattaacgaatttgacctttactatcaggatgtgcagcagcgcattaaagaccaaaagtacagcaatactgattaccctcgtaaaaacaaaatcgacatcaccattgtggtggacatgctgttaaccggttttgactcaaaatacctcaatactctttatgtggataaaaacctgaagcatcacggccttatccaggcattctcgcgtaccaatcgtgtgctcaacgacacaaaaccgtggggcaacattctggacttccgttatcaggaaaacgaagtcaacgcagcaatcgaattattttctggcggggcgaaagataaagccagagaaatctggctggtcgatcccgcgccaaaagtgattgaggcattccagaaaaaagtggacgaattgcaaacctttatggagtccaaaggcttaacctgcgagccatcggaggtgcacaacctgaaaggagatacggccaaggccgagtttatcaaccattttaaagaagtgcagaagctgaaaacccagctagagcaatacactgatcttgacgaagaaagtaaagcgatcatcgaacaaaaactgccgacggataccctgcggggctttaaagctatttatctcgacacagctatggagctaaagcacaagcaaggtaaaagtgatgacaacgaagaatcagttgagcagcttgagtttgatctggtactttttgcctccagcattattgattatgactacatcatggggctgattgccaaatccacgcaaaaaactggcaagcaaaagatgacgcgccaggagctgatcgacctgatcagtgccaatgctaacttgatggaagaacgtgaagatattattgcctacatcaatagcctcaaggtgggtgaagcacttaatgaaaagcaaatccgcgaaggctatcaaacttttaaagcgcagaaagccgcgctggtattaacacaaattgccgaaaagcatggcttgcaaacgcaaccacttcaggcgtttgtggacagcattttagatcgcatgatcttcgatggcgaacaactaacagatctgctcgcaccgttggagttcggttggaaagcgcgccgagtggcagagctggctttgatggaagatttggtgccttacctgcaaaagcaggctgagggtcgagagatttcggggttagatgcgtatgagtaa

SEQ ID NO: 171786 - DNA, 162 bp, Enterobacter cloacae
atgaagatctcagacgttttacgagaaacagggcttagccgcaatacagtgaccctaatgtacagggaaacagctcaaaaaatagacattgaggcattggataagctctgtcagctctttgcttgcgaagtggcggatatacttgaattcacggataaatag

SEQ ID NO: 171787 - DNA, 987 bp, Enterobacter cloacae
atgataaatctcggtaactcaatgcgttgcaaaaatagtgtatatccgccccacctcttgattaggtggtattttgcgagcatcatcgcaattatttccctaactatgaaatctatggattccagcaaaaatctgcaacaggcaattgccagcatcacgatctggcgcaagggtgaacaacgtgcaccacataagccattgctactgctgtatgtactggcatgttaccagcacggccacagccgcctgttcgattacggttcagaaattcgggataacctgcatagcctgctggaacgatttgggcctcaacgcgctcagtatcgccctgatatgcccttctggcgtttgcagggcgatggattctgggagctgaaaaatgcggaacgctgttccacagcaggtagcagtaaacagcctccggcaggagagctacttgaatataacgttgctggtggcttcgacgagcagcattatgccatgctgataaaaagcagaaacctgattaatgtgctggcacagcaaatcctcgaagcgaactttaccgaaagcattcaggaggaacttgctgacgaattaggttttgatatccgacaaattcgtaaacaacgcgaccctctttttcgccagcaggttctacgcgcttacaattacgaatgcgctatatgcggattcaacatgaggcatgacaacacgtctgtagccctggaagccgcgcatatcaaatggaaacaatacggtggtccttgcgagatccctaatgggctggcgctctgtgcaatccaccacaaagcctttgataaaggctcgattgggttagatgaaaatatgcgggttcagatctctgaagctgttaacgggagcggtatcgtcggcagactattctgggattttcagggaaaggtgatttcattgccgcaggtgaaagcacactatccacaggagggatttgtagattggcatcggcgcgaagtttttaaggaatag

SEQ ID NO: 171788 - DNA, 771 bp, Enterobacter cloacae
atggataaagcagaagttctggagaaaaatggttgggttgcaaccaatatcgatgattttgcacaaagagtgaagggaatctcgcgggatggataccccccattacgttgcctcgcttgtgaaaagctagtgcatgatagtggactggtaacccctaatcctgattatcgccccaggttctcgcattcagcgcctccagagaatggagaactttgtccattaagtgctgagacacgccgttttagtgggttagccggaaatgacagtactgcaacaacggagctagccagaacacggcgtgcgcagtttatggtcttcgatagtctatgtaaggcctatattgtctgccgctcactacggggaggaaagggtaagcttgaccaaaagtcgtttattcgattggtcaggatagctgatagctttgggatctggcgttatagctatctccctaaatggggcattccccttcttttaatgctgatggataatcatccaacaccgaatggtaagtctgcatttttctattcacttaagaaagacagagcccgccggggggttgagtggcaaaacctgaacgttcggctggaagcgcattgggttagcagcggtgaacttattgttccaaatcctgagaaaccagcttcgttcctgctggagatcccttttaaagaggatgttgttaatgacatcttggggaaagaggacctatcgtggtgtacaagggatgtgctgagaaacttgagtgcctttagcatcagcgaattacggtaa

SEQ ID NO: 171789 - DNA, 654 bp, Enterobacter cloacae
atggcatttgaattgaaagacttattgactccggtggcttcccttcttgctgtctggcttactgccagatttacccttaatcgtgaaattcgtaagaaagaactggagctccgtgttgaccggctggagaagctctctgctgattgcgatgaggttttattacagcttatcaattatgctggttttatcagtgggcttgttcagtctcggctcttactactcactccgactcaatcaaagactctgattcctattcaagcattttctgaagacaaggaccttttagataatagtaaattggctccagatagggataaagggcgaagatgcgaacacggcttacgcttccatcattatcaggaatggcaaaaatgggatgctattgtcccgaagctgcaaaacgatatttatgattttttcataattactcctgctggtgagattgttaaagatttaaaggatcagggccgaacacaagaagagtgtgaggcattcgttcgacaactcagtaaatggcaaaaaaatgctgataccctgcgaaaacagctccttgacactatgtctaacgattttcacgagttgactaaatcgaaatcatcttcatggttcagacggtcttgtgtacgttcatggttcaataagccgggatgttaa

SEQ ID NO: 171790 - DNA, 549 bp, Enterobacter cloacae
atgagtgaaaaaacagatacaaccagggctttagagttaaagtatgacgacaatggaaaaccttcatggcgttcatgcccttctcataaaaatataaaggtccgcggaggatgtgatttacctcctcatctccctggtttgataatactcgtccatggggttaactcaacaggtgaatggtatcaaaatgcggaagagtctctctgcaaaggattaaatgacaggttagggctcaatggttctcaatttgaattgaagccgaacaaatatagtgcagattgtgagaaggaggaagggaaaagtaactcgtcaccttcacctttagctcgtagaaaacttattgaaaattctgagcgctctccaatcattcgattctattgggggtattcttctgtgaggggggaagagggtaaatatattatcccgttagctaatgcggatggtgaagattatcatgaaatgaaaagaacaggtataaaacaagatgacattcaaaaaaaaagggccatatatatggggaggtggctcattccaaaatggcacgaataa

SEQ ID NO: 171791 - DNA, 516 bp, Enterobacter cloacae
atgattatcaaaaacttccgcctggcaggtactgaagtcattgaaggtttcagtatagcgaatttagtttctgaagatggtaaagactggtatgagtcgcaggctttatttaataaggataaattaaaattcgaatttgatgaaagcggtgtgattacacgattttcgtacgatgtttctatgctgtggccagtagataaatctgtaggcgagataggaaagaaatatgttcctgaagggcttaacgagaatggcgaatgggcattcgatggaaaaaaaatcattcctgttcccgttgattatgtcgcccaggctgaatttagaaaacagaatttaatgagtgcagcaacggtcattattgccccgctggaagatgcttccgggctgggtatcgccactgcggaagaggcgttgaagttgagcatgtggaaaaaataccgggttttactaaaccgtgttgataccagcaaagcgccggatattgagtggccagaggtgcctgacgatgtggcgtga

SEQ ID NO: 171792 - DNA, 711 bp, Enterobacter cloacae
atgtggggacattatggtaatgcagaaaaaggttttgcaattatttatgaaacaaatgacgggaacattaacttagaaagtaatataaaaatattcccttcacagacaaagctatctgaatcaaattattcactaggtatatcaagattcagtaaagctgaactcctcgaggtagagtacaagaacaaacctgttagagcaaatggattcaggaaattaatacccacgttttctttcagtgaacaggaagacttttacgattaccgcgaatctttattatcagaaattccaaaatacaatgagaatgatataggccgagtaaaatacaccgactggaagtatgaaaaagaactgcgcttacacttaccagtctatgatgaattaccaccaccactcagaagcataaaaatatcaacgcagcacattaaaggtgttatttttgggacaaatacaagtaacaatgacaaagaaagcattctttccgcttgttattacctaaaaaaatcacatgtaaccgaaagtgagctatatgtttttcaggcaaaacctattcccgggcaatataaaataaaagttatccccttaggtagagtctgtgacattcaaggtcgaggattacctttcatagaaaaagtaaatcctaaaaatacagaacacaccaaacaccatggggaaatattaaaaatgacagaagtaataaatgcaagttag
